United States Patent Application Publication US 2020/0163878 A1 - sequence listing, part 41

SEQ ID NO: 154566 - RNA, 1758 nt, Artificial Sequence
  derived and/or modified CDS sequence (opt3) from hemagglutinin__InfluenzaB__ACA64954
augaaggccaucauugugcugcucauggucguuaccagcaacgcugacagaauaugcacaggcaucacuuccucuaauucaccccacgugguaaaaacggcaacccagggggaggugaacgucacaggagugauuccucuuacuaccacaccaaccaagagucauuucgccaaucugaaagguacugaaacaaggggcaaguuguguccgaaaugcuuaaacuguaccgaucuggacguugcgcuagggcggcccaagugcacgggaaauaucccuagcgcucgcguguccauucuccacgagguccgaccagugacuucuggcuguuuucccaucaugcaugaucguaccaagauaagacaacugccuaaccuucugagggguuacgaacacauccgguugucgacacauaauguaauuaacgccgagaaugcaccagggggacccuauaaaaucggcacuucaggcagcugcccuaacguuaccaaugggaacggauucuuugccacaauggcuugggcagugccaaagaaugacaacaauaaaaccgccacgaguucccucacuauugaagucccguacaucuguacagagggugaggaucagauaaccguguggggcuuccacucugacaacgaaacucagauggcuaagcuguauggggauagcaaaccccagaaguuuacauccucagccaacggagugaccacgcacuacgucagucaaauuggcgguuucccuaaucagaccgaggacgggggacugccacagagcggccgcaucguuguggauuauaugguacagaagucuggcaaaacagggacuauuaccuaccaaagaggaauccucuuaccccagaagguguggugcgcguccgguaggucaaaagucaucaagggcagccugccucuuauuggggaagcagacuguuugcaugagaaauauggaggccugaacaagaguaaaccauacuacacaggugagcacgccaaggcuauagggaauugccccaucugggugaagacuccgcuaaaacucgccaacggcaccaaguaucggccucccgcaaaacugcuuaaggaacgcggauuuuucggcgcuauugccggguuucuggagggagguugggaaggcaugaucgcgggguggcauggauacacaucucacggcgcccacgguguugcaguggcugccgauuugaaauccacccaggaggcuauaaauaagauuacuaagaaccucaauagccugucggaauuagaggucaaaaaccugcagcgacucucuggggccauggacgagcuucauaaugaaauccuggaguuggaugaaaagguggacgaccuaagagcagauacgaucuccucacaaauugagcuggccguacuccugaguaacgaaggcaucauuaauagcgaggacgagcaccuucuggcuuuggaaaggaaacucaagaaaaugcugggaccauccgcgguugagauaggcaacggguguuucgaaacaaagcauaagugcaaucagaccugcuuagaucggaucgcagccggaacuuuugacgcuggugaguucucucugccuaccuuugauagccuaaacauuacagccgcaucacucaaugacgauggccuggacaaccacaccauccuuuuguauuacaguacugccgcuuccagccuggccgugacacucaugaucgcaauuuucgucguguauauggucucucgugauaacgugucauguaguauaugccuguga

SEQ ID NO: 154567 - RNA, 1758 nt, Artificial Sequence; identical to SEQ ID NO: 154562
  derived and/or modified CDS sequence (opt3) from hemagglutinin__InfluenzaB__ACA64965

SEQ ID NO: 154568 - RNA, 1758 nt, Artificial Sequence
  derived and/or modified CDS sequence (opt3) from hemagglutinin__InfluenzaB__ACA64998
augaaggccaucauugugcugcucauggucguuaccagcaacgcugacagaauaugcacaggcaucacuuccucuaauucaccccacgugguaaaaacggcaacccagggggaggugaacgucacaggagugauuccucuuacuaccacaccaaccaagagucauuucgccaaucugaaagguacugaaacaaggggcaaguuguguccgaaaugcuuuaacuguaccgauuuagacguugcgcuggggcggcccaagugcacgggaaauaucccuagcgcucgcguguccauucuacacgagguccgaccagugacuucuggcuguuuccccaucaugcaugaucguaccaagauaagacaacucccuaaccugcuuagggguuacgaacacauccggcugucgacacauaauguaauuaacgccgagaaugcaccagggggacccuauaaaaucggcacuucaggcagcugcccuaacguuaccaaugggaacggauuuuucgccacaauggcuugggcagugccaaagaaugacaacaauaaaaccgccacgaacaguuugacuauugaagucccguacaucuguacagagggugaggaucagauaaccguguggggcuuucacuccgacaacgaaacucagauggcuaagcucuauggggauucuaaaccccagaaguucacaagcuccgccaauggagugaccacgcacuacgucucacaaauuggcgguuuuccuaaccagaccgaggacgggggacugccacagaguggccgcaucguuguggauuauaugguacaaaagagcggcaaaacagggacuauuaccuaccagagaggaauccugcucccccagaagguguggugcgcgucugguagguccaaagucaucaagggcucauuaccucugauuggggaagcagacugucuucaugagaaauauggaggcuugaauaagagcaaaccauacuacacaggugagcacgccaaggcuauagggaacugccccaucugggugaagacuccgcugaaacuagccaauggcaccaaguaucggccucccgcaaaacuccugaaggaacgcggauucuuuggcgcuauugccggguuccuugagggagguugggaaggcaugaucgcgggguggcauggauacacaagucacggcgcccacgguguugcaguggcugccgaucugaaaucuacccaggaggcuauaaacaagauuacuaagaauuugaacucccucagcgaacuggaggucaaaaauuuacagcgacugucgggggccauggacgagcuccauaacgaaauccuugagcuggaugaaaagguggacgacuugagagcagauacgaucucuucccaaauugagcuagccguacugcucucaaaugaaggcaucauuaacagugaggacgagcaucugcuugcucuggaaaggaaauugaagaaaaugcucggaccaagcgcgguugagauaggcaauggguguuuugaaacaaagcacaagugcaaccagaccugccuggaucggaucgcagccggaacuuucgacgcuggugaguuuuccuuaccuaccuucgauucucugaauauuacagccgcaagccuaaacgacgauggccucgacaaccacaccauccugcuuuauuacucaacugccgcuaguuccuuggccgugacacugaugaucgcaauuuucgucguguauauggucagccgugauaaugugucuuguucaauaugccucuga

SEQ ID NO: 154569 - RNA, 1758 nt, Artificial Sequence
  derived and/or modified CDS sequence (opt3) from hemagglutinin__InfluenzaB__ACA65020
augaaggccaucauugugcugcucauggucguuaccagcaacgcugacagaauaugcacaggcaucacuuccucuaauucaccccacgugguaaaaacggcaacccagggggaggugaacgucacaggagugauuccucuuacuaccacaccaaccaagagucauuucagcaaucugaaagguacugaaacaaggggcaaguuguguccgaaaugcuuaaacuguaccgaucuggacguugcccuagggcggcccaagugcacgggaaauaucccuuccgcgcgcgugucuauucuccacgagguccgaccagugacuucgggcuguuuucccaucaugcaugaucguaccaagauaagacaacugccuaaccuucugagggguuacgaacacauccgguugucaacacauaauguaauuaacgcugagaaugccccagggggacccuauaaaaucggcacuagcggcaguugcccuaacguuaccaaugggaacggauucuuugcaacaauggccugggcugugccaaagaaugacaacaauaaaaccgcaacgaacucccucacuauugaagucccguacaucuguacagagggugaggaucagauaaccauuuggggcuuccacucugacaacgaaacucagauggccaagcuguauggggauagcaaaccccagaaguuuacauccucagcuaauggagugaccacgcacuacgugagucaaaucggcgguuucccuaaccagaccgaggacgggggacugccacagagcggccgcauugucguugauuauauggugcagaagucuggcaaaacagggacuaucaccuaccaaagaggaauccucuuaccccagaagguauggugcgccuccgguaggucaaaagugauuaagggcagccugccucuuauaggggaagcggacuguuugcaugagaaauauggaggccugaauaagaguaaaccauacuacacaggugagcacgcaaaggccaucgggaacugccccauuugggucaagacuccgcuaaaacucgcuaauggcaccaaguaucggccucccgccaaacugcuuaaggaacgcggauuuuucggcgcaaucgcuggguuucuggagggagguugggaaggcaugauagccggguggcauggauacacaucucacggcgcgcacgguguggccguugcagcugauuugaaauccacccaggaggccauuaacaagaucacuaagaaucucaacagccugucggaauuagaggugaaaaaucugcagcgacucucuggggcuauggacgagcuucauaacgaaauccuggaguuggaugaaaaggucgacgaccuaagagccgauacgauuuccucacaaaucgagcuggcagugcuccugaguaaugaaggcauuauaaacagcgaggacgagcaccuucuggccuuggaaaggaaacucaagaaaaugcugggaccauccgcuguagagguuggcaauggguguuucgaaacaaagcauaagugcaaccagaccugcuuagaucggaucgcggcaggaacuuuugacgccggugaguucucucugccuaccuuugauagccuaaauauuacagcugccucacucaacgacgauggccuggacaaccacaccauccuuuuguauuacaguacugcagccuccagccuggcugugacacucaugaucgccauuuucgucguguauauggucucucgugauaaugugucauguaguauaugccuguga

SEQ ID NO: 154570 - RNA, 1758 nt, Artificial Sequence; identical to SEQ ID NO: 154568
  derived and/or modified CDS sequence (opt3) from hemagglutinin__InfluenzaB__ACA65031

SEQ ID NO: 154571 - RNA, 1758 nt, Artificial Sequence
  derived and/or modified CDS sequence (opt3) from hemagglutinin__InfluenzaB__ACA65042
augaaggccaucauugugcugcucauggucguuaccagcaacgcugacagaauaugcacaggcaucacuuccucuaauucaccccacgugguaaaaacggcaacccagggggaggugaacgucacaggagugauuccucuuacuaccacaccaaccaagagucauuucagcaaucugaaagguacugaaacaaggggcaaguuguguccgaaaugcuuaaacuguaccgaucuggacguugcccuagggcggcccaagugcacgggaaauaucccuuccgcgcgcgugucuauucuccacgagguccgaccagugacuucgggcuguuuucccaucaugcaugaucguaccaagauaagacaacugccuaaccuucugagggguuacgaacacauccgguugucaacacauaauguaauuaacgcugagaaugccccagggggacccuauaaaaucggcacuagcggcaguugcccuaacguuaccaaugggaacggauucuuugcaacaauggccugggcugugccaaagaaugacaacaauaaaaccgcaacgaacucccucacuauugaagucccguacaucuguacagagggugaggaucagauaaccguguggggcuuccacucugacaacgaaacucagauggccaagcuguauggggauagcaaaccccagaaguuuacauccucagcuaauggagugaccacgcacuacgucagucaaauuggcgguuucccuaaccagaccgaggacgggggacugccacagagcggccgcaucauuguugauuauauggugcagaagucuggcaaaacagggacuaucaccuaccaaagaggaauccucuuaccccagaagguauggugcgccuccgguaggucaaaagugauuaagggcagccugccucuuauaggggaagcggacuguuugcaugagaaauauggaggccugaauaagaguaaaccauacuacacaggugagcacgcaaaggccaucgggaacugccccauuugggucaagacuccgcuaaaacucgcuaauggcaccaaguaucggccucccgccaaacugcuuaaggaacgcggauuuuucggcgcaaucgcuggguuucuggagggagguugggaaggcaugauagccggguggcauggauacacaucucacggcgcgcacgguguggccguugcagcugauuugaaauccacccaggaggccauuaacaagaucacuaagaaucucaacagccugucggaauuagaggugaaaaaucugcagcgacucucuggggcuauggacgagcuucauaacgaaauccuggaguuggaugaaaaggucgacgaccuaagagccgauacgauuuccucacaaaucgagcuggcagugcuccugaguaaugaaggcauuauaaacagcgaggacgagcaccuucuggccuuggaaaggaaacucaagaaaaugcugggaccauccgcuguagagaucggcaauggguguuucgaaacaaagcauaagugcaaccagaccugcuuagaucggauugcggcaggaacuuuugacgccggugaguucucucugccuaccuuugauagccuaaauaucacagcugccucacucaacgacgauggccuggacaaccacaccauccuuuuguauuacaguacugcagccuccagccuggcuguuacacucaugauugccauauucguggucuauauggugucucgugauaaugucucauguaguaucugccuguga

SEQ ID NO: 154572 - RNA, 1758 nt, Artificial Sequence
  derived and/or modified CDS sequence (opt3) from hemagglutinin__InfluenzaB__ACA65053
augaaggccaucauugugcugcucauggucguuaccagcaacgcugacagaauaugcacaggcaucacuuccucuaauucaccccacgugguaaaaacggcaacccagggggaggugaacgucacaggagugauuccucuuacuaccacaccaaccaagagucauuucgccaaucugaaagguacugaaacaaggggcaaguuguguccgaaaugcuuaaacuguaccgaucuggacguugcgcuagggcggcccaagugcacgggaaauaucccuagcgcucgcguguccauucuccacgagguccgaccagugacuucuggcuguuuucccaucaugcaugaucguaccaagauaagacaacugccuaaccuucugagggguuacgaacacauccgguugucgacacgcaauguaauuaacgccgagaaugcaccagggggacccuauaaaaucggcacuucaggcagcugcccuaacguuaccaaugggaacggauucuuugccacaauggcuugggcagugccaaagaaugacaacaauaaaaccgccacgaacagucucacuauugaagucccguacaucuguacagagggugaggaucagauaaccguguggggcuuccauuccgacaacgaaacucagauggcuaagcuguauggggauucuaaaccccagaaguuuacaagcuccgccaauggagugaccacgcacuacgucucacaaauuggcgguuucccuaaccagaccgaggacgggggacugccacagaguggcagaaucguuguggauuauaugguacaaaagagcggcaaaacagggacuauuaccuaccagaggggaauccucuuaccccagaagguguggugcgcgucuggucgguccaaagucaucaagggcucacugccucuuauuggggaagcagacuguuugcacgagaaauauggaggccugaauaagagcaaaccauacuacacaggugagcaugccaaggcuauagggaacugccccaucugggugaagacuccgcuaaaacucgccaauggcaccaaguaucgcccucccgcaaaacugcuuaaggaacgaggauuuuucggcgcuauugccggguuucuggagggagguugggaaggcaugaucgcgggguggcacggauacacaagucauggcgcccacgguguugcaguggcugccgauuugaaaucuacccaggaggcuauaaacaagauuacuaagaaucucaacucccugagcgaauuagaggucaaaaaucugcagagacucucgggggccauggacgagcuucacaacgaaauccuggaguuggaugaaaagguggacgaccuaagggcagauacgaucucuucccaaauugagcuggccguacuccugucaaaugaaggcaucauuaacagugaggacgagcaucuucuggcuuuggaacggaaacucaagaaaaugcugggaccaagcgcgguugagauaggcaauggguguuucgaaacaaagcacaagugcaaccagaccugcuuagaucguaucgcagccggaacuuuugacgcuggugaguucucccugccuaccuuugauucucuaaauauuacagccgcaagccucaacgacgauggccuggacaaccauaccauccuuuuguauuacucaacugccgcuaguucccuggccgugacacucaugaucgcaauuuucgucguguauauggucagccgcgauaaugugucuuguucaauaugccuguga

SEQ ID NO: 154573 - RNA, 1758 nt, Artificial Sequence
  derived and/or modified CDS sequence (opt3) from hemagglutinin__InfluenzaB__ACA65075
augaaggccaucauugugcugcucauggucguuaccagcaacgcugacagaauaugcacaggcaucacuuccucuaauucaccccacgugguaaaaacggcaacccagggggaggugaacgucacaggagugauuccucuuacuaccacaccaaccaagagucauuucgccaaucugaaagguacugaaacaaggggcaaguuguguccgaaaugcuuaaacuguaccgaucuggacguugcgcuagggcggcccaagugcacgggaaauaucccuagcgcucgcguguccauucuccacgagguccgaccagugacuucuggcuguuuucccaucaugcaugaucguaccaagauaagacaacugccuaaccuucugagggguuacgaacacauccgguugucgacacauaauguaauuaacgccgagaaugcaccagggggacccuauaaaaucggcacuucaggcagcugcccuaacauuaccaaugggaacggauucuuugccacaauggcuugggcaguuccaaagaaugacaacaauaaaaccgccacgaacagucucacuaucgaagugccguacauauguacagagggugaggaucagauuaccgucuggggcuuccacuccgacaacgaaacucagauggcuaagcuguauggggauucuaaaccccagaaguuuacaagcuccgccaauggagugaccacgcacuacgugucacaaaucggcgguuucccuaaccagaccgaggacgggggacugccacagaguggccgcauugucguugauuauauggugcaaaagagcggcaaaacagggacuaucaccuaccagagaggaauccucuuaccccagaagguauggugcgcgucugguagguccaaagugauuaagggcucacugccucuuauaggggaagcagacuguuugcaugagaaauauggaggccugaauaagagcaaaccauacuacacaggugagcacgccaaggcuaucgggaacugccccauuugggucaagacuccgcuaacccucgccaauggcacaaaauaucggccucccgcaaagcugcuuaaagaacgcggauuuuucggcgcuaucgccggguuucuggagggagguugggaaggcaugauagcgggguggcauggauacaccagucacggcgcccacgguguggcaguugcugccgauuugaagucuacucaggaggcuauuaacaaaaucacgaagaaucucaacucccugagcgaauuagaggugaagaaucugcagcgacucucgggggccauggacgagcuucauaacgaaauccuggaguuggaugaaaaagucgacgaccuaagagcagauacaauuucuucccaaaucgagcuggccgugcuccugucaaaugaaggcauuauaaacagugaggacgagcaccuucuggcuuuggaaaggaagcucaaaaagaugcugggaccaagcgcgguagagaucggcaauggguguuucgaaaccaaacauaagugcaaccagacuugcuuagaucggauugcagccggaaccuuugacgcuggugaguucucccugccuacauuugauucucuaaauaucaccgccgcaagccucaacgacgauggccuggacaaccacacuauccuuuuguauuacucaacagccgcuaguucccuggccguuacgcucaugauugcaauauucguggucuauauggugagccgugauaaugucucuuguucaaucugccuguga

SEQ ID NO: 154574 - RNA, 1758 nt, Artificial Sequence; identical to SEQ ID NO: 154562
  derived and/or modified CDS sequence (opt3) from hemagglutinin__InfluenzaB__ACA65086

SEQ ID NO: 154575 - RNA, 1758 nt, Artificial Sequence; identical to SEQ ID NO: 154562
  derived and/or modified CDS sequence (opt3) from hemagglutinin__InfluenzaB__ACA65097

SEQ ID NO: 154576 - RNA, 1758 nt, Artificial Sequence; identical to SEQ ID NO: 154562
  derived and/or modified CDS sequence (opt3) from hemagglutinin__InfluenzaB__ACA96552

SEQ ID NO: 154577 - RNA, 1758 nt, Artificial Sequence; identical to SEQ ID NO: 154562
  derived and/or modified CDS sequence (opt3) from hemagglutinin__InfluenzaB__ACA96563

SEQ ID NO: 154578 - RNA, 1758 nt, Artificial Sequence; identical to SEQ ID NO: 154562
  derived and/or modified CDS sequence (opt3) from hemagglutinin__InfluenzaB__ACA96574

SEQ ID NO: 154579 - RNA, 1758 nt, Artificial Sequence; identical to SEQ ID NO: 154562
  derived and/or modified CDS sequence (opt3) from hemagglutinin__InfluenzaB__ACA96585

SEQ ID NO: 154580 - RNA, 1758 nt, Artificial Sequence
  derived and/or modified CDS sequence (opt3) from hemagglutinin__InfluenzaB__ACA96596
augaaggccaucauugugcugcucauggucguuaccagcaacgcugacagaauaugcacaggcaucacuuccucuaauucaccccacgugguaaaaacggcaacccagggggaggugaacgucacaggagugauuccucuuacuaccacaccaaccaagagucauuucgccaaucugaaagguacugaaacaaggggcaaguuguguccgaaaugcuuaaacuguaccgaucuggacguugcgcuagggcggcccaagugcacgggaaauaucccuagcgcucgcguguccauucuccacgagguccgaccagugacuucuggcuguuuucccaucaugcaugaucguaccaagauaagacaacugccuaaccuucugagggguuacgaacacauccgguugucgacacauaauguaauuaacgccgagaaugcaccagggggacccuauaaaaucggcacuucaggcagcugcccuaacguuaccaaugggaacggauucuuugccacaauggcuugggcagugccaaagaaugacaacaauaaaaccgccacgaacagucucacuauugaagucccguacaucuguacagagggugaggaucagauaaccguguggggcuuccacuccgacaacgaaacucagauggcuaagcuguauggggauucuaaaccccagaaguuuacaagcuccgccaauggagugaccacgcacuacgucucacaaauuggcgguuucccuaaccagaccgaggacgggggacugccacagaguggccgcaucguuguggauuauaugguacaaaagagcggcaaaacagggacuauuaccuaccagagaggaauccucuuaccccagaagguguggugcgcgucugguagguccaaagucaucaagggcucacugccucuuauuggggaagcagacuguuugcaugagaaauauggaggccugaauaagagcaaaccauacuacacaggugagcacgccaaggcuauagggaacugccccaucugggugaagacuccgcuaaaacucgccaauggcaccaaguaucggccucccgcaaaacugcuuaaggaacgcggauuuuucggcgcuauugccggguuucuggagggagguugggaaggcaugaucgcgggguggcauggauacacaagucacggcgcccacgguguugcaguggcugccgauuugaaaucuacccaggaggcuauagacaagauuacuaagaaccucaauucccugagcgaauuagaggucaaaaaccugcagcgacucucgggggccauggaugagcuucauaaugaaauccuggaguuggacgaaaagguggacgaucuaagagcagacacgaucucuucccaaauugagcuggccguacuccugucaaacgaaggcaucauuaauagugaggaugagcaccuucuggcuuuggaaaggaaacucaagaaaaugcugggaccaagcgcgguugagauaggcaacggguguuucgaaacaaagcauaagugcaaucagaccugcuuagaccggaucgcagccggaacuuuugaugcuggugaguucucccugccuaccuuugacucucuaaacauuacagccgcaagccucaaugaugacggccuggauaaccacaccauccuuuuguauuacucaacugccgcuaguucccuggccgugacacucaugaucgcaauuuucgucguguauauggucagccgugacaacgugucuuguucaauaugccuguga

SEQ ID NO: 154581 - RNA, 1758 nt, Artificial Sequence; identical to SEQ ID NO: 154562
  derived and/or modified CDS sequence (opt3) from hemagglutinin__InfluenzaB__ACA96607

SEQ ID NO: 154582 - RNA, 1758 nt, Artificial Sequence
  derived and/or modified CDS sequence (opt3) from hemagglutinin__InfluenzaB__ACA96618
augaaggccaucauugugcugcucauggucguuaccagcaacgcugacagaauaugcacaggcaucacuuccucuaauucaccccacgugguaaaaacggcaacccagggggaggugaacgucacaggagugauuccucuuacuaccacaccaaccaagagucauuucgccaaucugaaagguacugaaacaaggggcaaguuguguccgaaaugcuuaaacuguaccgaucuggacguugcgcuagggcggcccaagugcacgggaaauaucccuagcgcucgcguguccauucuccacgagguccgaccagugacuucuggcuguuuucccaucaugcaugaucguaccaagauaagacaacugccuaaccuucugagggguuacgaacacauccgguugucgacacauaauguaauuaacgccgagaaugcaccagggggacccuauaaaaucggcacuucaggcagcugcccuaacguuaccaaugggaacggauucuuugccacaauggcuugggcagugccaaagaaugacaacaauaaaaccgccacgaacagucucacuauugaagucccguacaucuguacagagggugaggaucagauaaccguguggggcuuccacuccgacaacgaaacucagauggcuaagcuguauggggauucuaaaccccagaaguuuacaagcuccgccaauggagugaccacgcacuacgucucacaaauuggcgguuucccuaaccagaccgaggacgggggacugccacagaguggccgcaucguuguggauuauaugguacaaaagagcggcaaaacagggacuauuaccuaccagagaggaauccucuuaccccagaagguguggugcgcgucugguagguccaaagucaucaagggcucacugccucuuauuggggaagcagacuguuugcaugagaaauauggaggccugaauaagagcaaaccauacuacacaggugagcacgccaaggcuauagggaacugccccaucugggugaagacuccgcuaaaacucgccaauggcaccaaguaucggccucccgcaaaacugcuuaaggaacgcggauuuuucggcgcuauugccggguuucuggagggagguugggaaggcaugaucgcgggguggcauggauacacaagucacggcgcccacgguguugcaguggcugccgauuugaaaucuacccaggaggcuauaaacaagauuacuaagaaucucaacucccugagcgaauuagaggucaaaaaucugcagcgacucucgggggccauggacgagcuucauaacgaaauccuggaguuggaugaaaagguggacgaccuaagagcagauacgaucucuucccaaauugagcuggccguacuccugucaaaugaaggcaucauuaacagugaggacgagcaccuucuggcuuuggaaaggaaacucaagaaaaugcugggaccaagcgcgguugagauaggcaauggguguuucgaaacaaagcauaagugcaaccagaccugcuuagaucggaucgcagccggaacuuuugacgcuggugaguucuuucugccuaccuucgauucccuaaauauuacagccgcaucucucaacgacgauggccuggacaaccacaccauccuuuuguauuacagcacugccgcuucaagucuggccgugacacucaugaucgcaauuuucgucguguauauggucucccgugauaaugugagcuguucuauaugccuguga

SEQ ID NO: 154583 - RNA, 1758 nt, Artificial Sequence; identical to SEQ ID NO: 154562
  derived and/or modified CDS sequence (opt3) from hemagglutinin__InfluenzaB__ACA96629

SEQ ID NO: 154584 - RNA, 1758 nt, Artificial Sequence; identical to SEQ ID NO: 154568
  derived and/or modified CDS sequence (opt3) from hemagglutinin__InfluenzaB__ACA96640

SEQ ID NO: 154585 - RNA, 1755 nt, Artificial Sequence
  derived and/or modified CDS sequence (opt3) from hemagglutinin__InfluenzaB__ACD56566
augaaggccaucauugugcugcucauggucguuaccagcaacgcugacagaauaugcacaggcaucacuuccucuaauucaccccacgugguaaaaacggcaacccagggggaagugaacgucacaggagugauuccucuuacuaccacaccaaccaagaguuacuucgccaaucugaaagguacuaggacacggggcaaguuguguccggauugcuuaaacuguaccgaccuggauguugcgcuagggcgccccaugugcgugggaacgacuccuagcgcuaaagccuccauccuccaugaaguccgaccagugaccucuggcuguuuucccauuaugcacgaccguacaaagaucagacaacugccuaaucuucugagggguuaugagaacauacgguugucgacucagaauguaguugaugcagaaaacgccccagggggacccuaccgccucggcaccucaggcagcugcccuaaugcuacaaguaaguccggguucuuugcaaccauggccugggcugugccaaaagacaacaauaagaacgccacgaauccgcugacugucgaggugcccuauguguguacagaaggagaggaucagaucaccgucugggguuuccauucugacaacaaaacucagaugaagaaucuguacggcgauagcaacccucaaaaauuuacauccucagcgaacgggguuaccacgcacuaugugagucagauuggaggcuucccagcacagaccgaggacggugggcucccccagagcggaagaaucguaguggauuacaugguccaaaagccuaggaagacaggcacuauuguguaucagcggggcguuuuacugccacagaaaguguggugcgccucugggcgcuccaaggucaucaaaggaucacuucccuugauaggugaagcugacugucugcaugagaaguacggcgggcuaaauaaaagcaagccguacuauaccggagaacacgccaaagcaauuggcaacugcccuaucugggugaagacaccccucaagcuggcuaaugguacuaaauaccgaccuccagccaaacuucugaaggagagaggguuuuucggcgcgauugccggauuuuuggagggcgggugggaaggaaugaucgcagguuggcacggcuauaccagucauggggcucacggaguagccguugcugccgaucucaagucuacacaggaggcaaucaacaaaauuaccaagaaucugaacuccuuaagcgaacuggaggugaagaaucuccaaaggcuuucgggcgccauggacgaacugcauaacgagauauuggagcuagacgaaaaagucgaugaccugcgggcugauacuaucucuucccagauugagcucgcggugcugcuuucaaaugaagguaucauaaacagugaggacgaacaccuguuggcacucgagcguaagcugaaaaagauguuagggcccagcgccgucgauauuggcaauggauguuucgagacgaaacacaagugcaaccagacaugccuggacaagaucgcugccggcaccuuuaaugcaggggaguucucccuaccaacuuuugauucucucaacaucaccgccgcuagccugaaugacgauggacuugacaaccauacaauuuugcuguacuauucaaccgccgcaaguucccucgcggugacucugaugcuugcuaucuucauuguuuacauggugagccgcgauaacguaucuuguucaauaugccuguga

SEQ ID NO: 154586 - RNA, 1755 nt, Artificial Sequence
  derived and/or modified CDS sequence (opt3) from hemagglutinin__InfluenzaB__ACD56577
augaaggccaucauugugcugcucauggucguuaccagcaacgcugacagaauaugcacaggcaucacuuccucuaauucaccccacgugguaaaaacggcaacccagggggaagugaacgucacaggagugauuccucuuacuaccacaccaaccaagaguuacuucgccaaucugaaagguacuaggacacggggcaaguuguguccggauugcuuaaacuguaccgaccuggauguugcgcuagggcgccccaugugcgugggaacgacuccuagcgcuaaagccuccauccuccaugaaguccgaccagugaccucuggcuguuuucccauuaugcacgaccguacaaagaucagacaacugccuaaucuucugagggguuaugagaacauacgguugucgacucagaauguaaucgaugcagaaaacgccccagggggacccuaccgccucggcaccucaggcagcugcccuaaugcuacaaguaaguccggguucuuugcaaccauggccugggcuguuccaaaagacaacaauaagaacgccacgaauccgcugacuguggagguccccuauauuuguacagaaggagaggaucagaucaccgugugggguuuccauucugacaacaaagcgcagaugaagaaucuguacggcgauagcaacccucaaaaauuuacuuccucagcaaacggggugacaacccacuaugucagucagauuggaggcuucccagcccagacggaggacggugggcucccccagagcggaagaaucguuguggauuacaugguacaaaagccuaggaagaccggcacaauaguguaucagcggggcgucuuacugccacagaaaguguggugcgcuucugggcgcuccaagguuauuaaaggaucacuucccuugaucggugaagccgacugucugcaugagaaguacggcgggcuaaauaaaagcaagccguacuauacuggagaacacgcaaaagcuauuggcaacugcccuaucugggugaagacuccccucaagcuggccaaugguacaaaauaccgaccuccagcgaaacuucugaaggagagaggguuuuucggcgccaucgcaggauuuuuggagggcgggugggaaggaaugauugcugguuggcacggcuauaccagucauggggcccacggagucgcuguggccgcagaucucaagucuacccaggaggccauaaacaaaaucacaaagaaucugaacuccuuaagcgaacuggagguaaagaaucuccaaaggcuuucgggcgcuauggacgaacugcauaacgagauuuuggagcuagacgaaaaaguugaugaccugcgggcggauaccaucucuucccagauagagcucgcagugcugcuuucaaaugaagguauuaucaacagugaggacgaacaccuguuggcccucgagcguaagcugaaaaagauguuagggcccagcgcugucgauaucggcaauggauguuucgagacuaaacacaagugcaaccagacgugccuggaccgcauugccgcaggcacauuuaaugccggggaguucucccuaccaaccuuugauucucucaacaucacugcugccagccugaaugacgauggacuugacaaccauaccauuuugcuguacuauucaacagcagcgaguucccucgcugugacccugaugcuugccauauucaucgucuacauggugagcagagauaacguuucuuguucaauuugccuguga

SEQ ID NO: 154587 - RNA, 1758 nt, Artificial Sequence; identical to SEQ ID NO: 154568
  derived and/or modified CDS sequence (opt3) from hemagglutinin__InfluenzaB__ACF41658

SEQ ID NO: 154588 - RNA, 1758 nt, Artificial Sequence
  derived and/or modified CDS sequence (opt3) from hemagglutinin__InfluenzaB__ACF54136
augaaggccaucauugugcugcucauggucguuaccagcaacgcugacagaauaugcacaggcaucacuuccucuaauucaccccacgugguaaaaacggcaacccagggggaagugaacgucacaggagugauuccucuuacuaccacaccaaccaagagucauuucgccaaucugaaagguacugaaacaaggggcaaguuguguccgaaaugcuuaaacuguaccgaucuggacguugcgcuagggcggcccaagugcacgggaaauaucccuagcgcucgcguguccauucuccacgagguccgaccagugacuucuggcuguuuucccaucaugcaugaucguaccaagauaagacaacugccuaaccuucugagggguuacgaacacauccgguugucgacacauaauguaauuaacgccgagaaugcaccagggggacccuauaaaaucggcacuucaggcagcugcccuaacguuaccaaugggaacggauucuuugccacaauggcuugggcagugccaaagaaugacaacaauaaaaccgccacgaacagucucacuauugaagucccguacaucuguacagagggugaggaucagauaaccguguggggcuuccacuccgacaacaagacucagauggcuaaacuguauggggauucuaagccccagaaguuuacaagcuccgccaauggagugaccacgcacuacgucucacaaauuggcgguuucccuaaccagaccgaagacgggggacugccacagaguggccgcaucguuguggauuauaugguacagaaaagcggcaagacagggacuauuaccuaccaaagaggaauccucuuaccccagaaaguguggugcgcgucugguagguccaaggucaucaaaggcucacugccucuuauuggggaggcagacuguuugcaugaaaaguauggaggccugaauaaaagcaagccauacuacacaggugagcacgccaaggcuauagggaacugccccaucugggugaaaacuccgcuaaagcucgccaauggcaccaaauaucggccucccgcaaagcugcuuaaagagcgcggauuuuucggcgcuauugccggguuucuggaaggagguugggagggcaugaucgcgggguggcauggauacacaagucacggcgcccacgguguugcaguggcugccgauuugaagucuacccaggaagcuauaaacaagauuacuaaaaaucucaacucccugagcgaguuagaagucaagaaucugcagcgacucucgggggccauggacgagcuucauaacgagauccuggaauuggaugagaaaguggacgaccuaagagcagauacgaucucuucccaaauugaacuggccguacuccugucaaaugagggcaucauuaacagugaagacgagcaccuucuggcuuuggagaggaagcucaaaaagaugcugggaccaagcgcgguugaaauaggcaauggguguuucgagacaaagcauaaaugcaaccagaccugcuuagaucggaucgcagccggaacuuuugacgcuggugaguucucccugccuaccuuugauucucuaaauauuacagccgcaagccucaacgacgauggccuggacaaccacaccauccuuuuguauuacucaacugccgcuaguucccuggccgugacacucaugaucgcaauuuucgucguguauauggucagccgugauaauauaucuuguucaaucugccuguga

SEQ ID NO: 154589 - RNA, 1758 nt, Artificial Sequence; identical to SEQ ID NO: 154562
  derived and/or modified CDS sequence (opt3) from hemagglutinin__InfluenzaB__ACF54147

SEQ ID NO: 154590 - RNA, 1755 nt, Artificial Sequence
  derived and/or modified CDS sequence (opt3) from hemagglutinin__InfluenzaB__ACF54158
augaaggccaucauugugcugcucauggucguuaccagcaacgcugacagaauaugcacaggcaucacuuccucuaauucaccccacgugguaaaaacggcaacccagggggaggugaacgucacaggagugauuccucuuacuaccacaccaaccaagaguuacuucgccaaucugaaagguacuaggacacggggcaaguuguguccggauugcuuaaacuguaccgaccuggauguugcgcuagggcgccccaugugcgugggaacgacuccuagcgcuaaagccuccauccuccaugaaguccgaccagugaccucuggcuguuuucccauuaugcacgaccguacaaagaucagacaacuggcaaaucuucugagggguuaugagaacauacgguugucgacucagaauguaaucgaugccgaaaaggcuccugggggaccauaccgccucggcaccucaggcagcugccccaacgcaacaaguaaauccggguucuuugccaccauggcuugggccguuccuaaggacaauaacaaaaaugcgacgaacccacugacuguggaggucccguauauuuguacagaaggagaggaucagaucaccgugugggguuuccauucugacaauaagacucagaugaaaaaccuguacggcgauagcaauccccaaaaguuuacauccucagcaaacggggugaccacgcacuaugucagucagauuggaggcuucccugaccagaccgaggauggugggcucccacagagcggaagaaucguuguggacuacaugaugcaaaagcccggcaaaacaggcacuauaguauaucagaggggaguguuacugccucagaaggucuggugcgccucugggcgguccaaagugauuaaggguucacuuccauugaucggcgaagcugauugucugcaugagaaauacgggggacuaaacaagagccgccccuacuauaccggcgaacacgccaaagcaauugguaauugcccgaucuggguuaagacaccucucaagcuggcuaacgggacuaaauaccgacccccagccaagcugcugaaagagagaggcuuuuucggagcgaucgccggcuuuuuggaagggggaugggaagguaugauugcaggcuggcacggguauaccagucauggagcucacggcguggccgucgcugccgaccucaagucuacacaggaggcaauaaauaaaaucaccaagaaccuuaauuccuuaagcgaacuggaggugaagaaccuccaaaggcuuucgggugccauggacgaacugcauaaugagauuuuggagcuagaugaaaaaguagacgaucugcgggcugacacuaucucuucccagauagagcucgcgguucugcuuucaaacgaagggauuaucaauagugaggaugaacaccuguuggcacucgagcguaagcugaaaaagauguuaggcccuagcgccguggacaucggaaacggcuguuucgagacgaaacacaagugcaaucagacaugccuggaucgcauugcugccgggaccuuuaacgcaggagaguucucccuacccacuuuugacucucucaauaucaccgccgcuagccugaacgaugacggucuugauaaucauacaauuuugcuguacuauucaaccgccgcaaguucccucgcggucacucugaugcuugcuauauucaucguguacauggucagcagagacaacgugucuuguucaauuugccuguga

SEQ ID NO: 154591 - RNA, 1755 nt, Artificial Sequence
  derived and/or modified CDS sequence (opt3) from hemagglutinin__InfluenzaB__ACF54169
augaaggccaucauugugcugcucauggucguuaccagcaacgcugacagaauaugcacaggcaucacuuccucuaauucaccccacgugguaaaaacggcaacccagggggaggugaacgucacaggagugauuccucuuacuaccacaccaaccaagaguuacuucgccaaucugaaagguacuaggacacggggcaaguuguguccggauugcuuaaacuguaccgaccuggauguugcgcuagggcgccccaugugcgugggaacgacuccuagcgcuaaagccuccauccuccaugaaguccgaccagugaccucuggcuguuuucccauuaugcacgaccguacaaagaucagacaacugccuaaucuucugagggguuaugagaacauacgguugucgacucagaauguaaucgaugcagaaaacgccccagggggacccuaccgccucggcaccucaggcagcugcccuaaugcuacaaguaaguccggguucuuugcaaccauggccugggcuguuccaaaagacaacaauaagaacgccacgaauccgcugacuguggagguccccuauguguguacagaaggagaggaucagauuaccgugugggguuuccauucugacaacaaaacuccuaugaagaaucuguacggcgauagcaacccacagaaauuuacauccucagcgaacggggucaccacgcacuauguuagucaaaucggaggcuuccccgcacagaccgaggacgaagguauuccucagagcgggagaaucgugguagauuacauggugcagaagccaaggaagacaggaacuauagucuaucaacggggcgugcucuuaccccagaaaguuuggugcgccucuggccgcuccaaggugauuaaagggucacugccgcuuaucggagaggcugacuguuugcaugaaaaguacgguggccugaauaaaagcaagccuuacuauaccggggagcacgccaaagcaauuggaaacugccccaucugggucaagacaccacuaaagcucgcuaauggcacuaaauaccgaccucccgccaagcugcuuaaagagagaggguuuuucggugcgaucgccggcuuucuggaaggaggcugggaggggaugauugcaggauggcacgguuauaccagucauggcgcucacgggguggccguagcugccgauuugaagucuacacaggaagcaauauccaaaaucaccaagaaccucaauagccugucggaguuagaaguuaagaaccugcagaggcucucuggagccauggacgagcuucauaaugagauucuggaauuggacgagaaaguggaugaccuacgggcugauacuaucuccucacaaauagaacuggcgguccuccugaguaacgagggcauuaucaauagcgaagacgagcaccuucuggcauuggagcguaagcucaaaaagaugcuggguccauccgccguggauaucgggaacggcuguuucgaaacgaaacacaagugcaaucagacaugcuuagaccgcauugcugccggaaccuuuaacgcaggcgaguucucucugcccacuuuugauagccuaaauaucaccgccgcuucacucaacgacgaugggcuggacaaucauacaauucuuuuguacuauaguaccgccgcauccagccuggcggucacucucaugcuggcuauauucaucguguacaugguuucuagagauaacgugucauguaguauuugccuuuga

SEQ ID NO: 154592 - RNA, 1755 nt, Artificial Sequence
  derived and/or modified CDS sequence (opt3) from hemagglutinin__InfluenzaB__ACF54180
augaaggccaucauugugcugcucauggucguuaccagcaacgcugacagaauaugcacaggcaucacuuccucuaauucaccccacgugguaaaaacggcaacccagggggaagugaacgucacaggagugauuccucuuacuaccacaccaaccaagaguuacuucgccaaucugaaagguacuaggacacggggcaaguuguguccggauugcuuaaacuguaccgaccuggauguugcgcuagggcgccccaugugcgugggaacgacuccuagcgcuaaagccuccauccuccaugaaguccgaccagugaccucuggcuguuuucccauuaugcacgaccguacaaagaucagacaacugccuaaucuucugagggguuaugagaacauacgguugucgacucagaauguaaucgaugcagaaaacgccccagggggacccuaccgccucggcaccucaggcagcugcccuaaugcuacaaguaaguccggguucuuugcaaccauggccugggcuguuccaaaagacaacaauaagaacgccacgaauccgcugacuguggagguccccuauguguguacagaaggagaggaucagauuaccgugugggguuuccauucugacaacaaaacuccuaugaagaaucuguacggcgauagcaacccacagaaauuuacauccucagcgaacggggucaccacgcacuauguuagucaaaucggaggcuuccccgcacagaccgaggacggugggcucccucagagcggaagaauugugguagauuacauggugcagaagccaaggaagacaggcacuaucgucuaucaacggggcguguuacugccccagaaaguuuggugcgccucugggcgcuccaaggugauaaaaggaucacuuccguugauuggugaagcugacugucugcaugagaaguacggcgggcuaaauaaaagcaagccuuacuauaccggagaacacgccaaagcaaucggcaacugccccauuugggucaagacaccacucaagcuggcuaaugguacuaaauaccgaccucccgccaaacuucugaaggagagaggguuuuucggcgcgaucgccggauuuuuggagggcgggugggaaggaaugaucgcagguuggcacggcuauaccagucauggggcucacggaguggccguagcugccgaucucaagucuacacaggaggcaauuaacaaaauaaccaagaaucugaacuccuuaagcgaacuggagguuaagaaucuccagaggcuuucgggcgccauggacgaacugcauaacgagaucuuggagcuagacgaaaaaguggaugaccugcgggcugauacuauuucuucccaaaucgagcucgcgguccugcuuucaaaugaagguauaauuaacagugaggacgaacaccuguuggcacucgagcguaagcugaaaaagauguuagggccaagcgccguggauaucggcaauggauguuucgagacgaaacacaagugcaaccagacaugccuggaccgcaucgcugccggcaccuuuaaugcaggggaguucucccuacccacuuuugauucucucaacauuaccgccgcuagccugaaugacgauggacuugacaaccauacaaucuugcuguacuauucaaccgccgcaaguucccucgcggucacucugaugcuugcuauuuucauaguguacaugguuagcagagauaacgugucuuguucaaucugccuguga

SEQ ID NO: 154593 - RNA, 1755 nt, Artificial Sequence
  derived and/or modified CDS sequence (opt3) from hemagglutinin__InfluenzaB__ACF54202
augaaggccaucauugugcugcucauggucguuaccagcaacgcugacagaauaugcacaggcaucacuuccucuaauucaccccacgugguaaaaacggcaacccagggggaggugaacgucacaggagugauuccucuuacuaccacaccaaccaagaguuacuucgccaaucugaaagguacuaggacacggggcaaguuguguccggauugcuuaaacuguaccgaccuggauguugcgcuagggcgccccaugugcgugggaacgacuccuagcgcuaaagccuccauccuccaugaaguccgaccagugaccucuggcuguuuucccauuaugcacgaccguacaaagaucagacaacugccuaaucuucugagggguuaugagaacauacgguugucgacucagaauguaaucgaugcagaaaacgccccagggggacccuaccgccucggcaccucaagaagcugcccuaaugcuacaaguaaguccggcuucuuugcaaccauggccugggcuguuccaaaagacaacaauaagaacgccacgaauccgcugacuguggagguccccuauguguguacagaaggggaggaucagauuaccguguggggauuccauucugacaacaaaacucagaugaagaaucuguacggugauagcaacccucaaaaauuuacauccucagcgaacggcgucaccacgcacuauguuagucagaucgggggauucccagcacagaccgaggacgaaggccucccccagagcgguaggauugugguagauuacauggugcaaaagccucggaagacagggacuaucgucuaucagcgcggaguguuacugccacagaaaguuuggugcgccucuggccgauccaaggugauaaaaggcucacuucccuugauuggggaggcugacugucugcaugaaaaguacggaggucuaaauaaaagcaagccguacuauaccggcgagcacgccaaagcaaucgggaacugcccuauuugggucaagacaccccucaagcuggcuaauggaacuaaauacagaccuccagccaaacuucugaaggagaggggcuuuuucggugcgaucgccggguuuuuggaaggcggaugggagggcaugaucgcaggguggcacggauauaccagucauggugcucacggcguggccguagcugccgaucucaagucuacacaggaagcaauuaacaaaauaaccaagaaucugaacuccuuaagcgagcuggaaguuaagaaucuccaacggcuuucgggggccauggacgagcugcauaacgagaucuuggaacuagacgagaaaguggaugaccugcgugcugauacuauuucuucccagaucgaacucgcgguccugcuuucaaaugagggaauaauuaacagugaagacgagcaccuguuggcacucgagcgcaagcugaaaaagauguuaggccccagcgccguggauaucgguaauggguguuucgaaacgaaacacaagugcaaccagacaugccuggacagaaucgcugccggcaccuuuaaugcaggagaguucucccuaccaacuuuugauucucucaacauuaccgccgcuagccugaaugacgauggccuugacaaccauacaaucuugcuguacuauucaaccgccgcaaguucccucgcggucacucugaugcuugcuauuuucauaguguacaugguuagcagggauaacgugucuuguucaaucugccuguga

SEQ ID NO: 154594 - RNA, 1755 nt, Artificial Sequence
  derived and/or modified CDS sequence (opt3) from hemagglutinin__InfluenzaB__ACF54213
augaaggccaucauugugcugcucauggucguuaccagcaacgcugacagaauaugcacaggcaucacuuccucuaauucaccccacgugguaaaaacggcaacccagggggaggugaacgucacaggagugauuccucuuacuaccacaccaaccaagaguuacuucgccaaucugaaagguacuaggacacggggcaaguuguguccggauugcuuaaacuguaccgaccuggauguugcgcuagggcgccccaugugcgugggaacgacuccuagcgcuaaagccuccauccuccaugaaguccgaccagugaccucuggcuguuuucccauuaugcacgaccguacaaagaucagacaacugccuaaucuucugagggguuaugagaacauacgguugucgacucagaauguaaucgaugcagaaaaggccccagggggacccuaccgccucggcaccucaggcagcugcccuaacgcuacaaguaaauccggguucuuugcaaccauggccugggcuguuccaaaggacaauaacaaaaaugccacgaacccgcugacuguggagguccccuauauuuguacagaaggagaggaucagaucaccgugugggguuuccauucugacgauaagacucagaugaaaaaucuguacggcgacagcaacccucaaaaguuuacauccucagcgaauggggugaccacgcacuaugucagucagauuggaggcuucccagaucagaccgaggacggugggcucccccagagcggaagaaucguuguggauuacaugaugcaaaagccuggcaaaacaggcacuauaguauaucagaggggaguguuacugccacagaaggucuggugcgcaucugggcgguccaaagugauuaaggguucacuucccuugaucggcgaagccgacugucugcaugagaaauacgggggacuaaacaagagcaaaccguacuauaccggcgaacacgcuaaggccauugguaacugcccuaucuggguuaagacaccccucaaacuggcaaaugggacuaaguaccgcccuccagcuaaacuucugaaggagcgaggcuuuuucggagccaucgcgggcuuuuuggaagggggaugggaagguaugauugccggcuggcacggguauaccagucauggagcacacggcguggcugucgccgcugaccucaaaucuacacaggaggccauaaacaagaucaccaagaaucugaacuccuuaagcgaacuggaggugaaaaaucuccaaagacuuucgggugcaauggaugaacugcauaacgagauuuuggagcuagacgaaaagguagaugaccugagggccgauacuaucucuucccagauagagcucgcuguucugcuuucaaaugaagggauuaucaacagugagaaugaacaccuguuggcgcucgagcggaaacugaagaaaauguuaggccccagcgcaguggacaucggaaacggcuguuucgagacgaagcacaagugcaaucagacaugccuggaucguauugccgcugggaccuuuaacgccggagaguucucccuaccaacuuuugacucucucaauaucaccgcagccagccugaacgaugacggucuugauaaucauacaauuuugcuguacuauucaaccgcugccaguucccucgcagucacucugaugcuugcgauauucaucguguacauggucagccgcgacaacgugucuuguucaauuugccuguga

SEQ ID NO: 154595 - RNA, 1758 nt, Artificial Sequence
  derived and/or modified CDS sequence (opt3) from hemagglutinin__InfluenzaB__ACF54224
augaaggccaucauugugcugcucauggucguuaccagcaacgcugacagaauaugcacaggcaucacuuccucuaauucaccccacgugguaaaaacggcaacccagggggaggugaacgucacaggagugauuccucuuacuaccacaccaaccaagagucauuucgccaaucugaaagguacuaagacaaggggcaaauuguguccgaagugcuuaaacuguaccgaucuggacguugcgcuagggcggcccaagugcacgggaaauaucccuagcgcugaaguguccauucuccacgagguccgcccagugacuucuggcuguuuucccaucaugcaugaucgaaccaaaauacgucaacugccuaaccuucugagagguuacgaacacaucagguugucgacacauaauguaauuaacgccgagaaggcaccagggggacccuauaaaaucggcacuucaggcagcugcccuaauguuaccaacgggaauggauucuuugccacaauggcuugggcagugccaaagaacgacaauaacaaaaccgccacgaauagucucacuauugaagucccguacaucuguacagagggugaggaucagauaaccguguggggcuuccacuccgacaacgaaacucagauggcuaagcuguauggggauucuaagccccagaaauuuacaagcuccucaaacggagugaccacgcacuacgucagucaaauuggcgguuucccuaaucagaccgaggacgggggacugccacagagcggccggaucguuguggauuauaugguacagaagucuggcaaaacagggacuauuaccuaccaacgcggaauccucuuaccccagaagguguggugcgccuccgguagaucaaaagucaucaagggcagccugccucuuauuggggaagcggacuguuugcaugagagguauggaggccugaacaaaaguaagccauacuacacaggugagcacgcaaaggccauagggaauugccccaucugggugaaaacuccgcuaaagcucgcuaacggcaccaaauaucggccucccgccaagcugcuuaaagaacgcggauuuuucggcgcaauugcuggguuucuggagggagguugggaaggcaugaucgccggguggcauggauacacaucucacggcgcgcacgguguugccguggcagcugauuugaaguccacccaggaggccauaaauaagauuacuaaaaaccucaauagccugucggaauuagaggucaagaaccugcagcgacucucuggggcuauggacgagcuucauaaugaaauccuggaguuggaugaaaaaguggacgaccuaagagccgauacgaucuccucacaaauugagcuggcaguacuccugaguaacgaaggcaucauuaauagcgaggacgagcaccuucuggccuuggaaaggaagcucaaaaagaugcugggaccauccgcuguugagauaggcaacggguguuucgaaacaaagcauaaaugcaaucagaccugcuuagaucggaucgcggcaggaacuuuugacgccggugaguucucucugccuaccuuugauagccuaaacauuacagcugccucacucaaugacgauggccuggacaaccacaccauccuuuuguauuacaguacugcagccuccagccuggcugugacacucaugaucgccauuuucgucguguauauggucucucgugauaacgugucauguaguauaugccuguga

SEQ ID NO: 154596 - RNA, 1755 nt, Artificial Sequence
  derived and/or modified CDS sequence (opt3) from hemagglutinin__InfluenzaB__ACF54257
augaaggccaucauugugcugcucauggucguuaccagcaacgcugacagaauaugcacaggcaucacuuccucuaauucaccccacgugguaaaaacggcaacccagggggaggugaacgucacaggagccauuccucuuacuaccacaccaaccaagagucauuucgcgaaucugaaagguacuaagacaaggggcaaauuguguccgaccugcuuaaacuguacggaucuggacguggcucuagggcggcccaugugcguuggaaucacuccuagcgccaaggcauccauucuccacgaagugcgcccagucaccucuggcuguuuucccaucaugcaugaucgaacaaagauacgucaacugccuaaucuucugagagguuacgagaaaaucagguugucgacucagaacgugauugacgccgaaaaggcuccagggggacccuaucggcucggcaccucaggcagcugcccuaaugcaacaaguaaauccggguucuuugccaccauggcuugggccguaccacgcgagaacaauaagacggcgacuaacccgcugacaguugaagugccccacaucuguaccaaagaggaggaucagauuacugucuggggauuccauucugacaauaagccucagaugaagaaccuguacggugauagcaauccacaaaaauuuacauccucagcaaacggcaucaccacgcacuaugugagucagauagggggauuccccgaccagaccgaagauggcggucucccucagagcgggagaauuguggucgacuacaugguucaaaagccaggaaaaacaggcacuaucguguaucagaggggcauuuuacugccccagaagguauggugcgccucugggcgguccaaagugaucaagggaucacuuccguugaucggugaggcugauugucugcacgaaaaauacggcgggcuaaauaagagcaagccuuauuacaccggagagcaugccaaagcaauuggcaacugccccauaugggucaagacaccacucaaacuggcuaacgguacuaaguaccgcccucccgccaaacuucugaaggagcgaggguuuuucggcgcgaucgccggauuuuuggaaggcgggugggagggaaugauugcagguuggcacggcuauaccagucauggggcucacggaguggccguugcugccgaccucaagucuacacaggaagcaaucaauaaaauaaccaagaacuuaaauucccugagcgagcuggaagugaaaaaccuccaaagacuuucgggcgccauggaugagcugcacaaugagauuuuggaacuagacgagaaggucgacgaucugagggcugacacuaucucuucccagaucgaacucgcggugcugcuuucaaacgaggguauuaucaauagugaagaugagcaucuguuggcacucgagcggaaacugaagaagauguuagggccaagcgccguagacauuggcaacggauguuucgaaacgaaacacaagugcaaucagacaugccuggaucguauagcugccggcaccuuuaacgcaggggaguucucccuacccacuuuugacucucucaauaucaccgccgcuagccugaacgaugacggacuugauaaucauacaauuuugcuguacuauucaaccgccgcaaguucccucgcgguuacucugaugaucgcuaucuucauuguguacaugauaagccgcgacaacgucucuuguucaaucugccuuuga

SEQ ID NO: 154597 - RNA, 1755 nt, Artificial Sequence
  derived and/or modified CDS sequence (opt3) from hemagglutinin__InfluenzaB__ACF54268
augaaggccaucauugugcugcucauggucguuaccagcaacgcugacagaauaugcacaggcaucacuuccucuaauucaccccacgugguaaaaacggcaacccagggggaggugaacgucacaggagccauuccucuuacuaccacaccaaccaagagucauuucgcgaaucugaaagguacuaagacaaggggcaaauuguguccgaccugcuuaaacuguacggaucuggacguggcucuagggcggcccaugugcguuggaaucacuccuagcgccaaggcauccauucuccacgaagugcgcccagucaccucuggcuguuuucccaucaugcaugaucgaacaaagauacgucaacugccuaaucuucugagagguuacgagaaaaucagguugucgacucagaacgugauugacgccgaaaaggcuccagggggacccuaucggcucggcaccucaggcagcugcccuaaugcaacaaguaaauccggguucuuugccaccauggcuugggccguaccacgcgagaacaauaagacggcgacuaacccgcugacaguugaagugccccacaucuguaccaaagaggaggaucagauuacugucuggggauuccauucugacaauaagauccagaugaagaaccuguacggugauagcaauccucaaaaauuuacauccucagcaaacggcauaaccacgcacuaugugagucagauugggggauucccagaccagaccgaagauggcggucucccccagagcgggagaaucguggucgacuacaugguucaaaagccuggaaaaacaggcacuauuguguaucagaggggcaucuuacugccacagaagguauggugcgccucugggcgguccaaagugaucaagggaucacuucccuugauuggugaggcugauugucugcacgaaaaauacggcgggcuaaauaagagcaagccguauuacaccggagagcaugccaaagcaauaggcaacugcccuaucugggucaagacaccccucaaacuggcuaacgguacuaaguaccgcccuccagccaaacuucugaaggagcgaggguuuuucggcgcgauugccggauuuuuggaaggcgggugggagggaaugaucgcagguuggcacggcuauaccagucauggggcucacggaguggccguugcugccgaccucaagucuacacaggaagcaauaaauaaaauuaccaagaacuuaaauucccugagcgagcuggaagugaaaaaccuccaaagacuuucgggcgccauggaugagcugcacaaugagaucuuggaacuagacgagaaggucgacgaucugagggcugacacuaucucuucccagauugaacucgcggugcugcuuucaaacgaggguaucauuaauagugaagaugagcaucuguuggcacucgagcggaaacugaagaagauguuagggcccagcgccauagacaucggcaacggauguuucgaaacgaaacacaagugcaaucagacaugccuggaucguauugcugccggcaccuuuaacgcaggggaguucucccuaccaacuuuugacucucucaauaucaccgccgcuagccugaacgaugacggacuugauaaucauacaaucuugcuguacuauucaaccgccgcaaguucccucgcgguaacucugaugauugcuauauucaucguuuacaugauuagccgcgacaacgugucuuguucaaucugccuuuga

SEQ ID NO: 154598 - RNA, 1755 nt, Artificial Sequence
  derived and/or modified CDS sequence (opt3) from hemagglutinin__InfluenzaB__ACF54279
augaaggccaucauugugcugcucauggucguuaccagcaacgcugacagaauaugcacaggcaucacuuccucuaauucaccccacgugguaaaaacggcaacccagggggaggugaacgucacaggagccauuccucuuacuaccacaccaaccaagagucauuucgcgaaucugaaagguacuaagacaaggggcaaauuguguccgaccugcuuaaacuguacggaucuggacguggcucuagggcggcccaugugcguuggaaucacuccuagcgccaaggcauccauucuccacgaagugcgcccagucaccucuggcuguuuucccaucaugcaugaucgaacaaagauacgucaacugccuaaucuucugagagguuacgagaaaaucagguugucgacucagaacgugauugacgccgaaaaggcuccagggggacccuaucggcucggcaccucaggcagcugcccuaaugcaacaaguaaauccggguucuuugccaccauggcuugggccguaccacgcgagaacaauaagacggcgacuaacccgcugacaguugaagugccccacaucuguaccaaagaggaggaucagauuacugucuggggauuccauucugacaauaagacacagaugaagaaccuguacggugauagcaauccucaaaaauuuaccuccucagcaaacggcaucacgacccacuaugugagucagauagggggauucccagaccagacagaagauggcggucucccccagagcgggagaauuguggucgacuacaugguucaaaagccuggaaaaacuggcaccaucguguaucagaggggcauuuuacugccacagaagguauggugcgccucugggcgguccaaagugaucaagggaucacuucccuugaucggugaggcugauugucugcacgaaaaauacggcgggcuaaauaagagcaagccguauuacacaggagagcaugccaaagcaauuggcaacugcccuauaugggucaagacuccccucaaacuggcuaacgguaccaaguaccgcccuccagccaaacuucugaaggagcgaggguuuuucggcgcgaucgccggauuuuuggaaggcgggugggagggaaugauugcagguuggcacggcuauacaagucauggggcucacggaguggccguugcugccgaccucaagucuacccaggaagcaaucaauaaaauaacuaagaacuuaaauucccugagcgagcuggaagugaaaaaccuccaaagacuuucgggcgccauggaugagcugcacaaugagauuuuggaacuagacgagaaggucgacgaucugagggcugacacgaucucuucccagaucgaacucgcggugcugcuuucaaacgaggguauuaucaauagugaagaugagcaucuguuggcacucgagcggaaacugaagaagauguuagggcccagcgccguagacauuggcaacggauguuucgaaacaaaacacaagugcaaucagaccugccuggaucguauagcugccggcacuuuuaacgcaggggaguucucccuaccaaccuuugacucucucaauaucacagccgcuagccugaacgaugacggacuugauaaucauaccauuuugcuguacuauucaacugccgcaaguucccucgcgguuacacugaugaucgcuaucuucauuguguacaugauaagccgcgacaacgucucuuguucaaucugccuuuga

SEQ ID NO: 154599 - RNA, 1755 nt, Artificial Sequence
  derived and/or modified CDS sequence (opt3) from hemagglutinin__InfluenzaB__ACF54290
augaaggccaucauugugcugcucauggucguuaccagcaacgcugacagaauaugcacaggcaucacuuccucuaauucaccccacgugguaaaaacggcaacccagggggaagugaacgucacaggagugauuccucuuacuaccacaccaaccaagaguuacuucgccaaucugaaagguacuaggacacggggcaaguuguguccggauugcuuaaacuguaccgaccuggauguugcgcuagggcgccccaugugcgugggaacgacuccuagcgcuaaagccuccauccuccaugaaguccgaccagugaccucuggcuguuuucccauuaugcacgaccguacaaagaucagacaacugccuaaucuucugagggguuaugagaacauacgguugucgacucagaauguaguugaugcagaaaacgccccagggggacccuaccgccucggcaccucaggcagcugcccuaaugcuacaaguaaguccggguucuuugcaaccauggccugggcugugccaaaagacaacaauaagaacgccacgaauccgcugacugucgaggugcccuauguguguacagaaggagaggaucagaucaccgucugggguuuccauucugacaaaaagacucagaugaaaaaccuguacggcgauagcaauccucaaaaguuuacauccucagcgaacgggguuaccacgcacuaugugagucagauuggaggcuucccagcacagaccgaggacggugggcucccccagagcggaagaaucguaguggauuacaugguccaaaagccuaggaaaacaggcacuauuguguaucagcggggcguuuuacugccacagaagguguggugcgccucugggcgcuccaaagucaucaagggaucacuucccuugauaggugaagcugacugucugcaugagaaauacggcgggcuaaacaagagcaaaccguacuauaccggagaacacgccaaggcaauuggcaauugcccuaucugggugaagacaccccucaaacuggcuaacgguacuaaguaccgaccuccagccaaacuucugaaggagagaggguuuuucggcgcgauugccggauuuuuggagggcgggugggaaggaaugaucgcagguuggcacggcuauaccagucauggggcucacggaguagccguugcugccgaucucaaaucuacacaggaggcaaucaauaagauuaccaagaacuuaaauucccugagcgaacuggaggugaaaaaccuccaaaggcuuucgggcgccauggacgaacugcauaaugagauauuggagcuagacgaaaaggucgaugaccugcgggcugauacuaucucuucccagauugagcucgcggugcugcuuucaaacgaagguaucauaaauagugaggacgaacaccuguuggcacucgagcguaaacugaagaaaauguuagggcccagcgccgucgauauuggcaacggauguuucgagacgaagcacaagugcaaucagacaugccuggacaaaaucgcugccggcaccuuuaacgcaggggaguucucccuaccaacuuuugauucucucaauaucaccgccgcuagccugaacgacgauggacuugacaaucauacaauuuugcuguacuauucaaccgccgcaaguucccucgcggugacucugaugcuugcuaucuucauuguuuacauggugagccgcgauaacguaucuuguucaauaugccuguga

SEQ ID NO: 154600 - RNA, 1758 nt, Artificial Sequence
  derived and/or modified CDS sequence (opt3) from hemagglutinin__InfluenzaB__ACF54312
augaaggccaucauugugcugcucauggucguuaccagcaacgcugacagaauaugcacaggcaucacuuccucuaauucaccccacgugguaaaaacggcaacccagggggaggugaacgucacaggagugauuccucuuacuaccacaccaaccaagagucauuucgccaaucugaaagguacuaagacaaggggcaaauuguguccgaagugcuuaaacuguaccgaucuggacguugcgcuagggcggcccaagugcacgggaaauaucccuagcgcugaaguguccauucuccacgagguccgcccagugacuucuggcuguuuucccaucaugcaugaucgaaccaaaauacgucaacugccuaaccuucugagagguuacgaacacaucagguugucgacacauaauguaauuaacgccgagaaggcaccagggggacccuauaaaaucggcacuucaggcagcugcccuaauguuaccaacgggaauggauucuuugccacaauggcuugggcagugccaaagaacgacaauaacaaaaccgccacgaauagucucacuauugaagucccguacaucuguacagagggugaggaucagauaaccguguggggcuuccacuccgacucugaaacucagauggcuaagcuguauggggauagcaagccccagaaauuuacauccucaaguaacggagugaccacgcacuacauuagccaaaucggcgguuucccuaaccagaccgaggacgggggacugccacagucuggccggauugucguugauuauauggugcagaaguccggcaaaacagggacuaucaccuaccaacgcggaauccucuuaccccagaagguauggugcgccucagguagaagcaaagugauuaagggcagucugccucuuauaggggaagcggacuguuugcaugagaaauauggaggccugaauaagucuaagccauacuacacaggugagcacgcaaaagccaucgggaacugccccauuugggucaagacuccgcuaaaacucgcuaauggcaccaaguauaggccucccgccaaacugcuuaaggaacggggauuuuucggcgcaaucgcuggguuucuggagggagguugggaaggcaugauagccggguggcauggauacacaucccacggcgcgcacgguguggccguugcagcugaucucaagagcacccaggaggccauuaacaaaaucacuaagaauuugaacucgcugucugaauuagaggugaaaaaucugcagcgccucuccggggcuauggacgagcuucauaacgaaauccuggaguuggaugaaaaggucgacgaccuacgagccgauacgauuucaagucaaaucgagcuggcagugcuccugagcaaugaaggcauuauaaacuccgaggacgagcaccuucuggccuuggaaagaaaacucaagaagaugcugggaccaucugcuaucgagauuggcaauggguguuucgaaacaaaacauaagugcaaccagaccugcuuagauaggaucgcggcaggaacuuuugacgccggugaguucagccugccuaccuuugauucacuaaauaucacagcugccagucucaacgacgauggccuggacaaucacaccauucuuuuguauuacuccacugcagccagcucucuggcuguaacacucaugauagccaucuucguuguguauauggucucacgggauaacgugaguuguagcauuugccuguga

SEQ ID NO: 154601 - RNA, 1758 nt, Artificial Sequence
  derived and/or modified CDS sequence (opt3) from hemagglutinin__InfluenzaB__ACF54323
augaaggccaucauugugcugcucauggucguuaccagcaacgcugacagaauaugcacaggcaucacuuccucuaauucaccccacgugguaaaaacggcaacccagggggaggugaacgucacaggagugauuccucuuacuaccacaccaaccaagagucauuucgccaaucugaaagguacugaaacaaggggcaaguuguguccgaaaugcuuaaacuguaccgaucuggacguugcgcuagggcggcccaagugcacgggaaauaucccuagcgcucgcguguccauucuccacgagguccgaccagugacuucuggcuguuuucccaucaugcaugaucguaccaagauaagacaacugccuaaccuucugagggguuacgaacacauccgguugucgacacgcaauguaauuaacgccgagaaugcaccagggggacccuauaaaaucggcacuucaggcagcugcccuaacguuaccaaugggaacggauucuuugccacaauggcuugggcagugccaaagaaugacaacaauaaaaccgccacgaacagucucacuauugaagucccguacaucuguacagagggugaggaucagauaaccguguggggcuuccauuccgacaacgaagcucagauggccaagcuguauggggauucuaaaccccagaaguuuacuagcuccgcgaauggagugacaacccacuacgucucacaaauuggcgguuucccuaaccagacggaggacgggggacugccacagaguggcagaaucguuguggauuauaugguacaaaagagcggcaaaaccgggacaauuacuuaccagaggggaauccucuuaccccagaagguguggugcgcaucuggucgguccaaagucaucaagggcucacugccucuuauuggggaagccgacuguuugcacgagaaauauggaggccugaauaagagcaaaccauacuacaccggugagcaugcuaaggccauagggaacugccccaucugggugaagacaccgcuaaaacucgcaaauggcacuaaguaucgcccucccgcuaaacugcuuaaggaacgaggauuuuucggcgccauugcgggguuucuggagggagguugggaaggcaugaucgccggguggcacggauacaccagucauggcgcacacgguguugcuguggccgcugauuugaaaucuacacaggaggccauaaacaagauuaccaagaaucucaacucccugagcgaauuagaggucaaaaaucugcagagacucucgggggcaauggacgagcuucacaacgaaauccuggaguuggaugaaaagguggacgaccuaagggccgauacuaucucuucccaaauugagcuggcuguacuccugucaaaugaaggcaucauuaacagugaggacgagcaucuucuggcguuggaacggaaacucaagaaaaugcugggaccaagcgcaguugagauaggcaauggguguuucgaaacgaagcacaagugcaaccagacaugcuuagaucguaucgccgcuggaaccuuugacgccggugaguucucccugccuacuuuugauucucuaaauauuaccgcagccagccucaacgacgauggccuggacaaccauacaauccuuuuguauuacucaaccgcugccaguucccuggcagugacucucaugaucgcgauuuucgucguguauauggucagccgcgauaaugugucuuguucaauaugccuguga

SEQ ID NO: 154602 - RNA, 1755 nt, Artificial Sequence
  derived and/or modified CDS sequence (opt3) from hemagglutinin__InfluenzaB__ACF54345
augaaggccaucauugugcugcucauggucguuaccagcaacgcugacagaauaugcacaggcaucacuuccucuaauucaccccacgugguaaaaacggcaacccagggggaggugaacgucacaggagugauuccucuuacuaccacaccaaccaagaguuacuucgccaaucugaaagguacuaggacacggggcaaguuguguccggauugcuuaaacuguaccgaccuggauguugcgcuagggcgccccaugugcgugggaacgacuccuagcgcuaaagccuccauccuccaugaaguccgaccagugaccucuggcuguuuucccauuaugcacgaccguacaaagaucagacaacuggcaaaucuucugagggguuaugagaacauacgguugucgacucagaauguaaucgaugccgaaaaggcuccugggggaccauaccgccucggcaccucaggcagcugccccaacgcaacaaguaaauccggguucuuugccaccauggcuugggccguuccuaaggacaauaacaaaaaugcgacgaacccacugacuguggaggucccguauauuuguacagaaggagaggaucagaucaccgugugggguuuccauucugacaauaaggcacagaugaaaaaccuguacggcgauagcaauccccaaaaguuuacuuccucagccaacggggugacaacccacuaugucagucagauuggaggcuucccugaccagacggaggauggugggcucccacagagcggaagaaucguuguggacuacaugauacaaaagcccggcaaaaccggcacaauuguauaucagcgcgggguguuacugccucagaaggucuggugcgcuucuggacgguccaaagugaucaaggguucacuuccauugauuggcgaagccgauugucugcaugagaaauacgggggacuaaacaagagcaaacccuacuauacuggcgaacacgcaaaggcuaucgguaauugcccgaucuggguuaagaccccucucaaacuggccaacgggacaaaguacaggcccccagcgaaacuucugcgagagagaggcuuuuucggagccauugcaggcuuuuuggaagggggaugggaagguaugauagcuggcuggcacggguauacuucccauggagcccacggcguggcugucgccgcagaccucaagucuacccaggaggccaucaauaaaauuacaaagaaccugaauaguuuaagcgaacuggaggugaagaaccuccaaaggcuuucgggugcuauggacgaacugcauaaugagaucuuggagcuagaugaaaaaguagacgaucugcgggcggacaccauaucuucccagauugagcucgcaguucugcuuucaaacgaagggaucaucaauagugaggaugaacaccuguuggcccucgagcguaagcugaaaaagauguuaggcccuagcgcuguggacauuggaaacggcuguuucgagacuaaacacaagugcaaucagacgugccuggaucgcaucgccgcagggacauuuaacgccggagaguucucccuacccaccuuugacucucucaauauuacugcugccagccugaacgaugacggucuugauaaucauaccauauugcuguacuauucaacagcagcgaguucccucgcugucacccugaugcuugccaucuucauuguguacauggucagcagagacaacgugucuuguucaaucugccuguga

SEQ ID NO: 154603 - RNA, 1755 nt, Artificial Sequence
  derived and/or modified CDS sequence (opt3) from hemagglutinin__InfluenzaB__ACF54367
augaaggccaucauugugcugcucauggucguuaccagcaacgcugacagaauaugcacaggcaucacuuccucuaauucaccccacgugguaaaaacggcaacccagggggaggugaacgucacaggagugauuccucuuacuaccgccccaacaaagaguuacuucgcgaaucugaaagguaccaggacucggggcaaguuguguccggauugcuuaaacuguacagaccuggauguugcucuagggcgccccaugugcgugggaaccacgccuagcgccaaagcauccauccuccaugaaguccgaccagugacuucuggcuguuuucccauuaugcacgaccguaccaagaucagacaacuggccaaucuucugagggguuaugagaacauacgguugucgacacagaauguaaucgaugcugaaaaggcaccugggggaccauaccgccucggcacuucaggcagcugccccaacgccaccaguaaauccggguucuuugcuacaauggccugggcgguuccuaaggacaauaacaaaaaugcaaccaacccacugacgguggaggucccguauauuuguacugaaggagaggaucagaucacagugugggguuuccauucugacagcaagacccagaugaaaaaucuguacggcgauuccaacccccaaaaguuuacuucaagugccaauggggugacaacccacuaugucagccagauuggaggcuucccugaccagacggaggauggugggcucccacagucuggaagaaucguuguggacuacaugaugcaaaagcccggcaaaaccggcacaauaguauaucagcgcgggguguuacugccucagaaggucuggugcgcuuccggacggucaaaagugauuaaggguagccuuccauugaucggcgaagccgauugucugcaugagaaauacgggggacuaaacaagaguaaacccuacuauacuggcgaacacgcaaaggcuauugguaacugcccgaucuggguuaagaccccucucaaacuggccaaugggacaaaguacaggcccccagcgaaacuucugaaggagcgaggcuuuuucggagccaucgcaggcuuuuuggaagggggaugggaagguaugauugcuggcuggcacggguauacuucucauggagcccacggcguggcugucgccgcagaccucaaauccacccaggaggccauaaacaagaucacaaagaaucugaacagcuuaucggaacuggaggugaaaaaucuccaaagacuuucuggugcuauggacgaacugcauaacgagauuuuggagcuagaugaaaagguagacgaucugagggcggacaccaucuccucacagauagagcucgcaguucugcuuaguaaugaagggauuaucaacagcgaggaugaacaccuguuggcccucgagcggaaacugaagaaaauguuaggcccuuccgcuguggacaucggaaauggcuguuucgagacuaagcacaagugcaaccagacgugccuggaucguauugccgcagggacauuuaaugccggagaguucucucuacccaccuuugacagccucaacaucacugcugccucacugaaugaugacggucuugauaaccauaccauuuugcuguacuauaguacagcagcguccagccucgcugucacccugaugcuugccauauucaucguguacauggucucucgcgacaaugugucauguaguauuugccuguga

SEQ ID NO: 154604 - RNA, 1755 nt, Artificial Sequence
  derived and/or modified CDS sequence (opt3) from hemagglutinin__InfluenzaB__ACN32556
augaaggccaucauugugcugcucauggucguuaccagcaacgcugacagaauaugcacaggcaucacuuccucuaauucaccccacgugguaaaaacggcaacccagggggaggugaacgucacaggagccauuccucuuacuaccacaccaaccaagagucauuucgcgaaucugaaagguacuaagacaaggggcaaauuguguccgaccugcuuaaacuguacggaucuggacguggcucuagggcggcccaugugcguuggaaucacuccuagcgccaaggcauccauucuccacgaagugcgcccagucaccucuggcuguuuucccaucaugcaugaucgaacaaagauacgucaacugccuaaucuucugagagguuacgagaaaaucagguugucgacucagaacgugauuaaugccgaaaaggcuccagggggacccuaucggcucggcaccucaggcagcugcccuaacgcaacaaguaaauccggguucuuugccaccauggcuugggccguaccacgcgacaauaacaagacggcgacuaauccgcugacaguugaggugccccacaucuguaccaaagaagaggaucagauuacugucuggggauuccauucugacaacaagacacagaugaagaaucuguacggugauagcaacccucaaaaauuuaccuccuucgcaaauggcaucacgacccacuaugugucacagauagggggauuuccagaccagacagaggauggcggucucccccagagugggagaauuguggucgacuacaugguucaaaagccuggaaaaacuggcaccaucguguaucagaggggcauuuuacugccacagaagguauggugcgccagcgggcggucuaaagugaucaagggaucccuucccuugaucggugaagcugauugucugcacgagaaauacggcgggcuaaacaagucaaagccguauuacacaggagaacaugccaaagcaauuggcaacugcccuauaugggucaagacuccccucaaacuggcuaaugguaccaaguaccgcccuccagccaaacuucugaaggagcgaggguucuuuggcgcgaucgccggauucuuggagggcgggugggaaggaaugauugcagguuggcacggcuauacaagccauggggcucacggaguggccguugcugccgaccucaagaguacccaggaggcaaucaacaaaauaacuaagaaucugaacucuuuauccgaacuggaggugaaaaaucuccaaagacuuagcggcgccauggaugaacugcacaacgagauuuuggagcuagacgaaaaggucgacgaucugagggcugacacgaucucgucucagaucgagcucgcggugcugcuuuccaaugaagguauuaucaacucagaggaugaacaucuguuggcacucgagcggaaacugaagaagauguuagggcccagugccguagacauuggcaauggauguuuugagacaaaacacaagugcaaccagaccugccuggaucguauagcugccggcacuuucaaugcaggggaauuuagccuaccaaccuucgacucccucaacaucacagccgcuucucugaaugaugacggacuugauaaccauaccauuuugcuguacuauagcacugccgcaucaagucucgcgguuacacugaugaucgcuaucuucauuguguacaugauaucccgcgacaaugucagcuguucuaucugccuuuga

SEQ ID NO: 154605 - RNA, 1758 nt, Artificial Sequence
  derived and/or modified CDS sequence (opt3) from hemagglutinin__InfluenzaB__ACN32567
auggaagccaucauugugcugcucauggucguuaccagcaacgcugacagaauaugcacaggcaucacuuccucuaauucaccccacgugguaaagacggcaacccagggggaagugaacgucacaggagugauuccucuuacuaccacaccaaccaaaagucauuucgccaaucugaaggguacugagacaaggggcaaauuguguccgaagugcuuaaacuguaccgaucuggacguugcgcuagggcggcccaaaugcacgggaaauaucccuagcgcucgcguguccauucuccacgaaguccgaccagugacuucuggcuguuuucccaucaugcaugaucguaccaagauaagacaacugccuaaccuucugagggguuacgagcacauccgguugucgacacauaauguaauuaacgccgaaaaugcaccagggggacccuauaagaucggcacuucaggcagcugcccuaacguuaccaaugggaacggauucuuugccacaauggcuugggcagugccaaagaaugacaacaauaagaccgccacgaacagucucacuauugaggucccguacaucuguacagagggugaagaucagauaaccguguggggcuuccacuccgacaacgagacucagauggcuaaacuguauggggauucuaagccccagaaauuuacaagcuccgccaauggagugaccacgcacuacgucucacaaauuggcgguuucccuaaccagaccgaagacgggggacugccacagaguggccgcaucguuguggauuauaugguacagaaaagcggcaagacagggacuauuaccuaccaaagaggaauccucuuaccccagaaaguguggugcgcgucugguagguccaaggucaucaaaggcucacugccucuuauuggggaggcagacuguuugcaugagaaguauggaggccugaauaaaagcaagccauacuacacaggugaacacgccaaagcuauagggaacugccccaucugggugaagacuccgcuaaagcucgccaauggcaccaaauaucggccucccgcaaagcugcuuaaagagcgcggauuuuucggcgcuauugccggguuucuggaaggagguugggagggcaugaucgcgggguggcauggauacacaagucacggcgcccacgguguugcaguggcugccgauuugaagucuacccaggaagcuauaaacaaaauuacuaagaaucucaacucccugagcgaguuagaggucaagaaucugcagcgacucucgggggccauggacgaacuucauaacgagauccuggaauuggaugagaaaguggacgaccuaagagcagauacgaucucuucccaaauugaacuggccguacuccugucaaaugagggcaucauuaacagugaggacgaacaccuucuggcuuuggagaggaagcucaaaaagaugcugggaccaagcgcgguugaaauaggcaauggguguuucgagacaaaacauaagugcaaccagaccugcuuagaucggaucgcagccggaacuuuugacgcuggugaguucucccugccuaccuuugauucucuaaauauuacagccgcaagccucaacgacgauggccuggacaaccacaccauccuuuuguauuacucaacugccgcuaguucccuggccgugacacucaugaucgcaauuuucgucguguauauggucagccgugauaaugugucuuguucaauaugccuguga

SEQ ID NO: 154606 - RNA, 1758 nt, Artificial Sequence; identical to SEQ ID NO: 154562
  derived and/or modified CDS sequence (opt3) from hemagglutinin__InfluenzaB__ACN32578

SEQ ID NO: 154607 - RNA, 1758 nt, Artificial Sequence
  derived and/or modified CDS sequence (opt3) from hemagglutinin__InfluenzaB__ACN32589
augaaggccaucauugugcugcucauggucguuaccagcaacgcugacagaauaugcacaggcaucacuuccucuaauucaccccacgugguaaaaacggcaacccagggggaggugaacgucacaggagugauuccucuuacuaccacaccaaccaagagucauuucagcaaucugaaagguacugaaacaaggggcaaguuguguccgaaaugcuuaaacuguaccgaucuggacguugcccuagggcggcccaagugcacgggaaauaucccuuccgcgcgcgugucuauucuccacgagguccgaccagugacuucgggcuguuuucccaucaugcaugaucguaccaagauaagacaacugccuaaccuucugagggguuacgaacacauccgguugucaacacauaauguaauuaacgcugagaaugccccagggggacccuauaaaaucggcacuagcggcaguugcccuaacguuaccaaugggaacggauucuuugcaacaauggccugggcugugccaaagaaugacaacaauaaaaccgcaacgaacucccucacuauugaagucccguacaucuguacagagggugaggaucagauaaccauuuggggcuuccacucugacaacgaaacucagauggccaagcuguauggggauagcaaaccccagaaguuuacauccucagcuaauggagugaccacgcacuacgugagucaaaucggcgguuucccuaaccagaccgaggacgggggacugccacagagcggccgcauugucguugauuauauggugcagaagucuggcaaaacagggacuaucaccuaccaaagaggaauccucuuaccccagaagguauggugcgccuccgguaggucaaaagugauuaagggcagccugccucuuauaggggaagcggacuguuugcaugagaaauauggaggccugaauaagaguaaaccauacuacacaggugagcacgcaaaggccaucgggaacugccccauuugggucaagacuccgcuaaaacucgcuaauggcaccaaguaucggccucccgccaaacugcuuaaggaacgcggauuuuucggcgcaaucgcuggguuucuggagggagguugggaaggcaugauagccggguggcauggauacacaucucacggcgcgcacgguguggccguugcagcugauuugaaauccacccaggaggccauuaacaagaucacuaagaaucucaacagccugucggaauuagaggugaaaaaucugcagcgacucucuggggcuauggacgagcuucauaacgaaauccuggaguuggaugaaaaggucgacgaccuaagagccgauacgauuuccucacaaaucgagcuggcagugcuccugaguaaugaaggcauuauaaacagcgaggacgagcaccuucuggccuuggaaaggaaacucaagaaaaugcugggaccauccgcuguagagaucggcaauggguguuucgaaacaaagcauaagugcaaccagaccugcuuagaucggauugcggcaggaacuuuugacgccggugaguucucucugccuaccuuugauagccuaaauaucacagcugccucacucaacgacgauggccuggacaaccacaccauccuuuuguauuacaguacugcagccuccagccuggcuguuacacucaugauugccauauucguggucuauauggugucucgugauaaugucucauguaguaucugccuguga

SEQ ID NO: 154608 - RNA, 1758 nt, Artificial Sequence
  derived and/or modified CDS sequence (opt3) from hemagglutinin__InfluenzaB__ACN32600
augaaggccaucauugugcugcucauggucguuaccagcaacgcugacagaauaugcacaggcaucacuuccucuaauucaccccacgugguaaaaacggcaacccagggggaggugaacgucacaggagugauuccucuuacuaccacaccaaccaagagucauuucagcaaucugaaagguacugaaacaaggggcaaguuguguccgaaaugcuuaaacuguaccgaucuggacguugcccuagggcggcccaagugcacgggaaauaucccuuccgcgcgcgugucuauucuccacgagguccgaccagugacuucgggcuguuuucccaucaugcaugaucguaccaagauaagacaacugccuaaccuucugagggguuacgaacacauccgguugucaacacauaauguaauuaacgcugagaaugccccagggggacccuauaaaaucggcacuagcggcaguugcccuaacguuaccaaugggaacggauucuuugcaacaauggccugggcugugccaaagaaugacaacaauaaaaccgcaacgaacucccucacuauugaagucccguacaucuguacagagggugaggaucagauaaccguguggggcuuccacucugacaacgaaacucagauggccaagcuguauggggauagcaaaccccagaaguuuacauccucagcuaauggagugaccacgcacuacgucagucaaauuggcgguuucccuaaccagaccgaggacgggggacugccacagagcggccgcaucguuguggauuauaugguacagaagucuggcaaaacagggacuauuaccuaccaaagaggaauccucuuaccccagaagguguggugcgccuccgguaggucaaaagucaucaagggcagccugccucuuauuggggaagcggacuguuugcaugagaaauauggaggccugaauaagaguaaaccauacuacacaggugagcacgcaaaggccauagggaacugccccaucugggugaagacuccgcuaaaacucgcuaauggcaccaaguaucggccucccgcccgccugcuuaaagaacgaggauuuuucggcgcaauugcuggguuucuggagggagguugggaaggcaugaucgccggguggcauggauacacaucucacggcgcgcacgguguugccguggcagcugauuugaaguccacccaggaggccauaaacaaaauuacuaagaaucucaacagccugucggaauuagaggucaagaaucugcagagacucucuggggcuauggacgagcuucauaacgaaauccuggaguuggaugaaaaaguggacgaccuaagggccgauacgaucuccucacaaauugagcuggcaguacuccugaguaaugaaggcaucauuaacagcgaggacgagcaccuucuggccuuggaacggaagcucaaaaagaugcugggaccauccgcuguugagauaggcaauggguguuucgaaacaaaacauaagugcaaccagaccugcuuagaucguaucgcggcaggaacuuuugacgccggugaguucucucugccuaccuuugauagccuaaauauuacagcugccucacucaacgacgauggccuggacaaccacaccauccuuuuguauuacaguacugcagccuccagccuggcugugacacucaugaucgccauuuucgucguguauauggucucucgcgauaaugugucauguaguauaugccuguga

SEQ ID NO: 154609 - RNA, 1758 nt, Artificial Sequence; identical to SEQ ID NO: 154573
  derived and/or modified CDS sequence (opt3) from hemagglutinin__InfluenzaB__ACN32611

SEQ ID NO: 154610 - RNA, 1755 nt, Artificial Sequence; identical to SEQ ID NO: 154474
  derived and/or modified CDS sequence (opt3) from hemagglutinin__InfluenzaB__ACN32716

SEQ ID NO: 154611 - RNA, 1758 nt, Artificial Sequence; identical to SEQ ID NO: 154562
  derived and/or modified CDS sequence (opt3) from hemagglutinin__InfluenzaB__ACN32771

SEQ ID NO: 154612 - RNA, 1758 nt, Artificial Sequence; identical to SEQ ID NO: 154568
  derived and/or modified CDS sequence (opt3) from hemagglutinin__InfluenzaB__ACN32782

SEQ ID NO: 154613 - RNA, 1758 nt, Artificial Sequence
  derived and/or modified CDS sequence (opt3) from hemagglutinin__InfluenzaB__ACO05957
augaaggccaucauugugcugcucauggucguuaccagcaacgcugacagaauaugcacaggcaucacuuccucuaauucaccccacgugguaaaaacggcaacccagggggaggugaacgucacaggagugauuccucuuacuaccacaccaaccaagagucauuucgccaaucugaaagguacugaaacaaggggcaaguuguguccgaaaugcuuaaacuguaccgaucuggacguugcgcuagggcggcccaagugcacgggaaauaucccuagcgcucgcguguccauucuccacgagguccgaccagugacuucuggcuguuuucccaucaugcaugaucguaccaagauaagacaacugccuaaccuucugagggguuacgaacacauccgguugucgacacauaauguaauuaacgccgagaaugcaccagggggacccuauaaaaucggcacuucaggcagcugcccuaacguuaccaaugggaacggauucuuugccacaauggcuugggcagugccaaagaaugacaacaauaaaaccgccacgaacagucucacuauugaagucccguacaucuguacagagggugaggaucagauaaccguguggggcuuccacuccgacaacgaaauucagauggcuaagcuguauggggauucuaaaccccagaaguuuacuagcuccgccaauggagugacaacccacuacgucucacaaaucggcgguuucccuaaccagacggaggacgggggacugccacagaguggccgcauuguuguggauuauaugguacaaaagagcggcaaaaccgggacaaucacuuaccagagaggaauccucuuaccccagaagguguggugcgcgucugguagguccaaagucauuaagggcucacugccucuuauaggggaagcagacuguuugcaugagaaauauggaggccugaauaagagcaaaccauacuacaccggugagcacgccaaggcuaucgggaacugccccauuugggugaagacaccgcuaaaacucgccaauggcacuaaguaucggccucccgcaaaacugcuuaaggaacgcggauuuuucggcgcuaucgccggguuucuggagggagguugggaaggcaugauagcgggguggcauggauacaccagucacggcgcccacgguguugcaguggcugccgauuugaaaucuacacaggaggcuauuaacaagaucaccaagaaucucaacucccugagcgaauuagaggucaaaaaucugcagcgacucucgggggccauggacgagcuucauaacgaaauccuggaguuggaugaaaagguggacgaccuaagagcagauacuauuucuucccaaaucgagcuggccguacuccugucaaaugaaggcauuauaaacagugaggacgagcaccuucuggcuuuggaaaggaaacucaagaaaaugcugggaccaagcgcgguugagaucggcaauggguguuucgaaacgaagcauaagugcaaccagacaugcuuagaucggauugcagccggaaccuuugacgcuggugaguucucccugccuacuuuugauucucuaaauaucaccgccgcaagccucaacgacgauggccuggacaaccacacaauccuuuuguauuacucaaccgccgcuaguucccuggccgugacucucaugauugcaauauucgucguguauauggucagccgugauaaugugucuuguucaaucugccuguga

SEQ ID NO: 154614 - RNA, 1755 nt, Artificial Sequence
  derived and/or modified CDS sequence (opt3) from hemagglutinin__InfluenzaB__ACO05968
augaaggccaucauugugcugcucauggucguuaccagcaacgcugacagaauaugcacaggcaucacuuccucuaauucaccccacgugguaaaaacggcaacccagggggaggugaacgucacaggagugauuccucuuacuaccacaccaaccaagaguuacuucgccaaucugaaagguacuaggacacggggcaaguuguguccggauugcuuaaacuguaccgaccuggauguugcgcuagggcgccccaugugcgugggaacgacuccuagcgcuaaagccuccauccuccaugaaguccgaccagugaccucuggcuguuuucccauuaugcacgaccguacaaagaucagacaacugccuaaucuucugagggguuaugagaacauacgguugucgacucagaauguaaucgaugcagaaaaggccccagggggacccuaccgccucggcaccucaggcagcugcccuaacgcuacaaguaaauccggguucuuugcaaccauggccugggcuguuccaaaggacaauaacaaaaaugccacgaacccgcugacuguggagguccccuauauuuguacagaaagagaggaucagaucaccguguggggauuccauucugacaauaagacucagaugaaaaaccuguacggugauagcaauccucaaaaguuuacauccucagcgaacggcgugaccacgcacuaugucagucagauugggagcuucccagaccagaccgaggauggaggccucccccagucugguaggaucguuguggacuacaugaugcaaaagccugggaaaacaggaacuauaguauaucagcggggcguguuacugccacagaaggucuggugcgcauccggccgcucaaaagugauuaaggggagccuucccuugaucggagaagccgauugucugcaugagaaauacgguggccuaaacaagaguaaaccguacuauaccggggaacacgcuaaggccauuggaaauugcccuaucuggguuaagacaccccucaaacuggcaaacggcacuaaguaccgaccuccagcuaaacuucugaaggagagaggguuuuucggugccaucgcgggcuuuuuggagggaggcugggaagggaugauugccggauggcacgguuauaccucucauggcgcacacgggguggcugucgccgcugaccucaaauccacacaggaggccauaaauaagaucaccaagaaccugaauagcuuaucggaacuggaggugaaaaaccuccaaaggcuuucuggagcaauggacgaacugcauaaugagauuuuggagcuagaugaaaagguagacgaucugcgggccgacacuaucuccucacagauagagcucgcuguucugcuuaguaacgaaggcauuaucaauagcgaggaugaacaccuguuggcgcucgagcguaaacugaagaaaauguuaggucccuccgcaguggagaucgggaacggcuguuucgaaacgaagcacaagugcaaucagacaugccuggaccgcauugccgcuggaaccuuuaacgccggcgaguucucucuaccaacuuuugauagccucaauaucaccgcagccucacugaacgacgaugggcuugacaaucauacaauuuugcuguacuauaguaccgcugccuccagccucgcagucacucugaugcuugcgauauucaucguguacauggucucuagagauaacgugucauguaguauuugccuguga

SEQ ID NO: 154615 - RNA, 1755 nt, Artificial Sequence
  derived and/or modified CDS sequence (opt3) from hemagglutinin__InfluenzaB__ACO05979
augaaggccaucauugugcugcucauggucguuaccagcaacgcugacagaauaugcacaggcaucacuuccucuaauucaccccacgugguaaaaacggcaacccagggggaggugaacgucacaggagugauuccucuuacuaccacaccaaccaagaguuacuucgccaaucugaaagguacuaggacacggggcaaguuguguccggauugcuuaaacuguaccgaccuggauguugcgcuagggcgccccaugugcgugggaacgacuccuagcgcuaaagccuccauccuccaugaaguccgaccagugaccucuggcuguuuucccauuaugcacgaccguacaaagaucagacaacugccuaaucuucugagggguuaugagaacauacgguugucgacucagaauguaaucgaugcagaaaaggccccagggggacccuaccgccucggcaccucaggcagcugcccuaacgcuacaaguaaauccggguucuuugcaaccauggccugggcuguuccaaaggacaauaacaaaaaugccacgaacccgcugacuguggagguccccuauauuuguacagaaggagaggaucagaucaccgugugggguuuccauucugacaauaagacucagaugaaaaaccuguacggcgauagcaauccucaaaaguuuacauccucagcgaacggggugaccacgcacuaugucagucagauuggcagcuucccagaccagaccgaggauggaggucucccccagucugggagaaucguuguggacuacaugaugcaaaagccuggaaaaacaggcacuauaguauaucagaggggcguguuacugccacagaaggucuggugcgcauccgggcggucaaaagugauuaagggaagccuucccuugaucggugaagccgauugucugcaugagaaauacggcgggcuaaacaagaguaaaccguacuauaccggagaacacgcuaaggccauuggcaauugcccuaucuggguuaagacaccccucaaacuggcaaacgguacuaaguaccgcccuccagcuaaacuucugaaggagcgaggguuuuucggcgccaucgcgggauuuuuggagggcgggugggaaggaaugauugccgguuggcacggcuauaccucucauggggcacacggaguggcugucgccgcugaccucaaauccacacaggaggccauaaauaagaucaccaagaaccugaauagcuuaucggaacuggaggugaaaaaccuccaaagacuuucuggcgcaauggacgaacugcauaaugagauuuuggagcuagaugaaaagguagacgaucugagggccgacacuaucuccucacagauagagcucgcuguucugcuuaguaacgaagguauuaucaauagcgaggaugaacaccuguuggcgcucgagcggaaacugaagaaaauguuagggcccuccgcaguggagaucggcaacggauguuucgaaacgaagcacaagugcaaucagacaugccuggaccguauugccgcuggcaccuuuaacgccggggaguucucucuaccaacuuuugauagccucaauaucaccgcagccucacugaacgacgauggacuugacaaucauacaauuuugcuguacuauaguaccgcugccuccagccucgcagucacucugaugcuugcgauauucaucguguacauggucucucgcgauaacgugucauguaguauuugccuguga

SEQ ID NO: 154616 - RNA, 1755 nt, Artificial Sequence; identical to SEQ ID NO: 154615
  derived and/or modified CDS sequence (opt3) from hemagglutinin__InfluenzaB__ACO05990

SEQ ID NO: 154617 - RNA, 1758 nt, Artificial Sequence
  derived and/or modified CDS sequence (opt3) from hemagglutinin__InfluenzaB__ACO06001
augaaggccaucauugugcugcucauggucguuaccagcaacgcugacagaauaugcacaggcaucacuuccucuaauucaccccacgugguaaaaacggcaacccagggggaggugaacgucacaggagugauuccucuuacuaccacaccaaccaagagucauuucgccaaucugaaagguacugaaacaaggggcaaguuguguccgaaaugcuuaaacuguaccgaucuggacguugcgcuagggcggcccaagugcacgggaaauaucccuagcgcucgcguguccauucuccacgagguccgaccagugacuucuggcuguuuucccaucaugcaugaucguaccaagauaagacaacugccuaaccuucugagggguuacgaacacauccgguugucgacacauaauguaauuaacgccgagaaugcaccagggggacccuauaaaaucggcacuucaggcagcugcccuaacguuaccaaugggaacggauucuuugccacaauggcuugggcagugccaaagaaugacaacaauaaaaccgccacgaacagucucacuauugaagucccguacaucuguacagagggugaggaucagauaaccguguggggcuuccacuccgacaacgaaaaucagauggcuaagcuguauggggauucuaaaccccagaaguuuacuagcuucgccaacggagugacaacccacuacgucucccaaauuggcgguuuuccuaaucagacggaggacgggggacugccacagucaggccgcaucguuguggauuauaugguacagaagaguggcaaaaccgggacaauuacuuaccaaagaggaauccucuuaccccagaagguguggugcgcgagcgguaggucuaaagucaucaagggcucccugccucuuauuggggaagcagacuguuugcaugagaaauauggaggccugaacaagucaaaaccauacuacaccggugagcacgccaaggcuauagggaauugccccaucugggugaagacaccgcuaaaacucgccaacggcacuaaguaucggccucccgcaaaacugcuuaaggaacgcggauucuuuggcgcuauugccggguuccuggagggagguugggaaggcaugaucgcgggguggcauggauacaccagccacggcgcccacgguguugcaguggcugccgauuugaaaaguacacaggaggcuauaaauaagauuaccaagaaccucaauucucuguccgaauuagaggucaaaaaccugcagcgacucagcggggccauggacgagcuucauaaugaaauccuggaguuggaugaaaagguggacgaccuaagagcagauacuaucucgucucaaauugagcuggccguacuccuguccaacgaaggcaucauuaauucagaggacgagcaccuucuggcuuuggaaaggaaacucaagaaaaugcugggaccaagugcgguugagauaggcaacggguguuuugaaacgaagcauaagugcaaucagacaugcuuagaucggaucgcagccggaaccuucgacgcuggugaguuuagccugccuacuuucgauucccuaaacauuaccgccgcaucucucaacgacgauggccuggacaaucacacaauccuuuuguauuacagcaccgccgcuucaagucuggccgugacucucaugaucgcaauuuucgucguguauauggucucccgugauaacgugagcuguucuauaugccuguga

SEQ ID NO: 154618 - RNA, 1755 nt, Artificial Sequence; identical to SEQ ID NO: 154615
  derived and/or modified CDS sequence (opt3) from hemagglutinin__InfluenzaB__ACO06012

SEQ ID NO: 154619 - RNA, 1755 nt, Artificial Sequence; identical to SEQ ID NO: 154615
  derived and/or modified CDS sequence (opt3) from hemagglutinin__InfluenzaB__ACO06023

SEQ ID NO: 154620 - RNA, 1755 nt, Artificial Sequence
  derived and/or modified CDS sequence (opt3) from hemagglutinin__InfluenzaB__ACO06062
augaaggccaucauugugcugcucauggucguuaccagcaacgcugacagaauaugcacaggcaucacuuccucuaauucaccccacgugguaaaaacggcaacccagggggaggugaacgucacaggagugauuccucuuacuaccacaccaaccaagaguuacuucgccaaucugaaagguacuaggacacggggcaaguuguguccggauugcuuaaacuguaccgaccuggauguugcgcuagggcgccccaugugcgugggaacgacuccuagcgcuaaagccuccauccuccaugaaguccgaccagugaccucuggcuguuuucccauuaugcacgaccguacaaagaucagacaacugccuaaucuucugagggguuaugagaacauacgguugucgacucagaauguaaucgaugcagaaaaggccccagggggacccuaccgccucggcaccucaggcagcugcccuaacgcuacaaguaaauccggguucuuugcaaccauggccugggcuguuccaaaggacaauaacaaaaaugccacgaacccgcugacuguggagguccccuauauuuguacagaaggagaggaucagaucaccgugugggguuuccauucugacaauaagacucagaugaaaaaccuguacggcgauagcaauccucaaaaguuuacauccucagcgaacggggugaccacgcacuaugucagucagauugacagcuucccagaucagaccgaggacggaggccucccccagucugguagaaucguuguggauuacaugaugcaaaagccugggaaaacaggaacuauaguauaucagaggggcguguuacugccacagaaggucuggugcgcauccggccggucaaaagugauuaaggggagccuucccuugaucggagaagccgacugucugcaugagaaauacgguggccuaaacaagaguaaaccguacuauaccggggaacacgcuaaggccauuggaaauugcccuaucuggguuaagacaccccucaaacuggcaaacggcacuaaguaccgcccuccagcuaaacuucugaaggagcgaggguuuuucggugccaucgcgggcuuuuuggagggaggcugggaagggaugauugccggauggcacgguuauaccucucauggcgcacacgggguggcugucgccgcugaccucaaauccacacaggaggccauaaauaagaucaccaagaaccugaauagcuuaucggaacuggaggugaaaaaccuccaaagacuuucuggagcaauggaugaacugcauaaugagauuuuggagcuagacgaaaagguagaugaccugagggccgauacuaucuccucacagauagagcucgcuguucugcuuaguaacgaaggcauuaucaauagcgaggacgaacaccuguuggcgcucgagcggaaacugaagaaaauguuaggucccuccgcaguggagaucgggaacggcuguuucgaaacgaagcacaagugcaaucagacaugccuggaucguauugccgcuggaaccuuuaacgccggcgaguucucucuaccaacuuuugacagccucaauaucaccgcagccucacugaacgaugacgggcuugauaaucauacaauuuugcuguacuauaguaccgcugccuccagccucgcagucacucugaugcuugcgauauucaucguguacauggucucucgcgacaacgugucauguaguauuugccuguga

SEQ ID NO: 154621 - RNA, 1758 nt, Artificial Sequence
  derived and/or modified CDS sequence (opt3) from hemagglutinin__InfluenzaB__ACO94661
augaaggccaucauugugcugcucauggucguuaccagcaacgcugacagaauaugcacaggcaucacuuccucuaauucaccccacgugguaaaaacggcaacccagggggaggugaacgucacaggagugauuccucuuacuaccacaccaaccaagagucauuucgccaaucugaaagguacugaaacaaggggcaaguuguguccgaaaugcuuaaacuguaccgaucuggacguugcgcuagggcggcccaagugcacgggaaauaucccuagcgcucgcguguccauucuccacgagguccgaccagugacuucuggcuguuuucccaucaugcaugaucguaccaagauaagacaacugccuaaccuucugagggguuacgaacacauccgguugucgacacauaauguaauuaacgccgagaaugcaccagggggacccuauaaaaucggcacuucaggcagcugcccuaacguuaccaaugggaacggauucuuuacaaccauggccugggcugugccaaagaaugacaacaauaaaacggcaacuaacagucucacaauugaagucccguacaucuguaccgagggugaggaucagauaacuguguggggcuuccacuccgacaacgaaacacagauggccaagcuguauggggauucuaaaccccagaaguuuaccagcuccgcuaauggagugacgacccacuacgucucacaaauuggcgguuucccuaaccagacagaggacgggggacugccacagaguggccgcaucguuguggauuauaugguacaaaagagcggcaaaacugggaccauuacauaccagagaggaauccucuuaccccagaagguguggugcgccucugguagguccaaagucaucaagggcucacugccucuuauuggggaagcggacuguuugcaugagaaauauggaggccugaauaagagcaaaccauacuacacuggugagcacgcaaaggccauagggaacugccccaucugggugaagaccccgcuaaaacucgcuaauggcacaaaguaucggccucccgccaaacugcuuaaggaacgcggauuuuucggcgcaauugcuggguuucuggagggagguugggaaggcaugaucgccggguggcauggauacaccagucacggcgcgcacgguguugccguggcagcugauuugaaaucuacucaggaggccauaaacaagauuacgaagaaucucaacucccugagcgaauuagaggucaaaaaucugcagcgacucucgggggcuauggacgagcuucauaacgaaauccuggaguuggaugaaaagguggacgaccuaagagccgauacaaucucuucccaaauugagcuggcaguacuccugucaaaugaaggcaucauuaacagugaggacgagcaccuucuggccuuggaaaggaaacucaagaaaaugcugggaccaagcgcuguugagauaggcaauggguguuucgaaaccaagcauaagugcaaccagacuugcuuagaucggaucgcggcaggaaccuuugacgccggugaguucucccugccuacauuugauucucuaaauauuaccgcugccagccucaacgacgauggccuggacaaccacacuauccuuuuguauuacucaacagcagccaguucccuggcugugacgcucaugaucgccauuuucgucguguauauggucagccgugauaaugugucuuguucaauaugccuguga

SEQ ID NO: 154622 - RNA, 1758 nt, Artificial Sequence; identical to SEQ ID NO: 154562
  derived and/or modified CDS sequence (opt3) from hemagglutinin__InfluenzaB__ACR15622

SEQ ID NO: 154623 - RNA, 1758 nt, Artificial Sequence
  derived and/or modified CDS sequence (opt3) from hemagglutinin__InfluenzaB__ACR15633
augaaggccaucauugugcugcucauggucguuaccagcaacgcugacagaauaugcacaggcaucacuuccucuaauucaccccacgugguaaaaacggcaacccagggggaggugaacgucacaggagugauuccucuuacuaccacaccaaccaagagucauuucgccaaucugaaagguacugaaacaaggggcaaguuguguccgaaaugcuuaaacuguaccgaucuggacguugcgcuagggcggcccaagugcacgggaaauaucccuagcgcucgcguguccauucuccacgagguccgaccagugacuucuggcuguuuucccaucaugcaugaucguaccaagauaagacaacugccuaaccuucugagggguuacgaacacauccgguugucgacacauaauguaauuaacgccgagaaugcaccagggggacccuauaaaaucggcacuucaggcagcugcccuaacguuaccaaugggaacggauucuuugccacaauggcuugggcagugccaaagaaugacaacaauaaaaccgccacgaacagucucacuauugaagucccguacaucuguacagagggugaggaucagauaaccguguggggcuuccacuccgacucugaaacucagauggcuaagcuguauggggauagcaaaccccagaaguuuacauccucagccaacggagugaccacgcacuacgucagucaaauuggcgguuucccuaaucagaccgaggacgggggacugccacagagcggccgcaucguuguggauuauaugguacagaagucuggcaaaacagggacuauuaccuaccaaagaggaauccucuuaccccagaagguguggugcgcguccgguaggucaaaagucaucaagggcagccugccucuuauuggggaagcagacuguuugcaugagaaauauggaggccugaacaagaguaaaccauacuacacaggugagcacgccaaggcuauagggaauugccccaucugggugaagacuccgcuaaaacucgccaacggcaccaaguaucggccucccgcaaaacugcuuaaggaacgcggauuuuucggcgcuauugccggguuucuggagggagguugggaaggcaugaucgcgggguggcauggauacacaucucacggcgcccacgguguugcaguggcugccgauuugaaauccacccaggaggcuauaaauaagauuacuaagaaccucaauagccugucggaauuagaggucaaaaaccugcagcgacucucuggggccauggacgagcuucauaaugaaauccuggaguuggaugaaaagguggacgaccuaagagcagauacgaucuccucacaaauugagcuggccguacuccugaguaacgaaggcaucauuaauagcgaggacgagcaccuucuggcuuuggaaaggaaacucaagaaaaugcugggaccauccgcgguugagauaggcaacggguguuucgaaacaaagcauaagugcaaucagaccugcuuagaucggaucgcagccggaacuuuugacgcuggugaguucucucugccuaccuuugauagccuaaacauuacagccgcaucacucaaugacgauggccuggacaaccacaccauccuuuuguauuacaguacugccgcuuccagccuggccgugacacucaugaucgcaauuuucgucguguauauggucucucgugauaacgugucauguaguauaugccuguga

SEQ ID NO: 154624 - RNA, 1755 nt, Artificial Sequence
  derived and/or modified CDS sequence (opt3) from hemagglutinin__InfluenzaB__ACR15644
augaaggccaucauugugcugcucauggucguuaccagcaacgcugacagaauaugcacaggcaucacuuccucuaauucaccccacgugguaaaaacggcaacccagggggaagugaacgucacaggagugauuccucuuacuaccacaccaaccaagaguuacuucgccaaucugaaagguacuaggacacggggcaaguuguguccggauugcuuaaacuguaccgaccuggauguugcgcuagggcgccccaugugcgugggaacgacuccuagcgcuaaagccuccauccuccaugaaguccgaccagugaccucuggcuguuuucccauuaugcacgaccguacaaagaucagacaacugccuaaucuucugagggguuaugagaacauacgguugucgacucagaauguaaucgaugcagaaaacgccccagggggacccuaccgccucggcaccucaggcagcugcccuaaugcuacaaguaaguccggguucuuugcaaccauggccugggcuguuccaaaagacaacaauaagaacgccacgaauccgcugacuguggagguccccuauguguguacagaaggagaggaucagauuaccgugugggguuuccauucugacaacaaaauccagaugaagaaucuguacggcgauagcaacccucaaaaauuuacuuccucagcgaacggggucacaacccacuauguuagucagauuggaggcuucccagcacagacggaggacggugggcucccccagagcggaagaaucgugguagauuacauggugcaaaagccuaggaagaccggcacaauagucuaucagcggggcguguuacugccacagaaaguuuggugcgccucugggcgcuccaaggugauuaaaggaucacuucccuugaucggugaagcugacugucugcaugagaaguacggcgggcuaaauaaaagcaagccguacuauacuggagaacacgccaaagcaauuggcaacugcccuaucugggucaagacuccccucaagcuggcuaaugguacaaaauaccgaccuccagccaaacuucugaaggagagaggguuuuucggcgcgaucgccggauuuuuggagggcgggugggaaggaaugauugcagguuggcacggcuauaccagucauggggcucacggaguggccguagcugccgaucucaagucuacccaggaggcaauaaacaaaaucacaaagaaucugaacuccuuaagcgaacuggagguuaagaaucuccaaaggcuuucgggcgccauggacgaacugcauaacgagauuuuggagcuagacgaaaaaguggaugaccugcgggcugauaccaucucuucccagauagagcucgcgguccugcuuucaaaugaagguauuaucaacagugaggacgaacaccuguuggcacucgagcguaagcugaaaaagauguuagggcccagcgccguggauaucggcaauggauguuucgagacuaaacacaagugcaaccagacgugccuggaccgcauugcugccggcacauuuaaugcaggggaguucucccuaccaaccuuugauucucucaacaucacugccgcuagccugaaugacgauggacuugacaaccauaccauuuugcuguacuauucaacagccgcaaguucccucgcggucacccugaugcuugcuauauucaucguguacaugguuagcagagauaacgugucuuguucaauuugccuguga

SEQ ID NO: 154625 - RNA, 1758 nt, Artificial Sequence
  derived and/or modified CDS sequence (opt3) from hemagglutinin__InfluenzaB__ACR15655
augaaggccaucauugugcugcucauggucguuaccagcaacgcugacagaauaugcacaggcaucacuuccucuaauucaccccacgugguaaaaacggcaacccagggggaggugaacgucacaggagugauuccucuuacuaccacaccaaccaagagucauuucgccaaucugaaagguacugaaacaaggggcaaguuguguccgaaaugcuuaaacuguaccgaucuggacguugcgcuagggcggcccaagugcacgggaaauaucccuagcgcucgcguguccauucuccacgagguccgaccagugacuucuggcuguuuucccaucaugcaugaucguaccaagauaagacaacugccuaaccuucugagggguuacgaacacauccgguugucgacacauaauguaauuaacgccgagaaugcaccagggggacccuauaaaaucggcacuucaggcagcugcccuaacguuaccaaugggaacggauucuuugccacaauggcuugggcagugccaaagaaugacaacaauaaaaccgccacgaacagucucacuauugaagucccguacaucuguacagagggugaggaucagauaaccguguggggcuuccacuccgacucugaaacucagauggcuaagcuguauggggauagcaaaccccagaaguuuacauccucagccaacggagugaccacgcacuacgucagucaaauuggcgguuucccuaaucagaccgaggacgggggacugccacagagcggccgcaucguuguggauuauaugguacagaagucuggcaaaacagggacuauuaccuaccaaagaggaauccucuuaccccagaagguguggugcgcguccgguaggucaaaagucaucaagggcagccugccucuuauuggggaagcagacuguuugcaugagaaauauggaggccugaacaagaguaaaccauacuacacaggugagcacgccaaggcuauagggaauugccccaucugggugaagacuccgcuaaaacucgccaacggcaccaaguaucggccucccgcaaaacugcuuaaggaacgcggauuuuucggcgcuauugccggguuucuggagggagguugggaaggcaugaucgcgggguggcauggauacacaucucacggcgcccacgguguugcaguggcugccgauuugaaauccacccaggaggcuauaaauaagauuacuaagaaccucaauagccugucggaauuagaggucaaaaaccugcagcgacucucuggggccauggacgagcuucauaaugaaauccuggaguuggaugaaaagguggacgaccuaagagcagauacgaucuccucacaaauugagcuggccguacuccugaguaacgaaggcaucauuaauagcgaggacgagcaccuucuggcuuuggaaaggaaacucaagaaaaugcugggaccauccgcgguugagauaggcaacggguguuucgaaacaaagcauaagugcaaucagaccugcuuagaucggaucgcagccggaacuuuugacgcuggugaguucucucugccuaccuuugauagccuaaacauuacagccgcaucacucaaugacgauggccuggacaaccacaccauccuuuuguauuacaguacugccgcuuccagccuggccgugacacucaugaucgcaauuuucgucguguauauggucucucgugauaacauaucauguaguaucugccuguga

SEQ ID NO: 154626 - RNA, 1758 nt, Artificial Sequence
  derived and/or modified CDS sequence (opt3) from hemagglutinin__InfluenzaB__ACR15666
augaaggccaucauugugcugcucauggucguuaccagcaacgcugacagaauaugcacaggcaucacuuccucuaauucaccccacgugguaaaaacggcaacccagggggaggugaacgucacaggagugauuccucuuacuaccacaccaaccaagagucauuucgccaaucugaaagguacugaaacaaggggcaaguuguguccgaaaugcuuaaacuguaccgaucuggacguugcgcuagggcggcccaagugcacgggaaauaucccuagcgcucgcguguccauucuccacgagguccgaccagugacuucuggcuguuuucccaucaugcauaaccguaccaagauaagacaacugccuaaucuucugagggguuacgaacacauccgguugucgacacauaacguaauuaaugccgagaacgcaccagggggacccuauaaaaucggcacuucaggcagcugcccuaauguuaccaacgggaauggauucuuugccacaauggcuugggcagugccaaagaacgauaauaacaaaaccgccacgaacagucucacuauugaagucccguacaucuguacagagggugaggaccagauaaccguguggggcuuccacuccgaugacgaaacucagauggcuaagcuguauggggauucuaaaccccagaaguuuacaagcuccgccaauggagugaccacgcacuacgucucacaaauuggcgguuucccuaaccagaccgaggacgggggacugccacagaguggccgcaucguuguggauuauaugguacaaaagagcggcaaaacagggacuauuaccuaccagagaggaauccucuuaccccagaagguguggugcgcgucugguagguccaaagucaucaagggcucacugccucuuauuggggaagcagacuguuugcaugagaaauauggaggccugaauaagagcaaaccauacuacacaggugagcacgccaaggcuauagggaacugccccaucugggugaagacuccgcuaaaacucgccaauggcaccaaguaucggccucccgcaaaacugcuuaaggaacgcggauuuuucggcgcuauugccggguuucuggagggagguugggaaggcaugaucgcgggguggcauggauacacaagucacggcgcccacgguguugcaguggcugccgauuugaaaucuacccaggaggcuauaaacaagauuacuaagaaucucaacucccugagcgaauuagaggucaaaaaucugcagcgacucucgggggccauggacgagcuucauaacgaaauccuggaguuggaugaaaagguggacgaccuaagagcagauacgaucucuucccaaauugagcuggccguacuccugucaaaugaaggcaucauuaacagugaggacgagcaccuucuggcuuuggaaaggaaacucaagaaaaugcugggaccaagcgcgguugagauaggcaauggguguuucgaaacaaagcauaagugcaaccagaccugcuuagaucggaucgcagccggaacuuuugacgcuggugaguucucccugccuaccuuugauucucuaaauauuacagccgcaagccucaacgacgauggccuggacaaccacaccauccuuuuguauuacucaacugccgcuaguucccuggccgugacacucaugaucgcaauuuucgucguguauauggucagccgugauaaugugucuuguucaauaugccuguga

SEQ ID NO: 154627 - RNA, 1758 nt, Artificial Sequence
  derived and/or modified CDS sequence (opt3) from hemagglutinin__InfluenzaB__ACR15677
augaaggccaucauugugcugcucauggucguuaccagcaacgcugacagaauaugcacaggcaucacuuccucuaauucaccccacgugguaaaaacggcaacccagggggaagugaacgucacaggagugauuccucuuacuaccacaccaaccaagagucauuucgccaaucugaaagguacuaagacaaggggcaaauuguguccgaagugcuuaaacuguaccgaucuggacguugcgcuagggcggcccaagugcacgggaaauaucccuagcgcuaaaguguccauucuccacgaaguccgcccagugacuucuggcuguuuucccaucaugcaugaucgaaccaagauacgucaacugccuaaccuucugagagguuacgagcacaucagguugucgacacauaauguaauuaacgccgaaaaagcaccagggggacccuauaagaucggcacuucaggcagcugcccuaauauuaccaacgggaauggauucuuugccacaauggcuugggcaguuccgaaaaacgacaauaacaagaccgccacgaauagucucacuaucgaggugccauacauauguacagaaggugaggaucagauuaccgucuggggcuuccacuccgacaacgaggcucagauggccaagcuguauggggauucuaaaccccagaaguuuacuagcuccgcgaacggagugacaacccacuacgugucacaaaucggcgguuucccuaaucagacggaagacgggggacugccacagaguggccggauugucguugauuauauggugcagaaaagcggcaagaccgggacaaucacuuaccaacgcggaauccucuuaccccagaaaguauggugcgcaucugguagauccaaggugauuaaaggcucacugccucuuauaggggaggccgacuguuugcaugaaaaguauggaggccugaacaagagcaaaccauacuacaccggugagcacgcuaaggccaucgggaauugccccauuugggucaaaacaccgcuaaagcucgcaaacggcacuaaauauaggccucccgcuaagcugcuuaaggagcggggauuuuucggcgccaucgcgggguuucuggaaggagguugggagggcaugauagccggguggcauggauacaccagucacggcgcacacgguguggcuguugccgcugauuugaaaucuacacaggaagccauuaauaagaucaccaaaaaccucaauucccugagcgaguuagaagugaagaaccugcagcgccucucgggggcaauggacgagcuucauaaugagauccuggaauuggaugagaaagucgacgaccuacgagccgauacuauuucuucccaaaucgaacuggcugugcuccugucaaacgagggcauuauaaauagugaagacgagcaccuucuggcguuggagagaaagcucaagaaaaugcugggaccaagcgcaguagaaaucggcaacggguguuucgagacgaagcauaaaugcaaucagacaugcuuagauaggauugccgcuggaaccuuugacgccggugaguucucccugccuacuuuugauucucuaaacaucaccgcagccagccucaaugacgauggccuggacaaccacacaauccuuuuguauuacucaaccgcugccaguucccuggcaguuacucucaugauugcgauauucguggucuauauggugagccgggauaacgucucuuguucaaucugccuguga

SEQ ID NO: 154628 - RNA, 1755 nt, Artificial Sequence; identical to SEQ ID NO: 154615
  derived and/or modified CDS sequence (opt3) from hemagglutinin__InfluenzaB__ACR15710

SEQ ID NO: 154629 - RNA, 1755 nt, Artificial Sequence
  derived and/or modified CDS sequence (opt3) from hemagglutinin__InfluenzaB__ACR15721
augaaggccaucauugugcugcucauggucguuaccagcaacgcugacagaauaugcacaggcaucacuuccucuaauucaccccacgugguaaaaacggcaacccagggggaggugaacgucacaggagugauuccucuuacuaccacaccaaccaagagucauuucgccaaucugaaagguacuaagacaaggggcaaauuguguccgaacugcuuaaauuguaccgaucuggacguugcgcuagggcggcccaugugcgugggaacgacuccuagcgcuaaggccuccauccuccacgaaguccgcccagugaccucuggcuguuuucccauuaugcaugaucgaacaaagauccgucaacugccuaaccuucugagagguuacgagaauauaagguugucgacucagaacguaaucaaugcagaaaaagccccagggggacccuaucggcucggcaccucaggcagcugcccuaacgcuacaagucgcuccggguucuuugcaaccauggccugggcuguuccaagagacgauaauaagacggccacuaacccgcugacaguggagguccccuacguguguaccgaaggagaggaccagauuacugugugggguuuccacucugauaauaaagcgcagaugaagaaccuguauggcgacagcaauccucaaaaauuuacauccucagcaaacggggucaccacgcauuacguuagucagaucggaggcuucccagaucagaccgaggacggugggcucccccagagcggaaggauugugguagauuauauggugcaaaagccuggcaagacaggcacuaucgucuaccagcgcgggguguuacugccacagaaaguuuggugcgccucuggacgguccaaggugauaaaagguucacuucccuugauuggcgaagcugacugucugcacgagaaguaugggggacuaaacaaaagcaagccguacuacaccggcgaacacgccaaagcaaucgguaauugcccuauuugggucaagacaccccucaagcuggcuaacgggacuaaauaucgaccuccagccaagcugcugaaagagagaggcuuuuucggagcgaucgccggcuuuuuggaagggggaugggaagguaugaucgcaggcuggcauggguacaccagucacggagcucauggcguggccguagcugccgaucucaagucuacacaggaggcaauuaauaaaauaaccaagaaccuuaauuccuuaagcgaacuggagguuaagaaccuccaaaggcuuucgggugccauggacgaacugcacaaugagaucuuggagcuagacgaaaaaguggaugaccugcgggcugauacuauuucuucccagaucgagcucgcgguccugcuuucaaacgaagggauaauuaauagugaggacgaacaccuguuggcacucgagcguaagcugaaaaagauguuaggccccagcgccguggauaucggaaacggcuguuucgagacgaaacauaagugcaaucagacaugccuggaccgcaucgcugccgggaccuuuaacgcaggagaguucucccuaccaacuuuugauucucucaauauuaccgccgcuagccugaacgacgauggucuugacaaucacacaaucuugcuguauuacucaaccgccgcaaguucccucgcggucacucugaugauugcuauauucaucguguauaugguuagcagagauaacgugucuuguucaauuugccuuuga

SEQ ID NO: 154630 - RNA, 1758 nt, Artificial Sequence
  derived and/or modified CDS sequence (opt3) from hemagglutinin__InfluenzaB__ACR39336
augaaggccaucauugugcugcucauggucguuaccagcaacgcugacagaauaugcacaggcaucacuuccucuaauucaccccacgugguaaaaacggcaacccagggggaggugaacgucacaggagugauuccucuuacuaccacaccaaccaagagucauuucgccaaucugaaagguacugaaacaaggggcaaguuguguccgaaaugcuuaaacuguaccgaucuggacguugcgcuagggcggcccaagugcacgggaaauaucccuagcgcucgcguguccauucuccacgagguccgaccagugacuucuggcuguuuucccaucaugcaugaucguaccaagauaagacaacugccuaaccuucugagggguuacgaacacauccgguugucgacacauaauguaauuaacgccgagaaugcaccagggggacccuauaaaaucggcacuucaggcagcugcccuaacguuaccaaugggaacggauucuuugccacaauggcuugggcagugccaaagaaugacaacaauaaaaccgccacgaacagucucacuauugaagucccguacaucuguacagagggugaggaucagauaaccguguggggcuuccacuccgacaacgaagcucagauggccaagcuguauggggauucuaaaccccagaaguuuacuagcuccgcgaauggagugacaacccacuacgucucacaaauuggcgguuucccuaaccagacggaggacgggggacugccacagaguggccgcaucguuguggauuauaugguacaaaagagcggcaaaaccgggacaauuacuuaccagagaggaauccucuuaccccagaagguguggugcgcaucugguagguccaaagucaucaagggcucacugccucuuauuggggaagccgacuguuugcaugagaaauauggaggccugaauaagagcaaaccauacuacaccggugagcacgcuaaggccauagggaacugccccaucugggugaagacaccgcuaaaacucgcaaauggcacuaaguaucggccucccgcuaaacugcuuaaggaacgcggauuuuucggcgccauugcgggguuucuggagggagguugggaaggcaugaucgccggguggcauggauacaccagucacggcgcacacgguguugcuguggccgcugauuugaaaucuacacaggaggccauaaacaagauuaccaagaaucucaacucccugagcgaauuagaggucaaaaaucugcagcgacucucgggggcaauggacgagcuucauaacgaaauccuggaguuggaugaaaagguggacgaccuaagagccgauacuaucucuucccaaauugagcuggcuguacuccugucaaaugaaggcaucauuaacagugaggacgagcaccuucuggcguuggaaaggaaacucaagaaaaugcugggaccaagcgcaguugagauaggcaauggguguuucgaaacgaagcauaagugcaaccagacaugcuuagaucggaucgccgcuggaaccuuugacgccggugaguucucccugccuacuuuugauucucuaaauauuaccgcagccagccucaacgacgauggccuggacaaccacacaauccuuuuguauuacucaaccgcugccaguucccuggcagugacucucaugaucgcgauuuucgucguguauauggucagccgugauaaugugucuuguucaauaugccuguga

SEQ ID NO: 154631 - RNA, 1755 nt, Artificial Sequence
  derived and/or modified CDS sequence (opt3) from hemagglutinin__InfluenzaB__AEA51386
augaaggccaucauugugcugcucauggucguuaccagcaacgcugacagaauaugcacaggcaucacuuccucuaauucaccccacgugguaaaaacggcaacccagggggaggugaacgucacaggagugauuccucuuacuaccacaccaaccaagaguuacuucgccaaucugaaagguacuaggacacggggcaaguuguguccggauugcuuaaacuguaccgaccuggauguugcgcuagggcgccccaugugcgugggaacgacuccuagcgcuaaagccuccauccuccaugaaguccgaccagugaccucuggcuguuuucccauuaugcacgaccguacaaagaucagacaacugccuaaucuucugagggguuaugagaacauacgguugucgacucagaauguaaucgaugcagaaaaggccccagggggacccuaccgccucggcaccucaggcagcugcccuaacgcuacaaguaaauccggguucuuugcaaccauggccugggcuguuccaaaggacaauuauaaaaacgccacgaauccgcugacuguggagguccccuacauuuguacagaaggagagggucagaucaccguguggggcuuccauucugauaacaagccucagaugaaaaaucuguauggggacagcaacccacaaaaguuuacuuccucagcgaguggagugacaacccacuacgucagccagauuggcgauuuccccgaccagacggaggauggugggcucccucagucuggaagaaucguuguggacuauaugaugcaaaagccaggcaaaaccggcacaauaguauaccagaggggaguguuacugccccagaaggucuggugcgcauccgggcggucaaaagugauuaaggguagccuuccguugaucggcgaagccgauugucugcaugagaaauacgggggacuaaauaagaguaaaccuuauuacacuggcgaacacgcuaaggccauugguaacugccccaucuggguuaucaccccacagaagcucgcaaacgggacaacuuuuucuccucccgcuaaacugcuuaaggagcgcggcuucuuuggagccauugcgggcuuccuggaagggggaugggaggguaugauagccggcuggcacggguauaccucccauggagcacacggcguggcugucgccgcugacuugaaaagcacacaagaggccaucaauaagauuaccaaaaaccucaauucgcugucugaauuagaggugaagaaccugcagcgacucuccggugcaauggacgaacuucauaaugagauccuggaguuggaugaaaagguagacgaucuaagagccgacacuauaucaagucagauugagcuggcuguucuccugagcaacgaagggaucaucaauuccgaggaugaacaccuucuggcguuggagaggaaacucaagaaaaugcugggcccaucugcaguggacauuggaaacggcuguuuugagacgaagcacaaaugcaaucaaacaugcuuagaucggaucgccgcugggaccuucaacgccggagaauuuagccugcccacuuucgacucacuaaauauuaccgcagccagucucaacgaugacggucuggauaaucauacaauacuuuuguacuauuccaccgcugccagcucucuggcagucacucucaugcuggcgaucuucauuguguacauggucucacgugacaacgugaguuguagcaucugccuuuga

SEQ ID NO: 154632 - RNA, 1755 nt, Artificial Sequence
  derived and/or modified CDS sequence (opt3) from hemagglutinin__InfluenzaB__AEA51387
augaaggccaucauugugcugcucauggucguuaccagcaacgcugacagaauaugcacagagaucacuuccucuaauucaccccuugugguaaaaacggcaacccagggcgaagugaacgucacaggggugauuccucugacuaccacaccaaccaagaguuacuucgccaauuugaaaggaacuaggacacgggguaaguuauguccggauugccugaacuguaccgaccuagauguugcgcucggccgccccaugugcguggggacgacuccuagcgcuaaagccuccauccugcacgagguccgaccagugaccucuggauguuuucccauuaugcaugaccguacaaagaucagacaacuuccuaaucuguugaggggcuaugaaaacauacggcucucgacucagaauguaaucgaugcagagaaggccccaggugggcccuaccgccugggaaccucaggcagcugcccuaacgcuacaaguaaaauuggcuucuuugcaaccauggccugggcuguuccaaaggacaauuauaaaaacgccacgaauccgcugacuguggaaguccccuacaucuguacagagggggaggaucagauuaccguguggggauuccacuccgacaacaagacucagaugaaaaaucucuauggugauucuaacccucaaaaguuuacaagcuccgcgaauggcgugaccacgcauuacgucucacagaucggggacuucccagaucagaccgaagacggaggcuuaccccagagugguagaauaguuguggauuauaugaugcaaaagccugggaaaacaggaccaauuguauaccagaggggcgugcugcuuccccagaaggucuggugcgcaagcggccggucuaaagugaucaagggguccuugccgcugauuggagaggccgacugucuacacgaaaaauacgguggccucaacaagucaaaauauagccauacuggggaccacgcuaagacccugggaaacugcccuaucuggguuaagacaccccuuaaacuggccaauggcacuaaguaccgcccuccagcaaaauugcucaaggagcgagguuucuucggggcuaucgccggcuuucuggagggaggcugggaagggaugauugcgggauggcacgguuauaccagucauggcgcccacgggguggcagucgcugccgauuuaaaaucuacacaggaggcuauaaacaagaucaccaagaaucugaacucccucagcgaacuugaggugaaaaaucugcaaagauugucgggagccauggacgaacuacauaacgagauucuggagcucgaugaaaagguagacgaucugagggcagacacuaucucuucccagauagagcuugccguucuguugucaaaugaaggcauuaucaacagugaggaugaacaccuccuggcuuuagagcggaaacugaagaaaaugcuaggucccagcgcgguggacaucgggaauggcuguuucgagacgaagcacaagugcaaccagacaugccucgaucguauugcagccggaaccuuuaaugcuggcgaauuuucccugccaacuuuugacucucuuaacaucaccgccgccagcuugaaugaugacgggcuggacaaccauacaauucuccuguacuauucaaccgcagcuaguucccuugccgucacucugauguuggcaauauucaucguguacauggucagccgcgauaaugugucuuguucaauuugccucuga

SEQ ID NO: 154633 - RNA, 1755 nt, Artificial Sequence
  derived and/or modified CDS sequence (opt3) from hemagglutinin__InfluenzaB__AEA51388
augaaggccaucauugugcugcucauggucguuaccagcaacgcugacagaauaugcacaggcaucacuuccucuaauucaccccacgugguaaaaacggcaacccagggggaggugaacgucacaggagugauuccucuuacuaccacaccaaccaagaguuacuucgccaaucugaaagguacuaggacacggggcaaguuguguccggauugcuuaaacuguaccgaccuggauguugcgcuagggcgccccaugugcgugggaacgacuccuagcgcuaaagccuccauccuccaugaaguccgaccagugaccucuggcuguuuucccauuaugcacgaccguacaaagaucagacaacugccuaaucuucugagggguuaugagaacauacgguugucgacucagaauguaaucgaugcagaaaaggccccagggggacccuaccgccucggcaccucaggcagcugcccuaacgcuacaaguaaaauuggguucuuugcaaccauggccugggcuguuccaaaggacaauuauaaaaacgccacgaauccgcugacuguggagguccccuacaucuguacagaaggagaggaucagauuaccgugugggguuuccauuccgacaacaagacucagaugaaaaaucuguauggcgauucuaacccucaaaaguuuacaagcuccgcgaauggggugaccacgcacuacgucucacagaucggagacuucccagaucagaccgaggacggcggucucccccagagugggagaauaguuguggauuauaugaugcaaaagccuggaaaaacaggcacuauuguauaccagaggggcguguuacugccacagaaggucuggugcgcaagcgggcggucuaaagugaucaagggaucccuucccuugauuggugaagccgacugucugcaugagaaauacggcgggcuaaacaagucaaaaccgagcuauaccggagaacacgcuaaggccaagggcaacugcccuaucuggguuaauacaccccucaaacuggcaaacgguacuaaguaccgcccuccagcuaaacuuuuuaaggagcgaggguucuuuggcgccaucgcgggauuccuggagggcgggugggaaggaaugauugccgguuggcacggcuauaccagucauggggcacacggaguggcugucgccgcugacuugaaaucuacacaggaggccauaaauaagaucaccaagaaccucaauucccugagcgaauuagaggugaaaaaccugcaaagacucucgggcgcaauggaugaacuucauaaugagauucuggaguuggacgaaaagguagaugaccuaagggccgauacuaucucuucccagauagagcuggcuguucuccugucaaacgaagguauuaucaauagugaggacgaacaccuucuggcguuggagcggaaacucaagaaaaugcuggggcccagcgcaguggauaagggcaacggauguuuugagacgaagcacaaaugcaaucagacaugcuuagaccguaucgccgcuggcaccuucaacgccggggaauuuucccugccaacuuucgauucucuaaauauuaccgcagccagccucaacgacgauggacuggacaaucauacaauccuuuuguacuauucaaccgcugccaguucccuggcagucacucucaugcuggcgauuuucauaguguacauggucagccgcgacaacgugucuuguucaaucugccuuuga

SEQ ID NO: 154634 - RNA, 1755 nt, Artificial Sequence
  derived and/or modified CDS sequence (opt3) from hemagglutinin__InfluenzaB__AEA51389
augaaggccaucauugugcugcucauggucguuaccagcaacgcugacagaauaugcacaggcaucacuuccucuauuucaccccuuguggauaaaacggcaacccagggggagguaaaugugacaggagucaucccucugacuaccacaccaaccaagaguuacuucgccaacgugaaagguacuaggacacggggcaaguuguguccggacugcuuaaauuguaccgaucuggacguugcgcuagggcgccccaugugcgugggaacgacuccuagcgcuaaagccuccauucuccacgaaguccgaccagugaccucuggcuguuuucccaucaugcaugaucguacaaagauaagacaacugccuaaccuucugagggguuaugagaauauccgguugucgacucagaacguaauugacgcacagaaggccccagggggacccuaccgccucggcaccucaggcagcugcccuaaugcuacaaguaaaaucggguucuuugcaaccauggccugugcuguuccaaaggauaacuauaaaaaugccacgaacccgcugacuguggaaguccccuacauuagaacagagggagaagaccagaucaccgugugggguuuccacuccgauaauaagacucaaaugaaaaaccuguauggcgacucuaauccuccaaaguuuacaagcuccgcgaacggggugaccacgcauuacgucucacagaccggagauuuccccgaccagacagaggauggcggucucccuccaagugggaggauaguuguggacuauaugaugcagaagcccggaaaaacuggcaccauugcauaccaacggggcguauuacugccgcagaagguguggugcgccagcgggcgcucuaaagucaucaagggaucccuuccuuugauuggugaggcugacugucugcacgaaaaauacggcgggcuaaauaagucaaaacccccacauacaggagagcacacuaaggccaucggcaacugcccuaucugggugaagacaccccucaaacuggcaaacgguaccaaguaucgaccaagcgcuaaacuucugaaggaaagaggguuuuucggcgccauugcgggauuuuuggagggcgggugggagggaaugauagccgguuggcacggcuacaccagucauggggcacacggaguugcuguggccgcugaucucaaaucuacucaggaagccaucaauaagauuacgaagaacuuaaauucccugagcgagcuggaagucaaaaaccuccagaggcuuucgggcgcaauggacgagcugcauaaugaaaucuuggagcuagaugagaagguggacgaucugcgggccgacacaauaucuucccaaauugaacucgcuguacugcuuucaaacgaggguaucaucaauagugaagaugagcaccuguuggcgcucgaacguaaacugaagaaaauguuagggcccagcgcaguugacauuggcaacggauguuucgagaccaagcacaagugcaaucagacuugccuggaucgcaucgccgcuggcaccuuuaacgccggggaguucuuucuaccuacauucgacucccucaauauuaccgcagccucucugaacgaugacggacuugacaaucauacuauauugcuguauuacagcacagcugccucaagucucgcagugacgcugaugcuugcgaucuucauugucuauaugguguccagagauaacgucagcuguucuaucugccuguga

SEQ ID NO: 154635 - RNA, 1755 nt, Artificial Sequence
  derived and/or modified CDS sequence (opt3) from hemagglutinin__InfluenzaB__AEA51390
augaaggccaucauugugcugcucauggucguuaccagcaacgcugacagaauaugcacaggcaucacuuccucuaauucaccccacgugguaaaaacggcaacccagggggaggugaacgucacaggagugauuccucuuacuaccacaccaaccaagaguuacuucgccaaucugaaagguacuaggacacggggcaaguuguguccggauugcuuaaacuguaccgaccuggauguugcgcuagggcgccccaugugcgugggaacgacuccuagcgcuaaagccuccauccuccaugaaguccgaccagugaccucuggcuguuuucccauuaugcacgaccguacaaagaucagacaacugccuaaucuucugagggguuaugagaacauacgguugucgacucagaauguaaucgaugcagaaaaggccccagggggacccuaccgccucggcaccucaggcagcugcccuaacgcuacaaguaaaauuggguucuuugcaaccauggccugggcuguuccaaaggacaauuauaaaaacgccacgaauccgcugacuguggagguccccuacaucuguacagaaggagaggaucagauuaccgugugggguuuccauuccgacaacaagacucagaugaaaaaucuguauggcgauucuaacccucaaaaguuuacaagcuccgcgaauggggugaccacgcacuacgucucacagaucggagacuucccagaucagaccgaggacggcgguuuacccccuagugggagaauaguuguggauuauaugaugcagaagccaggaaaaacaggcacuauuguauaccaaaggggcgggcuccugccccagaagguguggugcgcaagcggacggucuaaagucaucaaggguucccuuccguugauuggcgaagccgacugucugcaugagaaauacgggggacuaaacaagucaaaaccuuauuacaccggcgaacacgcuaaggccaucgguaacugccccaucugggugaagccaccucucaaacuggcaaaugggacaaaguaucgacccccagcuaaacuuuuuaaggagcgcggcuucuuuggagcccuggcgggcuucuuggaagggggaugggaggguaugauugccggcuggcacggguacacuagccauggagcacacggcguugcuguggccgcugaccucaaaaguacccaggaggccauaaacaagaucacaaagaaucugaacucuuuauccgaacuggaggucaaaaaucuccagagacuuagcggugcaauggaugaacugcauaacgagauuuuggagcuagacgaaaagguggaugaccugagggccgauaccaucucgucucaaauagagcucgcuguacugcuuuccaaugaagggauuaucaacucagaggacgaacaccuguuggcgcucgagcggaaacugaagaaaauguuaggccccagugcaguugauaucggaaauggcuguuuugagacuaagcacaagugcaaccagacgugccuggaccguauugccgcugggacauucaaugccggagaauuuagccuaccuaccuucgauucccucaacaucacugcagccucucugaaugacgauggucuugacaaccauaccauuuugcuguauuacagcacagcugccucaagucucgcagugacccugaugcuugcgauauucaucgucuauauggugucccgcgacaaugucagcuguucuauuugccuguga

SEQ ID NO: 154636 - RNA, 1758 nt, Artificial Sequence
  derived and/or modified CDS sequence (opt3) from hemagglutinin__InfluenzaB__AEA51391
augaaggccaucauugugcugcucauggucguuaccagcaacgcugacagaauaugcacaggcaucacuuccucuaauucaccccacgugguaaaaacggcaacccagggggaggugaacgucacaggagugauuccucuuacuaccacaccaaccaagagucauuucgccaaucugaaagguacugaaacaaggggcaaguuguguccgaaaugcuuaaacuguaccgaucuggacguugcgcuagggcggcccaagugcacgggaaagaucccuagcgcucgcguguccauucuccacgagguccgaccagugacuucuggcuguuuucccaucaugcaugaucguaccaaaauaagacaacugccuaaucuucugagggguuacgaacacauccgguugucgacacauaacguaauuaaugccgagaacgcaccagggggacccuauaagaucggcacuucaggcagcugcccuaauauuaccaacgggaauggauucuuugccacaauggcuugggcaguuccgaaaaacgacaagaauaaaaccgccacgaacccacucacuaucgaagugcccuacauauguacagagggugaggaucagauuaccgucuggggcuuccacagugugaaugaaacucagauggcuaagcuguauggggacuccaagccucagaaauuuacaucuagcgccaacggagugaccacgcacuacaucucccaaauuggcgguuucccaaaccagaccgaggaugggggacugccccagucaggccgcaucgucguugacuauauggugcagaagaguggcaaaacagggacuaucaccuaccaaagagguauucucuuaccucagaagguauggugcgcgagcggaaggucuaaagugauaaagggcucccugccacuuaucggggaagcagauuguuugcaugagaaauauggaggccugaauaagucaaagcccuacuacacaggugagcacgccaaagcuauugggaacugcccgaucugggucaagacuccucuaaaacucgccaauggcaccaaguaucggcccccagcaaaacugcuuaaggaacgcggauuuuucggcgcuauagccggguuucuggagggagguugggaaggcaugauugcgggguggcauggauacacaagccacggcgcccacggugugccuguugcagcugacuugaagaguacccaggaggccaucaacaaaaucacuaagaaucucaacucucuguccgaauuagaggugaaaaaucugcagcgacucagcggggcuauggaugagcuucauaacgaaauucuggaguuggacgaaaaggucgaugaccuaagagccgacacgaucucgucucaaauugagcuggcagugcuccuguccaaugaaggcauaaucaacucagaggaugagcaccuucuggccuuggaaaggaaacucaagaagaugcugggacccagugcuguagagauuggcaauggguguuucgaaacaaaacauaagugcaaccagaccugcuuagaccggaucgcggcaggaacuuuugaugccggugaguucagccugccaaccuuugacucccuaaauaucacagcugccucucucaacgaugacggccuggauaaucacaccauucuuuuguauuacagcacugcagccucaagucuggcuguuacacucaugauagccaucuucguggucuauauggugucccgugacaacgucagcuguucuauuugccuguga

SEQ ID NO: 154637 - RNA, 1758 nt, Artificial Sequence
  derived and/or modified CDS sequence (opt3) from hemagglutinin__InfluenzaB__AEA51392
augaaggccaucauugugcugcucauggucguuaccagcaacgcugacagaauaugcacaggcaucacuuccucuaauucaccccacgugguaaaaacggcaacccagggggaggugaacgucacaggagugauuccucuuacuaccacaccaaccaagagucauuucgccaaucugaaagguacugaaacaaggggcaaguuguguccgaaaugccccaacuguaccgauuuagacguugcgcuggggcggccuaagugcacgggaaagaucccaagcgcucgcguguccauucuacacgagguccgacccgugacuucuggcuguuuuccuaucaugcaugaucguaccaaaauaagacaacucccaaaucugcuuagggguuacgaacacauccggcugucgacacauaacguaauuaaugccgagaacgcacccgggggaccuuauaagaucggcacuucaggcagcugcccaaauguuaccaacgggaauggauucuuugccacaauggcuugggcagugccgaaaaacgacaagaauaaaaccgccacgaaccccuugacuauugaagucccuuacaucuguacagagggugaggaucagauaaccguguggggcuuccacagugacaaugaaacucagauggcuaagcucuauggggauuccaagccacagaaauuuacaucuagcgccaacggaggcaccacgcacuacgugucccaaauugguggguuccccaaccagaccgaggacggaggccugccucagucaggccgcaucgucguugauuauauggugcagaagagugggaaaacaggaacuauuaccuaccaaagagguauccugcucccacagaagguauggugcgcgagcggcaggucuaaagugaucaagggguccuuaccccugauuggagaagcagacugucuucaugagaaauauggcgguuugaauaagucaaagccguacuacacaggggagcacgccaaagcuauaggcaacugcccuaucugggucaagacuccccugaaacuagccaauggaaccaagaacauugcaccagcuaaacuccugaaggaacggggcuuuuucggggccaucgcgggauuucuugaggguggcugggaagggaugauagccggauggcauggcuauacaagccacggugcacacgggguggcuguugccgcugaucugaagaguacccaggaggccauuaauaaaaucacuaagaaccuuaauucucucuccgaacuggaggugaaaaacuuacagcgccugagcggcgcaauggacgagcuccauaaugaaauccuugagcuggaugaaaaggucgacgacuugcgagccgauacgauuucgucucaaaucgagcuagcugugcugcucuccaacgaaggaauuauaaauucagaggacgagcaccuguuggcgcuggaaagaaaauugaagaagaugcucggcccuagugcaguagagaucgggaacggauguuucgaaacaaaacauaagugcaaucagaccugccuggauaggauugccgcugguacuuuugacgccggcgaguucagcuuacccaccuuugauucccugaacaucacagcagccucucuaaaugacgaugggcucgacaaccacaccauccugcuuuacuauagcacugcugccucaaguuuggcaguuacacugaugauugcgauauucguggucuacauggugucccgggauaacgucagcuguucuaucugccucuga

SEQ ID NO: 154638 - RNA, 1755 nt, Artificial Sequence
  derived and/or modified CDS sequence (opt3) from hemagglutinin__InfluenzaB__AEA51395
augaaggccaucauugugcugcucauggucguuaccagcaacgcugacagaauaugcacaggcaucacuuccucuaauucaccccacgugguaaaaacggcaacccuuggggaagugaacgucacaggagugauuccucugacuaccacaccaaccaagaguuacuucgccaauuugaaagguacuaggacacggggcaaguuauguccggauugccugaacuguaccgaccuagauguugcgcucgggcgccccaugugcgugggaacgacuccuagcgcuaaagccuccauccugcaugaaguccgaccagugaccucuggcuguuuucccauuaugcacgaccguacaaagaucagacagcuuccuaaucuguugagggguuaugagaacauacggcucucgacucaaaauguaaucgaugcagaaaaggccccagggggacccuaccgccugggcaccucaggcagcugcccuaacgcuacaaguaaaauuggguucuuugcaaccauggccugggcuguuccaaaggacaauuauaaaaacgccacgaauccgcugacuguggagguccccuacaucuguacagaaggagaggaucaguucaccgugugggguuuucauuccgacaacauuacucagcucaagaauuuauucggcgauucuaacccucagagauuuacaagcuccgcgaauggggugaccacgcacuaugucucacaaaucggagacuucccagaucagaccgaggacggcggucugccccagagugggaggauaguuguggauuacguaaugcagaaaccuggaaagacaggcacuauuguguaucaacggggcguccuuuugccacccaaggugugguuugcacgcgggcgaagcaaaguuaucaagggaucucugccgcuaauuggugaagccgacugcauccaugagaaauacggcgggcucaacaaguccaaaccuuacuauaccggagaacacgcuaaggccaucggcaacugucccauuugggugaaaacaccacugaaacuugcaaaugguacuaaguacagaccucccgcuaagcuguugaaggagaggggguucuuuggcgccauagcgggauuccucgagggcgggugggaaggaaugaucgccgguuggcacggcuauaccucacauggggcacacggagucgcuguggccgcugaccugaaaagcacacaggaggccauuaacaagaucaccaaaaauuuaaacagucugucugaacucgagguaaagaaucuucagcggcuguccggcgcaauggaugaauugcauaacgagauacuagagcuggacgaaaagguugaugaccuccgugccgauacuauuagcucgcagaucgagcuggcugugcuucugucuaaugaagguaucauuaacuccgaggacgaacacuugcucgcgcuggagcgcaaauuaaagaaaaugcuggggccaucagcagucgauaucggcaauggaugcuuugagacgaagcacaaauguaaccaaacaugccuagacagaauugccgcuggcaccuucaaugccggggaguucagucuccccacuuuugauagccugaacauaaccgcagccucccuuaaugacgauggauuggacaaccauacaauccugcucuacuauucuaccgcugccagcucacuggcagugacucuuaugcuggcgauuuucaucgucuacauggugaguagggacaauguuuccugcagcaucuguuuguga

SEQ ID NO: 154639 - RNA, 1758 nt, Artificial Sequence
  derived and/or modified CDS sequence (opt3) from hemagglutinin__InfluenzaB__AEA51398
augaaggccaucauugugcugcucauggucguuaccagcaacgcugacagaauaugcacaggcaucacuuccucuaauucaccccacgugguaaaaacggcaacccagggggaggugaacgucacaggagugauuccucuuacuaccacaccaaccaagagucauuucgccaaucugaaagguacugaaacaaggggcaaguuguguccgaaaugccccaacuguaccgauuuagacguugcgcuggggcggccuaagugcacgggaaagaucccaagcgcucgcguguccauucuacacgagguccgacccgugacuucuggcuguuuuccuaucaugcaugaucguaccaaaauaagacaacucccaaaucugcuuagggguuacgaacacauccggcugucgacacauaacguaauuaaugccgagaacgcacccgggggaccuuauaagaucggcacuucaggcagcugcccaaauguuaccaacgggauuggauucuuugccacaauggcuugggcagugccgaaaaaugacaagaacaaaaccgccacgaaucccuugacuaucgaagucccuuacauauguacagagggugaggaucagauuaccguguggggcuuccacagugacaacgaaacucagauggcuaagcucuauggggauuccaagccacagaaauuuacaucuagcgccaauggagugaccacgcacuacgucucccaaaucggcgguuuccccaaccagaccgaggacgggggacugccucagucaggccgcauuguuguggauuauaugguacagaagaguggcaaaacagggacuaucaccuaccaaagaggaauccugcucccacagaagguguggugcgcgagcgguaggucuaaagucauuaagggcuccuuaccccugauaggggaagcagacugucuucaugagaaauauggaggcuugaacaagucaaagagcuacuacacaggugagcacgccaaagcuaucgggaauugcccgauuugggugaagacuccucugaaacuagccaacggcaccaaguaucggcccccagcacaucucaguuacuuuuguggauucuuuggcgcuaucgccggguuccuggaaggagguugggagggcaugauagcgggguggaauggauauacaucucacggcgcccacgguguugcaguggucgcugaucuuaaauccacccaggaagccauuaacaagaucacuaagaaucugaacagcuugucggagcucgaagugaaaaaucugcagcgcuuaucuggggcuauggacgagcugcauaacgagauccucgaacuugaugagaagguagacgaccugcgagccgauacgauuuccucacaaaucgaauuggcaguucuacugaguaaugagggcauuauaaacagcgaagacgagcaccuccuggcccuugagagaaaacugaagaaaauguugggaccuuccgcuguggaaaucggcaaugggugcuuugagacaaagcauaagugcaaccagaccugucucgauaggauugcggcaggaacuuucgacgccggugaauuuucucugcccaccuucgauagcuuaaauaucacagcugccucacugaacgacgauggccuagacaaucacaccauccuccuguacuauaguacugcagccuccagccuugcugucacauugaugauugccauauucguggucuacauggugucucgggauaacguuucaugcaguaucugucuguga

SEQ ID NO: 154640 - RNA, 1758 nt, Artificial Sequence
  derived and/or modified CDS sequence (opt3) from hemagglutinin__InfluenzaB__AEA51399
augaaggccaucauugugcugcucauggucguuaccagcaacgcugacagaauaugcacaggcaucacugcaucccagucucccaauauugauaaaucaaguacgcaaggggaggugaacguaaccggagugaucccucuuacaacuaccccaacaaagagccacuucgccaaucugaaagguaccgaaacuaggggcaaguuguguccgaaaugccccaacuguacagacuuagaugucgcgcuggggcggccuaagugcaccggaaagauuccauccgcucgcgugucuauccuacaugagguucgacccgugacgucgggcuguuuuccuauaaugcacgaccguacuaaaaucagacagcucccaaaucugcuuagggguuacgaacauauucggcugucaacccacaacgucaucaaugccgagaacgcacccgggggaccuuauaagauuggcacaagcggcaguugcccaaaugugacuaacgggaucggauucuuugccaccauggcuugggcaguaccgaaaaaugauaagaacaaaacagccaccaaucccuugacgauagaaguuccuuacauuuguacugagggugaggaccagaucacaguguggggcuuccauuccgauaacgaaacccagauggcuaagcucuauggggacucuaagccacaaaaauuuacuagcuccgccaauggagucacaacccacuacgugucacagauuggcgguuuccccaaccagacggaggaugggggacugccucagaguggccgcaucguggucgacuauaugguucaaaagagcggcaaaaccgggacaaucacuuaccagagagguauucugcucccacagaagguguggugcgcgucuggaagguccaaaguaauaaagggcucauuaccccugaucggggaagcagauugucuucacgagaaauauggaggcuugaacaagagcaagaguuacuacaccggugagcaugccaaagcuauugggaauugcccgaucugggugaagacaccucugaaacuagccaacggcacuaaguaucggcccccagcacaccucucuuacuuuuguggauucuuuggcgcuauagccggguuccuggaaggagguugggagggcaugauugcgggguggaauggauauaccucccauggcgcccacggugucgcagugguugcugaccuuaaaagcacacaggaagccaucaacaagaucaccaagaaucugaacucguugucugagcucgaagugaaaaaucugcaacgcuuauccggggcuauggaugagcugcacaacgagauucucgaacuugacgagaaggucgacgaucugcgagccgacacuaucucaagucagauugaauuggcagugcuacugagcaaugagggcauaaucaacuccgaagaugagcaucuccuggcccuugagagaaaacugaagaaaauguugggaccuucugcuguagaaauuggcaaugggugcuuugagacgaagcacaagugcaaccagacaugucucgacaggaucgcggcaggaaccuucgaugccggugaauuuagccugcccacuuucgacucauuaaauaucaccgcugccagucugaacgaugacggccuagauaaucauacaauucuccuguacuauuccaccgcagccagcucucuugcuguuacuuugaugauagccaucuucguggucuacauggugucacgggacaacgucaguugcagcauuugucuguga

SEQ ID NO: 154641 - RNA, 1758 nt, Artificial Sequence
  derived and/or modified CDS sequence (opt3) from hemagglutinin__InfluenzaB__AEG21014
augaaggccaucauugugcugcucauggucguuaccagcaacgcugacagaauaugcacaggcaucacuuccucuaauucaccccacgugguaaaaacggcaacccagggggaggugaacgucacaggagugauuccucuuacuaccacaccaaccaagagucauuucgccaaucugaaagguacugaaacaaggggcaaguuguguccgaaaugcuuacacuguaccgaucuggacguugcgcuagggcggcccaagugcacgggaaagaucccuagcgcucgcguguccauucuccaugagguccgaccagugacuucuggcuguuuucccaucaugcacgaucguaccaaaauaagacaacugccuaaccuucugagggguuacgaacauauccgguugucgacacacaauguaauuaacgccgagaaugcaccagggggacccuauaagaucggcacuucaggcagcugcccuaacguuaccaaugggaacggauucuuugccacaauggcuugggcagugccgaaaaaugacaacaauaagaccgccacgaacagucucacuauugaagucccauacaucuguacagagggugaggaucagauaaccguguggggcuuccacuccgacaaugaaacucagauggcuaaacuguauggggauucuaagccccagaaguuuacaagcuccgccaacggagugaccacgcauuacgucucacaaaugggcgguuucccuaaccagaccgaggacgggggacugccacagaguggccgcauuguuguggauuauaugguacagaaaagcggcaagacagggacuaucaccuaccaaagagguauucucuuaccccagaaaguguggugcgcgucuggaagguccaaggucaucaaaggcucacugccucuuaucggggaagcagacuguuugcacgagaaguauggaggccugaauaaaagcaagccauacuacacaggugagcaugccaaggcuauugggaacugccccauaugggugaaaacuccgcuaaagcucgccaauggcaccaaauaucggccucccgcaaagcugcuuauggaacgcggauuuuucggcgcuaucgccggguuucuggagggagguugggaaggcaugauugcgggguggcacggauacacaagucacggcgcccaugguguugcaguggcugccgauuugaaaucuacccaggaggcuaucaacaagauaacuaagaaucucaacucccugagcgaauuagaggucaaaaaucugcagcgacucucgggggccauggacgagcuucacaacgaaauucuggaguuggaugaaaagguggacgaccuaagagcagauacgaucucuucccaaaucgagcuggccguacuccugucaaaugaaggcauuaucaacagugaggacgagcaucuucuggcuuuggaaaggaaacucaagaaaaugcugggaccaagcgcgguugagauuggcaauggguguuucgaaacaaagcacaagugcaaccagaccugcuuagaucggauagcagccggaacuuuugacgcuggugaguucucccugccuaccuuugauucucuaaauaucacagccgcaagccucaacgacgauggccuggacaaucauaccauucuuuuguauuacucaacugccgcuaguucccuggccgugacacucaugaucgcaaucuucgucguguauauggucagccgugauaacgugucuuguucaauuugccuguga

SEQ ID NO: 154642 - RNA, 1755 nt, Artificial Sequence
  derived and/or modified CDS sequence (opt3) from hemagglutinin__InfluenzaB__AEG21015
augaaggccaucauugugcugcucauggucguuaccagcaacgcugacagaauaugcacaggcaucacuuccucuaauucaccccacgugguaaaaacggcaacccagggggaggugaacgucacaggagugauuccucuuacuaccacaccaaccaagaguuacuucgccaaucugaaagguacuaggacacggggcaaguuguguccggauugcuuaaacuguaccgaccuggauguugcgcuagggcgccccaugugcgugggaacgacuccuagcgcuaaagccuccauccuccaugaaguccgaccagugaccucuggcuguuuucccauuaugcacgaccguacaaagaucagacaacugccuaaucuucugagggguuaugagaacauacgguugucgacucagaauguaaucgaugcagaaaaggccccagggggacccuaccgccucggcaccucaggcagcugcccuaacgcuacaaguaaaaauggguucuuugcaaccauggccugggcuguuccaaaggacaacuauaaaggagccacgaauccgaagacuguggagguccccuacauuuguacagaaggugagggccagaucaccguguggggguuccauuccgauaacaaaccucagaugaagaaucuguauggagacucuaacccacaaaaguuuacuagcuccgcgucaggcgugacaacccacuacgucagucagauuggugauuuccccgaccagacggaggaugggggacugccucagagcggcagaaucguuguggacuauaugaugcaaaaaccaggcaagaccgggacaauaguauaccagaggggagugcucuuaccccagaaagucuggugcgcaucuggucgguccaaggugauuaaaggcucacugccgcuuaucggggaagccgauuguuugcaugagaaguacggaggccugaauaaaagcaagccuuauuacacuggugaacacgcuaaggccauugggaacugccccaucuggguuaucaccccacagaaacuagcaaacggcacaacuuuuaguccucccgcuaagcuccugaaagagcgcggauucuuuggcgccauugcgggguuccuugagggagguugggaaggcaugauagccggguggcacggauauaccucucauggcgcacacgguguggcugucgccgcugaccugaaguccacacaagaggccaucaauaaaauuaccaagaacuugaauagccucucggaacuggaggugaagaacuuacagcgacugucuggggcaauggacgaacuccauaaugagauccuugagcuggaugaaaaaguagacgauuugagagccgacacuauauccucacagauugagcuagcuguucugcucaguaacgaaggcaucaucaauagcgaggaugaacaucugcuugcgcuggagaggaaguugaaaaagaugcucggaccauccgcaguggacauuggcaacggguguuuugagacgaaacacaagugcaaucaaacaugccuggaucggaucgccgcuggaaccuucaacgccggugaauuuucuuuacccacuuucgacagccugaauauuaccgcagccucacuaaacgaugacggccucgauaaucacacaauacugcuuuacuauaguaccgcugccuccagcuuggcagucacucugaugcucgcgaucuucauuguguacauggucucucgugacaacgugucauguaguaucugccuguga

SEQ ID NO: 154643 - RNA, 1755 nt, Artificial Sequence
  derived and/or modified CDS sequence (opt3) from hemagglutinin__InfluenzaB__AEG21016
augaaggccaucauugugcugcucauggucguuaccagcaacgcugacagaauaugcacaggcaucacuuccucuaauucaccccacgugguaaaaacggcaacccagggggaagugaacgucacaggagugauuccucuuacuaccacaccaaccaagaguuacuucgccaaucugaaagguacuaggacacggggcaaguuguguccggauugcuuaaacuguaccgaccuggauguugcgcuagggcgccccaugugcgugggaacgacuccuagcgcuaaagccuccauccuccaugaaguccgaccagugaccucuggcuguuuucccauuaugcacgaccguacaaagaucagacaacugccuaaucuucugagggguuaugagaacauacgguugucgacucagaauguaaucgaugcagaaaaggccccagggggacccuaccgccucggcaccucaggcagcugcccuaacgcuacaaguaaaauuggguucuuugcaaccauggccugggcuguuccaaaggacaauuauaaaagagccacgaacccgaagacuguggagguccccuacaucuguacagaaggagaggaucagauuaccgugugggguuuccauuccgacaauaaaccucagaugaagaacccauauggcgauucuaauccccaaaaguuuacuagcuccgcgucaggggugacaacccacuacgucagucagaucggagacuucccugaucagacggaggacggcggucugccacagagcgggaggauaguuguggauuauaugaugcaaaaacccggaaagaccggcacaauuguauaccagcggggcgugcugcucccgcagaaagucuggugcgcaucugggcgcuccaaggugaucaaaggaucauuaccucugauuggugaagccgacugucuucaugagaaguacggcggguugaacaaaagcaagcccuauuacacuggagaacacgcuaaggccaucggcaauugcccaaucuggguuaaaaccccucugaagcuagcaaacgguacaaaauaucgacccccagcuaagcuccugaaagagagaggguuuuucggcgccauugcgggauuucuugagggcgggugggaaggaaugauagccgguuggcacggcuacacaagucauggggcacacggaguggcugucgccgcugaccugaagucuacccaggaggccaucaacaagauuacuaaaaauuugaacucccucagcgaacuggaggugaagaauuuacaaaggcugucgggcgcaauggaugaacuccauaacgagauccuugagcuggacgaaaaaguagaugacuugcgggccgauaccauaucuucccagauugagcuagcuguucugcucucaaaugaagguaucaucaacagugaggacgaacaucugcuugcgcuggagcguaaguugaaaaagaugcucgggcccagcgcaguggauauuggcaauggauguuucgagacuaagcacaaaugcaaccagacgugccuggaccgcaucgccgcuggcacauuuaaugccggggaguucuccuuaccuaccuuugauucucugaacauuacugcagccagccuaaaugacgauggacucgacaaccacaccauacugcuuuauuacucaacagcugccaguuccuuggcagucacccugaugcucgcgaucuucauuguguauauggucagcagagacaaugugucuuguucaaucugccuguga

SEQ ID NO: 154644 - RNA, 1755 nt, Artificial Sequence
  derived and/or modified CDS sequence (opt3) from hemagglutinin__InfluenzaB__AEG21017
augaaggccaucauugugcugcucauggucguuaccagcaacgcugacagaauaugcacaggcaucacuuccucuaauucaccccacgugguaaaaacggcaacccagggggaagugaacgucacaggagugauuccucuuacuaccacaccaaccaagaguuacuucgccaaucugaaagguacuaggacacggggcaaguuguguccggauugcuuaaacuguaccgaccuggauguugcgcuagggcgccccaugugcgugggaacgacuccuagcgcuaaagccuccauccuccaugaaguccgaccagugaccucuggcuguuuucccauuaugcacgaccguacaaagaucagacaacugccuaaucuucugagggguuaugagaacauacgguugucgacucagaauguaaucgaugcagaaaaggccccagggggacccuaccgccucggcaccucaggcagcugcccuaacgcuacaaguaaaauuggguucuuugcaaccauggccugggcuguuccaaaggacaauuauaaaaacgccacgaauccgcugacuguggagguccccuacaucuguacagaaggagaggaucagauuaccgugugggguuuccauuccgacaacaagacucagaugaaaaaucuguauggcgauucuaacccucaaaaguuuacaagcuccgcgaauggggugaccacgcacuacgucucacagaucggagacuucccagaucagaccgaggacggcggucucccccagagugggagaauaguuguggauuauaugaugcaaaagccuggaaaaacaggcacuauuguauaccagaggggcguguuacugccacagaaggucuggugcgcaagcgggcggucuaaagugaucaagggaucccuucccuugauuggugaagccgacugucugcaugagaaauacggcgggcuaaacaagucaaaaccgagcuauaccggagaacacgcuaaggccaucggcaacugcccuaucuggguuaagacaccccucaaacuggcaaaugguacuaaguaccgcccuccagcuaaacuucugaaggagcgaggguuuuucggcgccauugcgggauuuuuggagggcgggugggaaggaaugauagccgguuggcacggcuauaccagucauggggcacacggaguggcugucgccgcugaccucaaaucuacacaggaggccaucaacaagauuaccaagaaucugaacuccuuaagcgaacuggaggugaaaaaucuccaaagacuuucgggcgcaauggaugaacugcauaacgagaucuuggagcuagacgaaaagguagaugaccugagggccgauacuauaucuucccagauugagcucgcuguucugcuuucaaaugaagguaucaucaacagugaggacgaacaccuguuggcgcucgagcggaaacugaagaaaauguuagggcccagcgcaguggauauuggcaauggauguuucgagacgaagcacaagugcaaccagacaugccuggaccguaucgccgcuggcaccuuuaaugccggggaguucucccuaccaacuuuugauucucucaacauuaccgcagccagccugaaugacgauggacuugacaaccauacaauauugcuguacuauucaaccgcugccaguucccucgcagucacucugaugcuugcgaucuucauuguguacauggucagccgcgacaaugugucuuguucaaucugccuguga

SEQ ID NO: 154645 - RNA, 1755 nt, Artificial Sequence
  derived and/or modified CDS sequence (opt3) from hemagglutinin__InfluenzaB__AEG21018
augaaggccaucauugugcugcucauggucguuaccagcaacgcugacagaauaugcacaggcaucacuuccucuauuucaccccuuguggauaaaacggcaacccagggggagguaaaugugacaggagucaucccucugacuaccacaccaaccaagaguuacuucgccaacgugaaagguacuaggacacggggcaaguuguguccggacugcuuaaauuguaccgaucuggacguugcgcuagggcgccccaugugcgugggaacgacuccuagcgcuaaagccuccauucuccacgaaguccgaccagugaccucuggcuguuuucccaucaugcaugaucguacaaagauaagacaacugccuaaccuucugagggguuaugagaauauccgguugucgacucagaacguaauugacgcacagaaggccccagggggacccuaccgccucggcaccucaggcagcugcccuaaugcuacaaguaaaaucggguucuuugcaaccauggccugugcuguuccaaaggauaacuauaaaaaugccacgaacccgcugacuguggaaguccccuacauuagaacagagggagaagaccagaucaccgugugggguuuccacuccgauaauaagacucaaaugaaaaaccuguauggcgacucuaauccuccaaaguuuacaagcuccgcgaacggggugaccacgcauuacgucucacagaccggagauuuccccgaccagacagaggauggcggucucccuccaagugggaggauaguuguggacuauaugaugcagaagcccggaaaaacuggcccgauugcauaccaacggggcguauuacugccucagaagguguggugcgccagcgggcgcucuaaagucaucaagggaucccuucccuugauuggugaggcugacugucugcacgaaaaauacggcgggcuaaauaagucaaaauauagccauaccggagaucacgccaagacacucggcaacugcccaaucugggugaagacuccucugaaacuugcaaacgguaccaaguaccgacccagugcuaaacuguugaaggagagaggguuuuucggcgccaucgcgggauuucucgaaggcgggugggagggaaugauugccgguuggcacggcuauacaucucauggggcacacggaguugcuguggccgcugaccugaaauccacccaggaggccauaaauaagaucacuaagaacuuaaauagccugucggaacucgaggucaaaaaccuucagaggcugucuggcgcaauggaugaauugcauaaugagauucuagaacuggacgagaagguggaugaccuccgggccgauacgaucuccucacaaauagagcuggcuguacuucugaguaacgaagguauuaucaauagcgaggacgaacacuugcucgcgcuggagcguaaauuaaagaaaaugcuggggccauccgcaguugauaucggcaacggauguuucgaaacaaagcacaagugcaaucagaccugccuagaccgcauugccgcuggcacuuuuaacgccggggaguucucucuccccaccuuugauagccugaauaucacagcagccucacuuaacgacgacggauuggauaaucauaccauucugcucuacuauaguacugcugccuccagccuggcagugacacuuaugcuggcgauauucaucgucuacauggugucuagagacaacgucucauguaguauuugcuuguga

SEQ ID NO: 154646 - RNA, 1755 nt, Artificial Sequence
  derived and/or modified CDS sequence (opt3) from hemagglutinin__InfluenzaB__AEG21019
augaaggccaucauugugcugcucauggucguuaccagcaacgcugacagaauaugcacaggcaucacuuccucuaauucaccccacgugguaaaaacggcaacccagggggaagugaacgucacaggagugauuccucuuacuaccacaccaaccaagaguuacuucgccaaucugaaagguacuaggacacggggcaaguuguguccggauugcuuaaacuguaccgaccuggauguugcgcuagggcgccccaugugcgugggaacgacuccuagcgcuaaagccuccauccuccaugaaguccgaccagugaccucuggcuguuuucccauuaugcacgaccguacaaagaucagacaacugccuaaucuucugagggguuaugagaacauacgguugucgacucagaauguaaucgaugcagaaaaggccccagggggacccuaccgccucggcaccucaggcagcugcccuaacgcuacaaguaaaauuggguucuuugcaaccauggccugggcuguuccaaaggacaauuauaaaaacgccacgaauccgcugacuguggagguccccuacaucuguacagaaggagaggaucagauuaccgugugggguuuccauuccgacaacaagacucagaugaaaaaucuguauggcgauucuaacccucaaaaguuuacaagcuccgcgaauggggugaccacgcacuacgucucacagaccggagacuucccagaucagacagaggacggcgguuuacccccuagugggagaaucguuguggauuauaugaugcagaagccaggaaaaacuggcaccauaguauaccaaaggggcgugcuccugccccagaaggucuggugcgcaagcgggcggucuaaagugauuaagggaucccuuccguugaucggugaagccgacugucugcaugagaaauacggcgggcuaaacaagucaaaaccuagcuauacaggagaacacgcuaaggccauuggcaacugccccaucuggguuaagacuccacucaaacuggcaaaugguaccaaguaccgcccuagugcuaaacuucugaaggagcgaggguuuuucggcgccaucgcgggauuuuuggagggcgggugggaaggaaugauugccgguuggcacggcuauacaucucauggggcacacggaguggcugucgccgcugaccucaaauccacccaggaggccauaaacaagaucacuaagaaucugaacagcuuaucggaacuggaggugaaaaaucuccagagacuuucuggcgcaauggaugaacugcauaacgagauuuuggagcuagacgaaaagguagaugaccugagggccgauacgaucuccucacaaauagagcucgcuguucugcuuaguaaugaagguauuaucaacagcgaggacgaacaccuguuggcgcucgagcggaaacugaagaaaauguuagggcccuccgcaguggauaucggcaauggauguuucgagacaaagcacaagugcaaccagaccugccuggaccguauugccgcuggcacuuuuaaugccggggaguucucucuaccaaccuuugauagccucaacaucacagcagccucacugaaugacgauggacuugacaaccauaccauuuugcuguacuauaguacugcugccuccagccucgcagucacacugaugcuugcgauauucaucguguacauggucucucgcgacaaugugucauguaguauuugccuguga

SEQ ID NO: 154647 - RNA, 1758 nt, Artificial Sequence
  derived and/or modified CDS sequence (opt3) from hemagglutinin__InfluenzaB__AEG21021
augaaggccaucauugugcugcucauggucguuaccagcaacgcugacagaauaugcacaggcaucacuuccucuaauucaccccacgugguaaaaacggcaacccagggggaggugaacgucacaggagugauuccucuuacuaccacaccaaccaagagucauuucgccaaucugaaagguacugaaacaaggggcaaguuguguccgaaaugcuuaaacuguaccgaucuggacguugcgcuagggcggcccaagugcacgggaaagaucccuagcgcucgcguguccauucuccacgagguccgaccagugacuucuggcuguuuucccauccugcaugaucguaccaaaauaagacaacuuccuaaucuguugagggguuacgaacacauccggcucucgacacauaacguaauuaaugccgagaacgcaccagggggacccuauaagaucggcacuucaggcagcugcccuaauauuaccaacgggaauggauucuuugccacaauggcuugggcaguuccaaagaacgacaagaauaaaaccgccacgaacccgcugaguaucgaagugcccuacauauguacugagggugaggaucagauuacagucuggggcuuccacuccgacaaugaaacccagauggcuaagcuguauggggauucuaagccucagaaauuuacuagcuccgccaacggaguggcgacacacuacgugucacaaaucggcgguuucccaaaccagaccgaggacgggggacucccccagaguggccgcauugucguugauuauauggugcagaaaagcggcaaaacggggaccaucacauaccaaagaggaaucuuacugccucagaagguauggugcgcaucugguagguccaaagugauuaagggcucacuuccauuguuuggggaagccgacugucugcaugagaaauauggaggcuucaauaagagcaagcccuacuacacuggugagcacgcuaaagccauagggaacugcccgaucugggucaagaccccucuaaaacucgcaaauggcacaaaguaucggcccccagcuaaacuguuuaaggaacgcggauucuuuggcgccauugcgggguuccuugagggagguugggaaggcaugaucgccggguggcauggauacaccagucacggcgcacacgguguggcuguugccgcugaucugaagucuacucaggaggccauaaacaaaauuacaaagaauuugaacucccucagcgaacuggaggugaaaaauuuacagcgacugucgggggcaauggacgagcuccauaacgaaauccuugagcuggaugaaaaggucgacgacuugagagccgauaccaucucuucccaaauugagcuagcugugcugcucucaaaugaaggcaucauuaacagugaggacgagcaucugcuugcgcuggaaaggaaauugaagaagaugcucggaccuagcgcaguagagauaggcaauggguguuuugaaacuaaacacaagugcaaccagacgugccuggaucggaucgccgcuggaacauucgacgccggugaguucuccuuacccaccuuugauucucugaauauuacugcagccagccuaaacgacgauggccucgacaaucacaccauccugcuuuauuacucaacagcugccaguuccuuggcaguuacccugaugaucgcgauuuucguggucuauauggugagccgugauaacgucucuuguucaauaugccucuga

SEQ ID NO: 154648 - RNA, 1758 nt, Artificial Sequence
  derived and/or modified CDS sequence (opt3) from hemagglutinin__InfluenzaB__AEG21022
augaaggccaucauugugcugcucauggucguuaccagcaacgcugacagaauaugcacaggcaucacuuccucuaauucaccccacgugguaaaaacggcaacccagggggaggugaacgucacaggagugauuccucuuacuaccacaccaaccaagagucauuucgccaaucugaaagguacugaaacaaggggcaaguuguguccgaaaugcuuaaacuguaccgaucuggacguugcgcuagggcggcccaagugcacgggaacuaccccuagcgcucgcgccuccauccuccacgaggugcgaccagucacaucuggcuguuuucccauucugcaugaucguacuaagaucagacaacuuccuaaucuguugagggguuacgaacacauacggcucucgacccauaacgugaucaaugcagagaacgccccagggggacccuauaaaauuggcacaucaggcagcugcccuaauaucaccaacgggaauggauucuuugcuacgauggcaugggccguaccaaagaacgacaaaaauaagacugcuacaaacccgcugaguguugaagugcccuacauuuguaccgagggugaggaucagaucacugucuggggcuuccacuccgacaaugaaacacagauggccaaacuguauggggauucuaagccucagaaguuuaccagcuccgcgaacggaguggcaacgcacuacgugucacaaauaggcgguuucccaaaccagaccgaggacgggggacucccccagaguggccgcauugucguugauuauauggugcagaaaagcggcaagacagggacuaucaccuaccaaagaggaauuuuacugccucagagggguuggugcgccucuggccgguccaaaguaaucaaggggucacuuccauuguuuggagaagcugacugucugcaugagaaauauggcggucuaaauaagagcaaacccuacuacacaggggagcacgccaaggcaaucggcaacugcccgauuugggugaagacuccucucaaacuggcuaauggaaccaaguaucgacccccagccaaacuuuucaaggaacgcggcuuuuucggggcgauagccggauuucuggaggguggcugggaagggaugaucgcaggauggcauggcuacacaagucacggugcucacggggucccuguggccgcugauuugaaaucuacccaggaggccauuaacaagaucacuaagaaucucaacucccugagcgaauuagagguuaaaaaucugcagagacucucgggcgcaauggacgagcuucauaacgaaauacuggaguuggaugaaaagguggacgaccuaagggccgauacgauuucuucccaaaucgagcuggcuguccuccugucaaaugaaggaaucauuaacagugaggacgagcaccuucuggcguuggaacggaaacucaagaaaaugcugggccccagcgcaguggagaucgggaauggauguuucgaaacaaagcauaagugcaaccagaccugcuuagaucguauugccgcugguacuuuugacgccggcgaguucucccugccaaccuucgauucucuaaauauaacagcagccagccucaacgacgaugggcuggacaaucacaccauccuuuuguauuacucaacugcugccaguucccuggcaguaacacucaugauugcgaucuuuguuguguauauggucagccgcgauaacgugucuuguucaaucugccuguga

SEQ ID NO: 154649 - RNA, 1755 nt, Artificial Sequence
  derived and/or modified CDS sequence (opt3) from hemagglutinin__InfluenzaB__AEG21023
augaaggccaucauugugcugcucauggucguuaccagcaacgcugacagaauaugcacaggcaucacuuccucuaauucaccccacgugguaaaaacggcaacccuuggggaagugaacgaaacaggagucauuccucugacuaccacaccaaccaagaguuacuucgccaauuugaaagguacuaggacacggggcaaguuauguccggauugccugaacuguaccgaccuagauguggcgcucgggcgccccaugugcguuggaacgacuccuagcgcuaaagccuccauccugcaugaggugcgaccagucaccucuggcuguuuucccauuaugcacgaccguacaaagaucagacagcuuccuaaucuguugagggguuaugaaaacauacggcucucgacucaaaaugugaucgaugcagagaaggccccagggggacccuaccgccugggcaccucaggcagcugcccuaacgcuacaaguaaaauuggguucuuugcaaccauggccugggcuguaccaaaggacaauuauaaaaacgccacgaauccgcugacuguugaagugcccuacaucuguacagagggagaggaucagauuaccgucugggguuuccauuccgacaacaagacucagaugaaaaaucucuauggcgauucuaacccucagaaguuuacaagcuccgcgaauggggugccaacccacuacgugucacaaaucggagacuuccccgauccuacggaagacggcgguuuaccacagagugggagaauaggagucgauuauaugaugcagaagcccggcaaaaccggcacaauuguuuaccagcgcggggugcugcuuccgcaaaagguauggugcgcaagcggacggucuaaagugaucaaggguuccuugccucugauuggcgaggccgacugucuacaugaaaaauacgggggacucaacaagucaaaacccuauuacacuggcgagcacgcuaaggccaucgguaacugcccaaucugggucaagaccccucugaaacuugcaaaugggacaaaguauaggcccccagcuaaacuguugaaggagcgaggcuuuuucggagccauuagcggcuuucucgaagggggaugggaggguaugauagcgggcuggcacggguacaccagucauggagcccacggcguggcaguugcugccgaccugaaaucuacucaggaagcuaucaacaagauuacaaagaauuuaaacucccugagcgagcucgaagugaaaaaucuucagagacugucgggugccauggaugaguugcauaacgagauccuagaacuggacgagaaggucgaugaccucagggcagauaccauaucuucccagauugaacuggccgugcuucugucaaaugaggggaucaucaacagugaagacgagcacuugcucgcucuggagcggaaauuaaagaaaaugcugggccccagcgcgguagaaauuggaaauggcuguuucgagacuaagcacaagugcaaccaaacgugcuccgaucguaucgcagccgggacauuugacgcuggagaguucucucuaccuaccuuugauagccucaauauuacugccgcaucacugaacgacgauggucuugacaaucauaccauauugcuguauuacaguacagccgcuuccagccucgccguuacccugaugaucgcaauuuucguggucuauauggugucucgcgacaacgucucauguaguaucugccuuuga

SEQ ID NO: 154650 - RNA, 1758 nt, Artificial Sequence
  derived and/or modified CDS sequence (opt3) from hemagglutinin__InfluenzaB__AEG21024
augaaggccaucauugugcugcucauggucguuaccagcaacgcugacagaauaugcacaggcaucacuuccucuucaaguccccacgugguaaaaacggcaacccagggggaggugaaugucacaggagugauuccucuuacuaccacaccaaccaagagcuacuucgccaaccugaaagguacugaaacaaggggcaaguuguguccggauugccccaauuguaccgacuuagauguugcgcuggggcggccuaacugcuggggaaauaucccauccgcucgcgugucuauucuacaugagguccgacccgugacgucgggcuguuuuccuaucaugcacgaccguacuaaaauaagacaacucccaaaccugcuuagggguuaugaacauauccggcugucaacccacaauguaauuaacgccgagaaugcacccgggggaccuuacaagaucggcacaagcggcaguugcccaaacguuacuaaugggaacggauucuuugccaccauggcuugggcagugccgaaggaugacaaaaauaacgccgcuacacauuugcucaccauugaaguccccuucuuuuguacggguggcgagcaccacaucgccguguggggguucccuuccgauaaugacacucugauggcgaagcuguuuggagauucuaacccacagauguucagcuccucagcaaacggcacaaccacucauuaugugagucagauagguggguuucccaaucagacagaggacggaggccucccucaaagcggccgcauugucguugauuacauggugcagaaaucugggaagaccggaacgaucgccuaucagagagguguauuacugccacagaaaguguggugcgcuuccggcaggucaaaggucauuaaggggagccuucccuugaucggagaagccgacugucugcacgagaaauacggcggucuaaacaagaguaaaccguauuacaccggggaacaugcaaaggcuaucggcaauugcccuauuugggugaaaacaccccucaagcuggccaacggaacuaaauaccggccuccagcgaaacuucugaaggagcgcggcuucuuuggggccauagcaggauucuuggaggguggcugggaagggaugaucgcuggauggcacggcuauaccucucacggugcccaugggguugcuguggccgcagaucucaaguccacacaagaggccauuaauaagaucacuaaaaaccugaauagcuuaucggaacuggaggucaagaaccuccagcgacuuucuggcgcuauggacgaacugcacaaugagauauuggagcuagacgaaaaaguggaugaccugagagcggauaccauuuccucacagaucgagcucgcaguacugcuuaguaacgaaggaaucauuaauagcgaggacgaacaucuguuggcccucgagaggaagcugaagaaaauguuaggccccuccgcuguugagaucgggaacggauguuuugaaacaaagcacaaaugcaaucagaccugccuggaucggauugccgcagguacuuucgacgccggcgaguucucucuaccaacguuugauagccucaacauaacagcugccucacugaaugacgaugggcuugacaaccauaccaucuugcuguacuauaguacugcagcguccagccucgcugugacccugaugauugccaucuucgucguguacauggucucucgugauaacgugucauguaguaucugccuuuga

SEQ ID NO: 154651 - RNA, 1755 nt, Artificial Sequence
  derived and/or modified CDS sequence (opt3) from hemagglutinin__InfluenzaB__AEG21025
augaaggccaucauugugcugcucauggucguuaccagcaacgcugacagaauaugcacaggcaucacuuccucuaauucaccccacgugguaaaaacggcaacccuuggggaagugaacgaaacaggagucauuccucugacuaccacaccaaccaagaguuacuucgccaauuugaaagguacuaggacacggggcaaguuauguccggauugccugaacuguaccgaccuagauguggcgcucgggcgccccaugugcguuggaacgacuccuagcgcuaaagccuccauccugcaugaggugcgaccagucaccucuggcuguuuucccauuaugcacgaccguacaaagaucagacagcuuccuaaucuguugagggguuaugaaaacauacggcucucgacucaaaaugugaucgaugcagagaaggccccagggggacccuaccgccugggcaccucaggcagcugcccuaacgcuacaaguaaaauuggguucuuugcaaccauggccugggcuguaccaaaggacaauuauaaaaacgccacgaauccgcugacuguugaagugcccuacaucuguacagagggagaggaucagauuaccgucugggguuuccauuccgacaucaagacucagaugaaaaaccucuauggcgauucuaauccucagaaguuuacaagcuccgcgaacggggugccaacccacuacgugucacaaauaggagacuuccccgauccuacggaagacggcgguuuaccacagagugggagaauuggagucgauuauaugaugcagaagcccggcaaaaccggcacaaucguuuaccagcgcggggugcugcuuccgcaaaagguauggugcgcaagcggacggucuaaagugauuaaggguuccuugccucugaucggcgaggccgacugucuacaugaaaaauacgggggacucaauaagucaaaacccuauuacacuggcgagcacgcuaaggccaucgguaacugcccaauuugggucaagaccccucugaaacuugcaaacgggacaaaguauaggcccccagcuaaacuguugaaggagcgaggcuuuuucggagccauaagcggcuuucucgaagggggaugggaggguaugaucgcgggcuggcacggguacaccagucauggagcccacggcguggcaguugcugccgaccugaaaucuacucaggaagcuauuaauaagaucacaaagaacuuaaauucccugagcgagcucgaagugaaaaaccuucagagacugucgggugccauggaugaguugcauaaugagauacuagaacuggacgagaaggucgaugaccucagggcagauaccauuucuucccagaucgaacuggccgugcuucugucaaacgaggggaucauuaauagugaagacgagcacuugcucgcucuggagcggaaauuaaagaaaaugcugggccccagcgcgguagaaaucggaaacggcuguuucgagacuaagcacaagugcaaucaaacgugcuccgaucguauugcagccgggacauuugacgcuggagaguucucucuaccuaccuuugauagccucaacauaacugccgcaucacugaaugacgauggucuugacaaccauaccaucuugcuguauuacaguacagccgcuuccagccucgccguuacccugaugauugcaaucuucguggucuauauggugucucgcgacaaugucucauguaguaucugccuuuga

SEQ ID NO: 154652 - RNA, 1758 nt, Artificial Sequence
  derived and/or modified CDS sequence (opt3) from hemagglutinin__InfluenzaB__AEG21026
augaaggccaugauggugcugcucauggucguuaccagcaacgcugacagaaucugcacaggcauuacuuccucuaauucaccccacgugguaaaaacggcaacccagggggaggugaacgucacaggagugauaccucuuacuaucaccccaacaaagagucauuucgccaaucugaaaguuaaggaaaccagggguaaauuguguccgaagugccccaacuguacugauuuagacguggcgcugggccggccuaagugcacagggaaaauuccaagcgcucgcgucuccauccuacacgaggauacccccgugacgucuggauguauuccuaucaugcaugaccgaacuaagauacgucaacucccaaaucugcuuagaggcuacgaacacaucaggcugucgacccauaacguaauuaaugccgagucagcacccggugggccuuauaaaaucggaacaagcggcaguugcccaaacguuacuaauggcauuggguuuuucgccaccauggcuugggcagugccgaagaacgauaaaaauaagacagccaccaaccccuugacgaucgaagucccuuacauauguacugagggagaggaccagauuacagugugggguuuucacuucgauaaugaaacccagauggcuaagcucuauggcgacuccaaaccacagguguuuacuucuagcgccaacggggucaaugcggauuucguuucccaaauccggggauuucccaaccagacagaggacggcggucugccucagucagggcgcauugugguagauuacauggugcagaagaguggaaaaaccggcacgaucaccuaucaaagaggcauccugcucccacagaaggucuggugcgcaagcgggaggucuaaagugauuaaggaauccuuaccccugauaggagaggccuacuuccagcaggaggaauaugguggccuuaacaaaucaaagagcuacuacacagaggaacacgcuaaggccaucgggauuuguccgaucuggguuaaaacuccuuugaagcuggcaaauaaaaccaaguaucggcccccagcucaucuaaguuacuuuugcggauucuuuggcgccauagcggguuuccucgaagggggcugggagggaaugauugccggcuggaacggguauacaucucacggagcacaugguguggcugucguggccgaccugaaauccacucaagaggcuaucaauaagaucaccaagaaccuuaauagccugucggaguuggaaguagagacacuccagcgccugucuggcgccauggaugaauuacacaacgagauucuggaacucgacgagaaaguugacgaucaccgagcagacaccaucuccucacagauugagcuuccugaucaacugaguaaugacgggagcauaaacuccgaagaugagcauuugcuagcccuggaaagaaagcucaaaaagaugcugggacccucuaauggcgacaaagguagcgggggcaucgagacuaagcacaaguguaaccagacgugccuugauaggauugcugcgggaacauuugacgcaggcggguucucacauccaaccuucgauaguaaaaaugugacugccgcuucccugaacgacgauggauuggacagcgguaccauccuccuguacuauucuacagacgucucaaauuuagccgugaccgucaugaugggcaucuuugugaaguacaugguuagucgggauaacgugagcugcuccauuugucuguga

SEQ ID NO: 154653 - RNA, 1758 nt, Artificial Sequence
  derived and/or modified CDS sequence (opt3) from hemagglutinin__InfluenzaB__AEG21027
augaaggccaucauugugcugcucauggucguuaccagcaacgcugacagaauaugcacaggcaucacuuccucuaauucaccccacgugguaaaaacggcaacccagggggaagugaacgucacaggagugauuccucuuacuaucaccccaacaaagagucauuucgccaaucugaaagguaccgaaacuaggggcaaguuguguccgaaaugccccaacuguacagauuuagacguugcgcuggggcggccuaagugcaccggaaagauuccaagcgcucgcguguccauccuacacgagguccgacccgugacgucuggcuguuuuccuauaaugcaugaucguacuaaaaucagacaacucccaaaucugcuuagggguuacgaacacauucggcugucgacccauaacguaaucaaugccgagaacgcacccgggggaccuuauaagauuggcacaucaggcagcugcccaaauguuacuaacgggaucggauucuuugccaccauggcuugggcagugccgaaaaaugacaagaacaaaacagccaccaaucccuugacgauagaagucccuuacauuuguacugagggugaggaucagaucacaguguggggcuuccacuuugacaacgaaacccagauggcuaagcucuauggggauaguaagccacagaaauucacuuccucugccaauggagugaacgcggacuuugucagccaaauuggcgguuuccccaaccagacagaggaugggggacugccucaguccggccgcaucguuguggacuacaugguacagaagucaggcaaaaccgggacgaucaccuaucaaagagguauucugcucccacagaagguguggugcgcaaguggaaggagcaaagucauaaaggaaucuuuaccccugaucggcgaggccuacuuucagcaggaggaauaugggggacuuaauaaauccaagucauacuacacaggcgagcacgcuaaggccauugguaacuguccgaucugggugaaaacuccuuugaagcuggcaaaugggaccaaauaucggcccccagcucaucuaagcuacuucugcggcuuuuucggagccauagcgggcuuucucgaagggggaugggaggguaugauugccggcuggaacggguauacaagucacggagcacauggcguugcuguggucgccgaucugaagucuacucaagaagcuaucaauaaaaucaccaagaaccuuaauucccugagcgaguuggagguggaaacacuccagcgccugucgggugccauggacgaguuacacaacgaaauucuggagaucgaugaaaagguagacgaccaccgagcagauaccauuucuucccagauagagcucgccguucuucugucaaaugaggggaucauuaacagugaagacgagcauuugcuagcucuggaaagaaaacucaagaaaaugcugggcccuagcaauggagauaagggcuccgggggaaucgagacuaaacacaaguguaaccaaacgugccuugacaggaucgcggcagguacauucgaugccggcgaguucucucugcccaccuuugacagcuugaauauuacugcugccucacucaacgaugacgggcuggauaguggaaccauauuacuguacuauuccacagacgugagcaaucuagcagucaccgugaugaugggcaucuucgucaaguacauggugucucgggauaacguuucaugcaguauuugucucuga

SEQ ID NO: 154654 - RNA, 1758 nt, Artificial Sequence
  derived and/or modified CDS sequence (opt3) from hemagglutinin__InfluenzaB__AEG21028
augaaggccaucauugugcugcucauggucguuaccagcaacgcugacagaauaugcacaggcaucacugcaucccagucucccaauauugauaaaucaaguacgcaaggggaggugaacguaagcugugugaucccucuuaccacaacuccaaccaagucccacuucgccaaucugaaagucaaggaaacaaggggaaaauugugcccgaagugucccaacugcaccgacuuagaugugucucugggucggccuaaguguacuggcaaaauuccaucggcgcgcguuucaauccuacaugaggugcgacccgucgcuagcgggggauuuccuauaaugcacgaccguacaaagaucagacagcucccaaaucugcuuaggggcuacgaacauauucggcugaguacccacaacgugaucaaugccgagaacgcacccggugggccuuauaaaauuggaacguccggcucuugcccaaauguaacuaacggcaucggguucuuugccaccauggcuugggcaguuccgaagaaugauaaaaacaagacagccacuaaucccuugaccauagaagugccuuacauuuguacagagggagaggaccagaucaccgucugggguuuccauagcgauaacgaaacgcagauggcuaagcucuauggcgacuccaaaccacaaaaguuuacuucaagugccaauggggugacaacccacuacgcggcaaaacgccccugcuucccuaaccagacugaggauggaggccugccacagagcgguagaauuguggucgacuauaugguucagaagucugggaaaacaggaaccaucacguaccaaaggggcauccugcucccccagaagguguggugugccuccggccggucaaaaguaauuaaggggagcuuaccgcugauaggagaagcugauugccuucacgagaaguaugguggcuugaacaaaaguaagucuuacuacaccggggagcaugccaaagcaaucggaaauuguccuauuugggugaagacaccccugaaacuagcuucccgcacuaugagcaagaccccagcccaccucucguauuuuugcggcuucuuuggugcgaucgccggguuccuggaaggcggaugggagggcaugauagcaggguggaacggauacacaucucauggugcucacggcgucgccgugguugcugaccuuaaguccacucaggaagccauuaauaaaaucaccaagaaccugaacucauugagugagcucgaagugaaaaaucugcagcgauuaagcggggcaauggaugagcugcacaaugagauccucgaacuugacgagaaggucgacgaucugagagccgacacaauuuccucucaaaucgaauuggcugugcuacugagcaacgagggaauuauaaauucagaagaugagcaucuccuggcgcuugagaggaaacugaagaagauguugggcccuagugcaguagaaaucgguaacgggugcuuugagaccaaacacaaguguaaucagacuugccucgaccggauugccgcuggcacguucgaugccggagaauuuucccugcccacauucgacagcuuaaacaucaccgcagccucucugaaugaugacggccuagauaaccauacuauccuccuguauuacucaaccgcugccaguagccuugcaguuacauugaugauugcgauauucguggucuauauggugucccgugacaaugucucuuguucgaucugccuguga

SEQ ID NO: 154655 - RNA, 1758 nt, Artificial Sequence
  derived and/or modified CDS sequence (opt3) from hemagglutinin__InfluenzaB__AEG21029
augaaggccaucauugugcugcucauggucguuaccagcaacgcugacagaauaugcacaggcaucacuuccucuaauucaccccacgugguaaaaacggcaacccagggggaggugaacgucacaggagugauuccucuuacuaccacaccaaccaagagucauuucgccaaucugaaagguacugaaacaaggggcaaguuguguccgaaaugccccaacuguaccgauuuagacguugcgcuggggcggccuaagugcacgggaaagaucccaagcgcucgcguguccauucuacacgagguccgacccgugacuucuggcuguuuuccuaucaugcaugaucguaccaaaauaagacaacucccaaaucugcuuagggguuacgaacacauccggcugucgacacauaacguaauuaaugccgagaacgcacccgggggaccuuauaagaucggcacuucaggcagcugcccaaauguuaccaacgggauuggauucuuugccacaauggcuugggcagugccgaaaaaugacaagaacaaaaccgccacgaaucccuugacuaucgaagucccuuacauauguacagagggugaggaucagauuaccguguggggcuuccacagugacuccgaaacucagauggcuaagcucuauggggauucuaagccacagaaauuuacaagcuccgccaacggagugaccacgcacuacgucucacaaaucggcgguuuccccaaucagaccgaggacgggggacugccucagaguggccgcauuguuguggauuauaugguacaaaagagcggcaaaacagggacuaucaccuaccagagaggaauccugcucccacagaagguguggugcgcgucugguagguccaaagucauuaagggcucauuaccccugauaggggaagcagacugucuucaugagaaauauggaggcuugaacaagagcaagccguacuacacaggugagcacgccaaagcuaucgggaacugcccuauuugggugaagacuccccugaaacuagccaauggcaccaaguaucggccuccagcaaaacuccugaaggaacgcggauuuuucggcgcuaucgccggguuucuugagggagguugggaaggcaugauagcgggguggcauggauacacaagucacggcgcccacgguguugcaguggcugccgaucugaagucuacccaggaggcuauuaacaaaaucacuaagaauuugaacucccucagcgaacuggaggucaaaaauuuacagcgacugucgggggccauggacgagcuccauaacgaaauccuugagcuggaugaaaagguggacgacuugagagcagauacgauuucuucccaaaucgagcuagccguacugcucucaaaugaaggcauuauaaacagugaggacgagcaucugcuugcucuggaaaggaaauugaagaagaugcucggacccagcgcgguugagaucggcaauggguguuucgaaacaaaacacaagugcaaccagaccugccuggaucggauugcagccggaacuuuugacgcuggugaguucuccuuaccaaccuuugauucucugaauaucacagccgcaagccuaaacgacgauggccucgacaaucacaccauccugcuuuauuacucaacugccgcuaguuccuuggccgugacacugaugauugcaauauucgucguguauauggucagccgugauaacgugucuuguucaaucugccucuga

SEQ ID NO: 154656 - RNA, 1758 nt, Artificial Sequence
  derived and/or modified CDS sequence (opt3) from hemagglutinin__InfluenzaB__AEO80052
augaaggccaucauugugcugcucauggucguuaccagcaacgcugacagaauaugcacaggcaucacuuccucuaauucaccccacgugguaaaaacggcaacccagggggaggugaacgucacaggagugauuccucuuacuaccacaccaaccaagagucauuucgccaaucugaaagguacugaaacaaggggcaaguuguguccgaaaugccccaacuguaccgauuuagacguugcgcuggggcggccuaagugcacgggaaagaucccaagcgcucgcguguccauucuacacgagguccgacccgugacuucuggcuguuuuccuaucaugcaugaucguaccaaaauaagacaacucccaaaucugcuuagggguuacgaacacauccggcugucgacacauaacguaauuaaugccgagaacgcacccgggggaccuuauaagaucggcacuucaggcagcugcccaaauguuaccaacgggaauggauucuuugccacaauggcuugggcagugccgaaaaacgacaagaauaaaaccgccacgaaccccuugacuauugaagucccuuacaucuguacagagggugaggaucagauaaccguguggggcuuccacagugacaaugaaacucagauggcuaagcucuauggggauuccaagccacagaaauuuacaucuagcgccaacggagugaccacgcacuacgucucccaaauuggcgguuuccccaaccagaccgaggacgggggacugccucagucaggccgcaucguuguggauuauaugguacagaagaguggcaaaacagggacuauuaccuaccaaagaggaauccugcucccacagaagguguggugcgcgagcgguaggucuaaagucaucaagggcuccuuaccccugauuggggaagcagacugucuucaugagaaauauggaggcuugaauaagucaaagccguacuacacaggugagcacgccaaagcuauagggaacugcccuaucugggugaagacuccccugaaacuagccaauggcaccaaguaucggccuccagcaaaacuccugaaggaacgcggauuuuucggcgcuauugccggguuucuugagggagguugggaaggcaugaucgcgggguggcauggauacacaagccacggcgcccacgguguugcaguggcugccgaucugaagaguacccaggaggcuauaaacaaaauuacuaagaauuugaacucucucuccgaacuggaggucaaaaauuuacagcgacugagcggggccauggacgagcuccauaacgaaauccuugagcuggaugaaaagguggacgacuugagagcagauacgaucucgucucaaauugagcuagccguacugcucuccaaugaaggcaucauuaacucagaggacgagcaucugcuugcucuggaaaggaaauugaagaagaugcucggacccagugcgguugagauaggcaauggguguuucgaaacaaaacacaagugcaaccagaccugccuggaucggaucgcagccggaacuuuugacgcuggugaguucagcuuaccaaccuuugauucccugaauauuacagccgcaucucuaaacgacgauggccucgacaaucacaccauccugcuuuauuacagcacugccgcuucaaguuuggccgugacacugaugaucgcaauuuucgucguguauauggucucccgugauaacgugagcuguucuauaugccucuga

SEQ ID NO: 154657 - RNA, 1758 nt, Artificial Sequence; identical to SEQ ID NO: 154562
  derived and/or modified CDS sequence (opt3) from hemagglutinin__InfluenzaB__AEO80067

SEQ ID NO: 154658 - RNA, 1755 nt, Artificial Sequence
  derived and/or modified CDS sequence (opt3) from hemagglutinin__InfluenzaB__AEO80078
augaaggagaucauugugcugcucauggucguuaccagcaacgccgacagaauaugcacaggcaucacuuccucuaauucaccccacgugguaaaaacggcuacccagggggaagugaacgucacaggagugauuccucuuacuaccacaccaaccaagaguuacuucgcaaaucugaaagguacuaggacacggggcaaguuguguccggauugcuuaaacuguaccgaccuggauguugcccuagggcgccccaugugcgugggaacgacuccuagcgcgaaggcuuccauccuccaugagguccgaccagugaccucuggcuguuuucccauuaugcacgaccguacaaaaaucagacaacuggccaaucuucugagggguuaugaaaacauacgguugucgacucagaauguaaucgaugcagagaaggccccugggggaccauaccgccucggcaccucaggcagcugccccaacgcuacaaguaaauccggguucuuugcaaccauggccugggcuguuccuaaggacaauaacaaaaaugccacgaacccacugacuguggaagucccguauauuuguacagagggagaggaucagaucaccgugugggguuuccauucugacaauaagacucagaugaaaaaccuguacggcgauagcaauccccaaaaguuuacauccucagcgaacggggugaccacgcacuaugucagucagauuggaggcuucccugaccagaccgaagauggugggcucccacagagcggaagaaucguuguggacuacaugaugcaaaagcccggcaaaacaggcacuauaguauaucagcgcgggguguuacugccucagaaggucuggugcgcaucuggacgguccaaagugauuaaggguucacuuccauugaucggcgaggccgauugucugcaugaaaaauacgggggacuaaacaagagcaaacccuacuauaccggcgagcacgcuaaggccauugguaauugcccgaucuggguuaagacaccucucaaacuggcaaacgggacuaaguacaggcccccagcuaaacuucugaaggagcgaggcuuuuucggagccaucgcgggcuuuuuggaagggggaugggaggguaugauugccggcuggcacggguauaccagucauggagcacacggcguggcugucgccgcugaccucaaaucuacacaggaagccauaaauaagaucaccaagaacuuaaauucccugagcgagcuggaagugaaaaaccuccaaagacuuucgggugcaauggacgagcugcauaaugagauuuuggaacuagaugagaagguagacgaucugagggccgacacuaucucuucccagauagaacucgcuguucugcuuucaaacgaggggauuaucaauagugaagaugagcaccuguuggcgcucgagcggaaacugaagaaaauguuaggcccuagcgcaguggacaucggaaacggcuguuucgaaacgaagcacaagugcaaucagacaugccuggaucguauugccgcugggaccuuuaacgccggagaguucucccuacccacuuuugacucucucaauaucaccgcagccagccugaacgaugacggucuugauaaucauacaauuuugcuguacuauucaaccgcugccaguucccucgcagucacucugaugcuugcgauauucaucguguacauggucagccgcgacaacgugucuuguucaauuugccuguga

SEQ ID NO: 154659 - RNA, 1758 nt, Artificial Sequence
  derived and/or modified CDS sequence (opt3) from hemagglutinin__InfluenzaB__AEO80086
augaaggccaucauugugcugcucauggucguuaccagcaacgcugacagaauaugcacaggcaucacuuccucuaauucaccccacgugguaaaaacggcaacccagggggaagugaacgucacaggagugauuccucuuacuaccacaccaaccaagagucauuucgccaaucugaaagguacuaagacaaggggcaaauuguguccgaagugcuuaaacuguaccgaucuggacguugcgcuagggcggcccaagugcacgggaaauaucccuagcgcuaaaguguccauucuccacgaaguccgcccagugacuucuggcuguuuucccaucaugcaugaucgaaccaagauacgucaacugccuaaccuucugagagguuacgagcacaucagguugucgacacauaauguaauuaacgccgaaaaagcaccagggggacccuauaagaucggcacuucaggcagcugcccuaauguuaccaacgggaauggauucuuugccacaauggcuugggcagugccgaaaaacgacaauaacaagaccgccacgaauagucucacuauugaggucccauacaucuguacagaaggugaggaucagauaaccauuuggggcuuccacuccgacaacgagacucagauggcuaagcuguauggggauucuaaaccccagaaguuuacaagcuccgccaacggagugaccacgcacuacgugucacaaaucggcgguuucccuaaucagaccgaagacgggggacugccacagaguggccggauugucguugauuauauggugcagaaaagcggcaagacagggacuaucaccuaccaacgcggaauccucuuaccccagaaaguauggugcgcgucugguagauccaaggugauuaaaggcucacugccucuuauaggggaggcagacuguuugcaugaaaaguauggaggccugaacaagagcaaaccauacuacacaggugagcacgccaaggcuaucgggaauugccccauuugggucaaaacuccgcuaaagcucgccaacggcaccaaauauaggccucccgcaaagcugcuuaaggagcggggauuuuucggcgcuaucgccggguuucuggaaggagguugggagggcaugauagcgggguggcauggauacacaagucacggcgcccacgguguggcaguugcugccgauuugaaaucuacccaggaagcuauuaauaagaucacuaaaaaccucaauucccugagcgaguuagaagugaagaaccugcagcgccucucgggggccauggacgagcuucauaaugagauccuggaauuggaugagaaagucgacgaccuacgagcagauacgauuucuucccaaaucgaacuggccgugcuccugucaaacgagggcauuauaaauagugaagacgagcaccuucuggcuuuggagagaaagcucaagaaaaugcugggaccaagcgcgguagaaaucggcaacggguguuucgagacaaagcauaaaugcaaucagaccugcuuagauaggauugcagccggaacuuuugacgcuggugaguucucccugccuaccuuugauucucuaaacaucacagccgcaagccucaaugacgauggccuggacaaccacaccauccuuuuguauuacucaacugccgcuaguucccuggccguuacacucaugauugcaauauucguggucuauauggugagccgggauaacgucucuuguucaaucugccuguga

SEQ ID NO: 154660 - RNA, 1755 nt, Artificial Sequence
  derived and/or modified CDS sequence (opt3) from hemagglutinin__InfluenzaB__AEO80097
augaaggccaucauugugcugcucauggucguuaccagcaacgcugacagaauaugcacaggcaucacuuccucuaauucaccccacgugguaaaaacggcaacccagggggaggugaacgucacaggagugauuccucuuacuaccacaccaaccaagagucauuucgccaaucugaaagguacuaggacacggggcaaguuguguccggauugcuuaaacuguaccgaccuggauguugcgcuagggcgccccaugugcgugggaacgacuccuagcgcuaaagccuccauccuccacgaaguccgaccagugaccucuggcuguuuucccauuaugcaugaccguacaaagaucagacaacuggcaaaucuucugagggguuacgagaacauacgguugucgacucagaauguaaucgaugccgaaaaggcuccugggggaccauaucgccucggcaccucaggcagcugccccaacgcaacaaguaaauccggguucuuugccaccauggcuugggccguuccuaaggacaauaacaaaaaugcgacgaacccacugacuguggaggucccguacauuuguacagaaggagaggaucagaucaccgugugggguuuccacucugacaauaagacucagaugaaaaaccuguauggcgauagcaauccccaaaaguuuacauccucagcaaacggggugaccacgcauuacgucagucagauuggaggcuucccugaccagaccgaggauggugggcucccacagagcggaagaaucguuguggacuauaugaugcaaaagcccggcaaaacaggcacuauaguauaccagcgcgggguguuacugccucagaaggucuggugcgccucuggacgguccaaagugauuaaggguucacuuccauugaucggcgaagcugauugucugcacgagaaauaugggggacuaaacaagagcaaacccuacuacaccggcgaacacgccaaggcaauugguaauugcccgaucuggguuaagacaccucucaaacuggcuaacgggacuaaguauaggcccccagccaaacuucugaaggagcgaggcuuuuucggagcgaucgccggcuuuuuggaagggggaugggaagguaugauugcaggcuggcauggguacaccagucacggagcucauggcguggccgucgcugccgaccucaaaucuacacaggaggcaauaaauaagaucaccaagaacuuaaauucccugagcgaacuggaggugaaaaaccuccaaagacuuucgggugccauggacgaacugcacaaugagauuuuggagcuagaugaaaagguagacgaucugagggcugacacuaucucuucccagauagagcucgcgguucugcuuucaaacgaagggauuaucaauagugaggaugaacaccuguuggcacucgagcggaaacugaagaaaauguuaggcccuagcgccguggacaucggaaacggcuguuucgagacgaagcauaagugcaaucagacaugccuggaucguauugcugccgggaccuuuaacgcaggagaguucucccuacccacuuuugacucucucaauaucaccgccgcuagccugaacgaugacggucuugauaaucacacaauuuugcuguauuacucaaccgccgcaaguucccucgcggucacucugaugcuugcuauauucaucguguauauggucagccgcgacaacgugucuuguucaauuugccuguga

SEQ ID NO: 154661 - RNA, 1755 nt, Artificial Sequence; identical to SEQ ID NO: 154474
  derived and/or modified CDS sequence (opt3) from hemagglutinin__InfluenzaB__AEO80108

SEQ ID NO: 154662 - RNA, 1758 nt, Artificial Sequence; identical to SEQ ID NO: 154562
  derived and/or modified CDS sequence (opt3) from hemagglutinin__InfluenzaB__AEO80145

SEQ ID NO: 154663 - RNA, 1758 nt, Artificial Sequence; identical to SEQ ID NO: 154621
  derived and/or modified CDS sequence (opt3) from hemagglutinin__InfluenzaB__AEO80154

SEQ ID NO: 154664 - RNA, 1758 nt, Artificial Sequence
  derived and/or modified CDS sequence (opt3) from hemagglutinin__InfluenzaB__AEO80183
augaaggccaucauugugcugcucauggucguuaccagcaacgcugacagaauaugcacaggcaucacuuccucuaauucaccccacgugguaaaaacggcaacccagggggaggugaacgucacaggagugauuccucuuacuaccacaccaaccaagagucauuucgccaaucugaaagguacugaaacaaggggcaaguuguguccgaaaugcuuaaacuguaccgaucuggacguugcgcuagggcggcccaagugcacgggaaauaucccuagcgcucgcguguccauucuccacgagguccgaccagugacuucuggcuguuuucccaucaugcaugaucguaccaagauaagacaacugccuaaccuucugagggguuacgaacacauccgguugucgacacauaauguaauuaacgccgagaaugcaccagggggacccuauaaaaucggcacuucaggcagcugcccuaacguuaccaaugggaacggauucuuugccacaauggcuugggcagugccaaagaaugacaacaauaaaaccgccacgaacagucucacuauugaagucccguacaucuguacagagggugaggaucagauaaccguguggggcuuccacuccgacauugaaacucagauggcuaagcuguauggggauucuaaaccccagaaguuuacaagcuccgccaacggagugaccacgcacuacgucucacaaaucggcgguuucccuaaucagaccgaggacgggggacugccacagaguggccgcauuguuguggauuauaugguacaaaagagcggcaaaacagggacuaucaccuaccagagaggaauccucuuaccccagaagguguggugcgcgucugguagguccaaagucauuaagggcucacugccucuuauaggggaagcagacuguuugcaugagaaauauggaggccugaacaagagcaaaccauacuacacaggugagcacgccaaggcuaucgggaauugccccauuugggugaagacuccgcuaaaacucgccaacggcaccaaguaucggccucccgcaaaacugcuuaaggaacgcggauuuuucggcgcuaucgccggguuucuggagggagguugggaaggcaugauagcgggguggcauggauacacaagucacggcgcccacgguguugcaguggcugccgauuugaaaucuacccaggaggcuauuaauaagaucacuaagaaccucaauucccugagcgaauuagaggucaaaaaccugcagcgacucucgggggccauggacgagcuucauaaugaaauccuggaguuggaugaaaagguggacgaccuaagagcagauacgauuucuucccaaaucgagcuggccguacuccugucaaacgaaggcauuauaaauagugaggacgagcaccuucuggcuuuggaaaggaaacucaagaaaaugcugggaccaagcgcgguugagaucggcaacggguguuucgaaacaaagcauaagugcaaucagaccugcuuagaucggauugcagccggaacuuuugacgcuggugaguucucccugccuaccuuugauucucuaaacaucacagccgcaagccucaaugacgauggccuggacaaccacaccauccuuuuguauuacucaacugccgcuaguucccuggccgugacacucaugauugcaauauucgucguguauauggucagccgugauaacgugucuuguucaaucugccuguga

SEQ ID NO: 154665 - RNA, 1758 nt, Artificial Sequence
  derived and/or modified CDS sequence (opt3) from hemagglutinin__InfluenzaB__AEO80194
augaaggccaucauugugcugcucauggucguuaccagcaacgcugacagaauaugcacaggcaucacuuccucuaauucaccccacgugguaaaaacggcaacccagggggaggugaacgucacaggagugauuccucuuacuaccacaccaaccaagagucauuucgccaaucugaaagguacugaaacaaggggcaaguuguguccgaaaugcuuaaacuguaccgaucuggacguugcgcuagggcggcccaagugcacgggaaauaucccuagcgcucgcguguccauucuccacgagguccgaccagugacuucuggcuguuuucccaucaugcaugaucguaccaagauaagacaacugccuaaccuucugagggguuacgaacacauccgguugucgacacauaauguaauuaacgccgagaaugcaccagggggacccuauaaaaucggcacuucaggcagcugcccuaacguuaccaaugggaacggauucuuugccacaauggcuugggcagugccaaagaaugacaacaauaaaaccgccacgaacagucucacuauugaagucccguacaucuguacagagggugaggaucagauaaccguguggggcuuccacuccgacaacgaagcucagauggccaagcuguauggggauucuaaaccccagaaguuuacuagcuccgcgaauggagugacaacccacuacgucucacaaauuggcgguuucccuaaccagacggaggacgggggacugccacagaguggccgcaucguuguggauuauaugguacaaaagagcggcaaaaccgggacaauuacuuaccagagaggaauccucuuaccccagaagguguggugcgcaaggggucggucuaaagucaucaagggcucccugccucuuauuggggaagccgacuguuugcaugagaaauauggaggccugaauaagucaaaaccauacuacaccggugagcacgcuaaggccauagggaacugccccaucugggugaagacaccgcuaaaacucgcaaauggcacuaaguaucgcccucccgcuaaacugcuuaaggaacgaggauuuuucggcgccauugcgggguuucuggagggagguugggaaggcaugaucgccggguggcauggauacaccagccacggcgcacacgguguugcuguggccgcugauuugaaaaguacacaggaggccauaaacaagauuaccaagaaucucaacucucuguccgaauuagaggucaaaaaucugcagagacucagcggggcaauggacgagcuucauaacgaaauccuggaguuggaugaaaagguggacgaccuaagggccgauacuaucucgucucaaauugagcuggcuguacuccuguccaaugaaggcaucauuaacucagaggacgagcaccuucuggcguuggaacggaaacucaagaaaaugcugggaccaagugcaguugagauaggcaauggguguuucgaaacgaagcauaagugcaaccagacaugcuuagaucguaucgccgcuggaaccuuugacgccggugaguucagccugccuacuuuugauucccuaaauauuaccgcagccucucucaacgacgauggccuggacaaccacacaauccuuuuguauuacagcaccgcugccucaagucuggcagugacucucaugaucgcgauuuucgucguguauaugauaucccgcgauaaugucagcuguucuaucugccuguga

SEQ ID NO: 154666 - RNA, 1758 nt, Artificial Sequence; identical to SEQ ID NO: 154613
  derived and/or modified CDS sequence (opt3) from hemagglutinin__InfluenzaB__AEO80205

SEQ ID NO: 154667 - RNA, 1758 nt, Artificial Sequence; identical to SEQ ID NO: 154613
  derived and/or modified CDS sequence (opt3) from hemagglutinin__InfluenzaB__AEO80216

SEQ ID NO: 154668 - RNA, 1755 nt, Artificial Sequence
  derived and/or modified CDS sequence (opt3) from hemagglutinin__InfluenzaB__AEO80227
augaaggccaucauugugcugcucauggucguuaccagcaacgcugacagaauaugcacaggcaucacuuccucuaauucaccccacgugguaaaaacggcaacccagggggaggugaacgucacaggagugauuccucuuacuaccacaccaaccaagaguuacuucgccaaucugaaagguacuaggacacggggcaaguuguguccggauugcuuaaacuguaccgaccuggauguugcgcuagggcgccccaugugcgugggaacgacuccuagcgcuaaagccuccauccuccaugaaguccgaccagugaccucuggcuguuuucccauuaugcacgaccguacaaagaucagacaacuggcaaaucuucugagggguuaugagaacauacgguugucgacucagaauguaaucgaugccgaaaaggcuccugggggaccauaccgccucggcaccucaggcagcugccccaacgcaacaaguaaauccggguucuuugccaccauggcuugggccguuccuaaggacaauaacaaaaaugcgacgaacccacugacuguggaggucccguauauuuguacagaaggagaggaucagaucaccgugugggguuuccauucugacaauaagauucagaugaaaaaccuguacggcgauagcaauccccaaaaguuuacuuccucagcaaacggggugacaacccacuaugucagucagaucggaggcuucccugaccagacggaggauggugggcucccacagagcggaagaauaguuguggacuacaugaugcaaaagcccggcaaaaccggcacaauuguauaucagcgcgggguguuacugccucagaaggucuggugcgccucuggacgguccaaagugaucaaggguucacuuccauugauuggcgaagcugauugucugcaugagaaauacgggggacuaaacaagagcaaacccuacuauacuggcgaacacgccaaggcaaucgguaauugcccgaucuggguuaagaccccucucaaacuggcuaacgggacaaaguacaggcccccagccaaacuucugaaggagcgaggcuuuuucggagcgauugccggcuuuuuggaagggggaugggaagguaugauagcaggcuggcacggguauacuucccauggagcucacggcguggccgucgcugccgaccucaaaucuacccaggaggcaaucaauaagauuacaaagaaccugaauaguuuaagcgaacuggaggugaaaaaccuccaaagacuuucgggugccauggacgaacugcauaaugagaucuuggagcuagaugaaaagguagacgaucugagggcugacaccauaucuucccagauugagcucgcgguucugcuuucaaacgaagggaucaucaauagugaggaugaacaccuguuggcacucgagcggaaacugaagaaaauguuaggcccuagcgccguggacauuggaaacggcuguuucgagacuaagcacaagugcaaucagacgugccuggaucguaucgcugccgggacauuuaacgcaggagaguucucccuacccaccuuugacucucucaauauuacugccgcuagccugaacgaugacggucuugauaaucauaccauauugcuguacuauucaacagccgcaaguucccucgcggucacccugaugcuugcuaucuucauuguguacauggucagccgcgacaacgugucuuguucaaucugccuguga

SEQ ID NO: 154669 - RNA, 1758 nt, Artificial Sequence; identical to SEQ ID NO: 154630
  derived and/or modified CDS sequence (opt3) from hemagglutinin__InfluenzaB__AEO80238

SEQ ID NO: 154670 - RNA, 1758 nt, Artificial Sequence
  derived and/or modified CDS sequence (opt3) from hemagglutinin__InfluenzaB__AEP20178
augaaggccaucauugugcugcucauggucguuaccagcaacgcugacagaauaugcacaggcaucacuuccucuaauucaccccacgugguaaaaacggcaacccagggggaggugaacgucacaggagugauuccucuuacuaccacaccaaccaagagucauuucagcaaucugaaagguacugaaacaaggggcaaguuguguccgaaaugcuuaaacuguaccgaucuggacguugcccuagggcggcccaagugcacgggaaauaucccuuccgcgcgcgugucuauucuccacgagguccgaccagugacuucgggcuguuuucccaucaugcaugaucguaccaagauaagacaacugccuaaccuucugagggguuacgaacacauccgguugucaacacauaauguaauuaacgcugagaaugccccagggggacccuauaaaaucggcacuagcggcaguugcccuaacguuaccaaugggaacggauucuuugcaacaauggccugggcugugccaaagaaugacaacaauaaaaccgcaacgaacucccucacuauugaagucccguacaucuguacagagggugaggaucagauaaccguguggggcuuccacucugacaacgaaacucagauggccaagcuguauggggauagcaaaccccagaaguuuacauccucagcuaauggagugaccacgcacuacgucagucaaauuggcgguuucccuaaccagaccgaggacgggggacugccacagagcggccgcaucguuguggauuauaugguacagaagucuggcaaaacagggacuauuaccuaccaaagaggaauccucuuaccccagaagguguggugcgccuccgguaggucaaaagucaucaagggcagccugccucuuauuggggaagcggacuguuugcaugagaaauauggaggccugaauaagaguaaaccauacuacacaggugagcacgcaaaggccauagggaacugccccaucugggugaagacuccgcuaaaacucgcuaauggcaccaaguaucggccucccgccaaacugcuuaaggaacgcggauuuuucggcgcaauugcuggguuucuggagggagguugggaaggcaugaucgccggguggcauggauacacaucucacggcgcgcacgguguugccguggcagcugauuugaaauccacccaggaggccauaaacaagauuacuaagaaucucaacagccugucggaauuagaggucaaaaaucugcagcgacucucuggggcuauggacgagcuucauaacgaaauccuggaguuggaugaaaagguggacgaccuaagagccgauacgaucuccucacaaauugagcuggcaguacuccugaguaaugaaggcaucauuaacagcgaggacgagcaccuucuggccuuggaaaggaaacucaagaaaaugcugggaccauccgcuguugagauaggcaauggguguuucgaaacaaagcauaagugcaaccagaccugcuuagaucggaucgcggcaggaacuuuugacgccggugaguucucucugccuaccuuugauagccuaaauauuacagcugccucacucaacgacgauggccuggacaaccacaccauccuuuuguauuacaguacugcagccuccagccuggcugugacacucaugaucgccauuuucgucguguauauggucucucgugauaaugugucauguaguauaugccuguga

SEQ ID NO: 154671 - RNA, 1758 nt, Artificial Sequence
  derived and/or modified CDS sequence (opt3) from hemagglutinin__InfluenzaB__AEP20189
augaaggccaucauugugcugcucauggucguuaccagcaacgcugacagaauaugcacaggcaucacuuccucuaauucaccccacgugguaaaaacggcaacccagggggaggugaacgucacaggagugauuccucuuacuaccacaccaaccaagagucauuucgccaaucugaaagguacugaaacaaggggcaaguuguguccgaaaugcuuaaacuguaccgaucuggacguugcgcuagggcggcccaagugcacgggaaauaucccuagcgcucgcguguccauucuccacgagguccgaccagugacuucuggcuguuuucccaucaugcaugaucguaccaagauaagacaacugccuaaccuucugagggguuacgaacacauccgguugucgacacauaauguaauuaacgccgagaaugcaccagggggacccuauaaaaucggcacuucaggcagcugcccuaacguuaccaaugggaacggauucuuugccacaauggcuugggcagugccaaagaaugacaacaauaaaaccgccacgaacagucucacuauugaagucccguacaucuguacagagggugaggaucagauaaccguguggggcuuccacuccgacaacgaaacucagauggcuaagcuguauggggauucuaaaccccagaaguuuacaagcuccgccaauggagugaccacgcacuacgucucacaaauuggcgguuucccuaaccagaccgaggacgggggacugccacagaguggccgcaucguuguggauuauaugguacaaaagagcggcaaaacagggacuauuaccuaccagagaggaauccucuuaccccagaagguguggugcgcgucugguagguccaaagucaucaagggcucacugccucuuauuggggaagcagacuguuugcaugagaaauauggaggccugaauaagagcaaaccauacuacacaggugagcacgccaaggcuauagggaacugccccaucugggugaagacuccgcuaaaacucgccaauggcaccaaguaucggccucccgcaaaacugcuuaaggaacgcggauuuuucggcgcuauugccggguuucuggagggagguugggaaggcaugaucgcgggguggcauggauacacaagucacggcgcccacgguguugcaguggcugccgauuugaaaucuacccaggaggcuauaaacaagauuacuaagaaucucaacucccugagcgaauuagaggucaaaaaucugcagcgacucucgggggccauggacgagcuucauaacgaaauccuggaguuggaugaaaagguggacgaccuaagagcagauacgaucucuucccaaauugagcuggccguacuccugucaaaugaaggcaucauuaacagugaggacgagcaccuucuggcuuuggaaaggaaacucaagaaaaugcugggaccaagcgcgguugagauaggcaauggguguuucgaaacaaagcauaagugcaaccagaccugcuuagaucggaucgcagccggaacuuuugacgcuggugaguucucccugccuaccuuugauucucuaaauauuacagccgcaagccucaacgacgauggccuggacaaccacaccgugcuuuuguauuacucaacugccgcuaguucccuggccgucacacucaugaucgcaaucuucguggucuauauggugagccgugauaauguuucuuguucaauuugccuguga

SEQ ID NO: 154672 - RNA, 1758 nt, Artificial Sequence; identical to SEQ ID NO: 154562
  derived and/or modified CDS sequence (opt3) from hemagglutinin__InfluenzaB__AEP20200

SEQ ID NO: 154673 - RNA, 1755 nt, Artificial Sequence; identical to SEQ ID NO: 154453
  derived and/or modified CDS sequence (opt3) from hemagglutinin__InfluenzaB__AEP20211

SEQ ID NO: 154674 - RNA, 1755 nt, Artificial Sequence
  derived and/or modified CDS sequence (opt3) from hemagglutinin__InfluenzaB__AEP20222
augaaggccaucauugugcugcucauggucguuaccagcaacgcugacagaauaugcacaggcaucacuuccucuaauucaccccacgugguaaaaacggcaacccagggggaggugaacgucacaggagccauuccucuuacuaccacaccaaccaagagucauuucgcgaaucugaaagguacuaagacaaggggcaaauuguguccgaccugcuuuaacuguacggauuuagacguggcucuggggcggcccaugugcguuggaaucacuccuagcgccaaggcauccauucuacacgaagugcgcccagucaccucuggcuguuuccccaucaugcaugaucgaacaaagauacgucaacucccuaaucugcuuagagguuacgagaaaaucaggcugucgacucagaacgugauugacgccgaaaaggcuccagggggacccuaucgguugggcaccucaggcagcugcccuaaugcaacaaguaaauccggguuuuucgccaccauggcuugggccguaccacgcgauaacaauaagacggcgacuaacccgcucacaguugaggugcccaauaucuguaccaaagaagaggaccagauuacugucuggggauuucacucugauaacaagacacagaugaagaaucuguacggugacccuaacccacaaaaauucaccagcuccgcaaauggcaucacgacccauuaugugucacagauagggggauuucccgaucagacagaggacggcggucugccucagagugggagaauuguggucgauuacaugguucaaaagccaggaaaaacuggcaccaucguguaucagaggggcauucucuuaccccagaagguauggugcgccagcgggcggucuaaagugaucaagggaucccugccgcuuaucggugaagcugacuguuugcacgagaaauacggcgggcugaacaagucaaagccuuauuacacaggagaacacgccaaagcaauuggcaacugccccauaugggucaagacuccacuaaaacucgcuaaugguaccaaguaccgcccucccgccaaacugcuuaaggagcgaggguucuuuggcgcgaucgccggauuccuggagggcgggugggaaggaaugauugcagguuggcauggcuauacaagccacggggcucauggaguggccguugcugccgauuugaagaguacccaggaggcaaucaacaaaauaacuaagaaucucaacucucuguccgaauuagaggugaaaaaucugcaaagacucagcggcgccauggacgaacuucacaacgagauucuggaguuggacgaaaaggucgaugaccuaagggcugauacgaucucgucucagaucgagcuggcggugcuccuguccaaugaagguauuaucaacucagaggacgaacaccuucuggcauuggagcggaaacucaagaagaugcuggggccaagugccguagauauuggcaauggauguuuugagacaaaacauaagugcaaccagaccugcuuagaccguauagcugccggcacuuucaaugcaggggaauuuagccugcccaccuucgauucccuaaacaucacagccgcuucucucaaugacgauggacuggacaaccacaccauucuuuuguacuauagcacugccgcaucaagucuggcgguuacacucaugaucgcuaucuucauuguguacaugauaucccgcgauaaugucagcuguucuaucugccuguga

SEQ ID NO: 154675 - RNA, 1755 nt, Artificial Sequence; identical to SEQ ID NO: 154559
  derived and/or modified CDS sequence (opt3) from hemagglutinin__InfluenzaB__AEP20233

SEQ ID NO: 154676 - RNA, 1755 nt, Artificial Sequence
  derived and/or modified CDS sequence (opt3) from hemagglutinin__InfluenzaB__AEP20244
augaaggccaucauugugcugcucauggucguuaccagcaacgcugacagaauaugcacaggcaucacuuccucuaauucaccccacgugguaaaaacggcaacccagggggaggugaacgucacaggagccauuccucuuacuaccacaccaaccaagagucauuucgcgaaucugaaagguacuaagacaaggggcaaauuguguccgaccugcuuuaacuguacggauuuagacguggcucuggggcggcccaugugcaugggaaucacuccuagcgccaaggcauccauucuacacgaaguucgcccagugaccucuggcuguuuccccaucaugcaugaucgaacaaagauacgucaacucccuaaucugcuuagagguuacgagaaaaucaggcugucgacucagaacgucauugacgccgaaaaggcuccagggggacccuaucgguugggcaccucaggcagcugcccuaaugcaacaaguaaauccggguuuuucgccaccauggcuugggccgugccacgcggaaacaauaagacggcgacuaacccgcucacaguagagguuccccacaucuguaccaaagaagaggaucagauuacugugugggguuuucauucugacaauaagacacagaugaagaaccuguacggcgauagcaauccucaaaaauucaccuccucagcaaacgggaucacgacccacuaugucagucagauaggaggcuuuccagaccagacagaggauggugggcugccccagagcggaagaauugugguggacuacaugguccaaaagccuggcaaaacuggcaccaucguuuaucagagggggauucucuuaccacagaagguguggugcgccucuggacgguccaaaguaaucaaggguucacugccccuuaucggcgaagcugauuguuugcacgagaaauacgggggacugaauaagagcaagccguauuacacaggcgaacaugccaaagcaauugguaacugcccuauaugggugaagacuccccuaaaacucgcuaacgggaccaaguaccgcccuccagccaaacugcuuaaggagcgaggcuucuuuggagcgaucgccggcuuccuggaagggggaugggaggguaugauugcaggcuggcacggguauacaagucauggagcucacggcgucgccguggcugccgacuugaagucuacccaggaggcaaucaauaaaauaacuaagaaccucaauucccugagcgaauuagagguuaaaaaccugcaaagacucucgggugccauggaugaacuucacaaugagauucuggaguuggacgaaaagguggacgaucuaagggcugacacgaucucuucccagaucgagcuggcgguccuccugucaaacgaagggauuaucaauagugaggaugaacaucuucuggcauuggagcggaaacucaagaagaugcugggccccagcgccguggacauuggaaacggcuguuuugagacaaaacacaagugcaaucagaccugcuuagaucguauagcugccgggacuuucaacgcaggagaauuuucccugccaaccuucgacucucuaaauaucacagccgcuagccucaacgaugacggucuggauaaucauaccauucuuuuguacuauucaacugccgcaaguucccuggcgguaacacucaugaucgcuaucuucauuguuuacaugauaagccgcgacaacgugucuuguucaaucugccuguga

SEQ ID NO: 154677 - RNA, 1758 nt, Artificial Sequence; identical to SEQ ID NO: 154467
  derived and/or modified CDS sequence (opt3) from hemagglutinin__InfluenzaB__AEP20255

SEQ ID NO: 154678 - RNA, 1758 nt, Artificial Sequence
  derived and/or modified CDS sequence (opt3) from hemagglutinin__InfluenzaB__AEP20277
augaaggccaucauugugcugcucauggucguuaccagcaacgcugacagaauaugcacaggcaucacuuccucuaauucaccccacgugguaaaaacggcaacccagggggaggugaacgucacaggagugauuccucuuacuaccacaccaaccaagagucauuucgccaaucugaaagguacuaagacaaggggcaaauuguguccgaagugcuuaaacuguaccgaucuggacguugcgcuagggcggcccaagugcacgggaaauaucccuagcgcugaaguguccauucuccacgagguccgcccagugacuucuggcuguuuucccaucaugcaugaucgaaccaaaauacgucaacugccuaaccuucugagagguuacgaacacaucagguugucgacacauaauguaauuaacgccgagaaggcaccagggggacccuauaaaaucggcacuucaggcagcugcccuaauguuaccaacgggaauggauucuuugccacaauggcuugggcagugccaaagaacgacaauaacaaaaccgccacgaauagucucacuauugaagucccguacaucuguacagagggugaggaucagauaaccguguggggcuuccacuccgacaacgaaacucagauggcuaagcuguauggggauucuaagccccagaaauuuacaagcuccgccaacggagugaccacgcacuacgucucacaaauuggcgguuucccuaaucagaccgaggacgggggacugccacagaguggccggaucguuguggauuauaugguacaaaagagcggcaaaacagggacuauuaccuaccagcgcggaauccucuuaccccagaagguguggugcgcgucugguagauccaaagucaucaagggcucacugccucuuauuggggaagcagacuguuugcaugagaaauauggaggccugaacaagagcaagccauacuacacaggugagcacgccaaagcuauagggaauugccccaucugggugaagacuccgcuaaaacucgccaacggcaccaaguauaggccucccgcaaaacugcuuaaggaacggggauuuuucggcgcuauugccggguuucuggagggagguugggaaggcaugaucgcgggguggcauggauacacaagucacggcgcccacgguguugcaguggcugccgauuugaagucuacccaggaggcuauaaauaaaauuacuaagaaccucaauucccugagcgaauuagaggucaaaaaccugcagcgccucucgggggccauggacgagcuucauaaugaaauccuggaguuggaugaaaagguggacgaccuacgagcagauacgaucucuucccaaauugagcuggccguacuccugucaaacgaaggcaucauuaauagugaggacgagcaccuucuggcuuuggaaagaaaacucaagaagaugcugggaccaagcgcgguugagauaggcaacggguguuucgaaacaaaacauaagugcaaucagaccugcuuagauaaaaucgcagccggaacuuuugacgcuggugaguucucccugccuaccuuugauucucuaaacauuacagccgcaagccucaaugacgauggccuggacaaccacaccauccuuuuguauuacucaacugccgcuaguucccuggccgugacacucaugaucgcaauuuucgucguguauauggucagcagggauaacgugucuuguucaauaugccuguga

SEQ ID NO: 154679 - RNA, 1755 nt, Artificial Sequence
  derived and/or modified CDS sequence (opt3) from hemagglutinin__InfluenzaB__AEP20299
augaaggccaucauugugcugcucauggucguuaccagcaacgcugacagaauaugcacaggcaucacuuccucuaauucaccccacgugguaaaaacggcaacccagggggaggugaacgucacaggagugauuccucuuacuaccacaccaaccaagaguuacuucgccaaucugaaagguacuaggacacggggcaaguuguguccggauugcuuaaacuguaccgaccuggauguugcgcuagggcgccccaugugcgugggaacgacuccuagcgcuaaagccuccauccuccaugaaguccgaccagugaccucuggcuguuuucccauuaugcacgaccguacaaagaucagacaacuggcaaaucuucugagggguuaugagaacauacgguugucgacucagaauguaaucgaugccgaaaaggcuccugggggaccauaccgccucggcaccucaggcagcugccccaacgcaacaaguaaauccggguucuuugccaccauggcuugggccguuccuaagaauaacaauaaaaacgcgacgaauccacugacuguggaggucccguauauuuguacagaaggagaggaccagaucaccgugugggguuuccauucugauaacaagacucagaugaaaaaucuguacggcgacagcaacccccaaaaguuuacauccucagcaaacggggugaccacgcacuaugucagucagauuggaggcuucccugaucagaccgaggacggugggcucccacagagcggaagaaucguuguggauuacaugaugcaaaagcccggcaaaacaggcacuauaguauaucagcgcgggguguuacugccucagaaggucuggugcgccucuggacgguccaaagugauuaaggguucacuuccauugaucggcgaagcugacugucugcaugagaaauacgggggacuaaauaagagcaaacccuacuauaccggcgaacacgccaaggcaauugguaacugcccgaucuggguuaagacaccucucaaacuggcuaaugggacuaaguacaggcccccagccaaacuucugaaggagcgaggcuuuuucggagcgaucgccggcuuuuuggaagggggaugggaagguaugauugcaggcuggcacggguauaccagucauggagcucacggcguggccgucgcugccgaucucaaaucuacacaggaggcaauaaacaagaucaccaagaaucugaacuccuuaagcgaacuggaggugaaaaaucuccaaagacuuucgggugccauggacgaacugcauaacgagauuuuggagcuagacgaaaagguagaugaccugagggcugauacuaucucuucccagauagagcucgcgguucugcuuucaaaugaagggauuaucaacagugaggacgaacaccuguuggcacucgagcggaaacugaagaaaauguuaggcccuagcgccguggauaucggaaauggcuguuucgagacgaagcacaagugcaaccagacaugccuggaccguauugcugccgggaccuuuaaugcaggagaguucucccuacccacuuuugauucucucaacaucaccgccgcuagccugaaugacgauggucuugacaaccauacaauuuugcuguacuauucaaccgccgcaaguucccucgcggucacucugaugcuugcuauauucaucguguacauggucagccgcgauaacgugucuuguucaauuugccuguga

SEQ ID NO: 154680 - RNA, 1755 nt, Artificial Sequence
  derived and/or modified CDS sequence (opt3) from hemagglutinin__InfluenzaB__AEP20310
augaaggccaucauugugcugcucauggucguuaccagcaacgcugacagaauaugcacaggcaucacuuccucuaauucaccccacgugguaaaaacggcaacccagggggaggugaacgucacaggagugauuccucuuacuaccacaccaaccaagaguuacuucgccaaucugaaagguacuaggacacggggcaaguuguguccggauugcuuaaacuguaccgaccuggauguugcgcuagggcgccccaugugcgugggaacgacuccuagcgcuaaagccuccauccuccaugaaguccgaccagugaccucuggcuguuuucccauuaugcacgaccguacaaagaucagacaacugccuaaucuucugagggguuaugagaacauacgguugucgacucagaauguaaucgaugcagaaaaggccccagggggacccuaccgccucggcaccucaggcagcugcccuaacgcuacaaguaaauccggguucuuugcaaccauggccugggcuguuccaaaggacaauaacaaaaaugccacgaacccgcugacuguggagguccccuauauuuguacagaaggagaggaucagaucaccgugugggguuuccauucugacaauaagacucagaugaaaaaccuguacggcgauagcaauccucaaaaguuuacauccucagcgaacggggugaccgcacacuaugucagucagauuggaggcuucccagaccagacggaggauggugggcucccccagagcggaagaaucguuguggacuacaugaugcaaaagccuggcaaaaccggcacaauaguauaucagaggggaguguuacugccacagaaggucuggugcgccucugggcgguccaaagugauuaaggguucacuucccuugaucggcgaagcugauugucugcaugagaaauacgggggacuaaacaagagcaaaccguacuauacuggcgaacacgccaaggcaauugguaauugcccuaucuggguuaagaccccucucaaacuggcuaacgggacaaaguaccgcccacccgccaaacuucugaaggagcgaggcuuuuucggagcgaucgccggcuuuuuggaagggggaugggaagguaugauugcaggcuggcacggguauacuucccauggagcucacggcguggccgucgcugccgaccucaaaucuacccaggaggcaauaaauaagaucacaaagaaccugaauaguuuaagcgaacuggaggugaaaaaccuccaaagacuuucgggugccauggacgaacugcauaaugagauuuuggagcuagaugaaaagguagacgaucugagggcugacaccaucucuucccagauagagcucgcgguucugcuuucaaacgaagggauuaucaauagugaggaugaacaccuguuggcacucgagcggaaacugaagaaaauguuaggccccagcgccguggacaucggaaacggcuguuucgagacuaagcacaagugcaaucagacgugccuggaucguauugcugccgggacauuuaacgcaggagaguucucccuaccaaccuuugacucucucaauaucacugccgcuagccugaacgaugacggucuugauaaucauaccauuuugcuguacuauucaacagccgcaaguucccucgcggucacccugaugcuugcuauauucaucguguacauggucagccgcgacaacgugucuuguucaauuugccuguga

SEQ ID NO: 154681 - RNA, 1758 nt, Artificial Sequence
  derived and/or modified CDS sequence (opt3) from hemagglutinin__InfluenzaB__AEP20332
augaaggccaucauugugcugcucauggucguuaccagcaacgcugacagaauaugcacaggcaucacuuccucuaauucaccccacgugguaaaaacggcaacccagggggaggugaacgucacaggagugauuccucuuacuaccacaccaaccaagagucauuucgccaaucugaaagguacuaagacaaggggcaaauuguguccgaagugcuuaaacuguaccgaucuggacguugcgcuagggcggcccaagugcacgggaaauaucccuagcgcugaaguguccauucuccacgagguccgcccagugacuucuggcuguuuucccaucaugcaugaucgaaccaaaauacgucaacugccuaaccuucugagagguuacgaacacaucagguugucgacacauaauguaauuaacgccgagaaggcaccagggggacccuauaaaaucggcacuucaggcagcugcccuaauguuaccaacgggaauggauucuuugccacaauggcuugggcagugccaaagaacgacaauaacaaaaccgccacgaauccgcucacuauugaaguccccuacaucuguacagagggugaggaucagauaaccguguggggcuuccacagugacaacgaaacucagauggcuaagcuguauggggauuccaagccucagaaauuuacaucuagcgccaacggagugaccacgcacuacgucucccaaauuggcgguuucccaaaucagaccgaggacgggggacugccccagucaggccggaucguuguggauuauaugguacagaagaguggcaaaacagggacuauuaccuaccaacgcggaauccucuuaccucagaagguguggugcgcgagcgguagaucuaaagucaucaagggcucccugccacuuauuggggaagcagacuguuugcaugagaaauauggaggccugaacaagucaaagcccuacuacacaggugagcacgccaaagcuauagggaauugcccgaucugggugaagacuccucuaaaacucgccaacggcaccaaguauaggcccccagcaaaacugcuuaaggaacggggauuuuucggcgcuauugccggguuucuggagggagguugggaaggcaugaucgcgggguggcauggauacacaagccacggcgcccacgguguugcaguggcugccgauuugaagaguacccaggaggcuauaaauaaaauuacuaagaaccucaauucucuguccgaauuagaggucaaaaaccugcagcgccucagcggggccauggacgagcuucauaaugaaauccuggaguuggaugaaaagguggacgaccuacgagcagauacgaucucgucucaaauugagcuggccguacuccuguccaacgaaggcaucauuaauucagaggacgagcaccuucuggcuuuggaaagaaaacucaagaagaugcugggaccuagugcgguugagauaggcaacggguguuucgaaacaaaacauaagugcaaucagaccugcuuagauaggaucgcagccggaacuuuugacgcuggugaguucagccugcccaccuuugauucccuaaacauuacagccgcaucucucaaugacgauggccuggacaaccacaccauccuuuuguauuacagcacugccgcuucaagucuggccgugacacucaugaucgcaauuuucgucguguauauggucucccgggauaacgugagcuguucuauaugccuguga

SEQ ID NO: 154682 - RNA, 1755 nt, Artificial Sequence; identical to SEQ ID NO: 154474
  derived and/or modified CDS sequence (opt3) from hemagglutinin__InfluenzaB__AEP20343

SEQ ID NO: 154683 - RNA, 1755 nt, Artificial Sequence; identical to SEQ ID NO: 154474
  derived and/or modified CDS sequence (opt3) from hemagglutinin__InfluenzaB__AEP20354

SEQ ID NO: 154684 - RNA, 1755 nt, Artificial Sequence; identical to SEQ ID NO: 154474
  derived and/or modified CDS sequence (opt3) from hemagglutinin__InfluenzaB__AEP20365

SEQ ID NO: 154685 - RNA, 1755 nt, Artificial Sequence; identical to SEQ ID NO: 154474
  derived and/or modified CDS sequence (opt3) from hemagglutinin__InfluenzaB__AEP20376

SEQ ID NO: 154686 - RNA, 1758 nt, Artificial Sequence
  derived and/or modified CDS sequence (opt3) from hemagglutinin__InfluenzaB__AEP20398
augaaggccaucauugugcugcucauggucguuaccagcaacgcugacagaauaugcacaggcaucacuuccucuaauucaccccacgugguaaaaacggcaacccagggggaggugaacgucacaggagugauuccucuuacuaccacaccaaccaagagucauuucgccaaucugaaagguacuaagacaaggggcaaauuguguccgaagugcuuaaacuguaccgaucuggacguugcgcuagggcggcccaagugcacgggaaauaucccuagcgcugaaguguccauucuccacgagguccgcccagugacuucuggcuguuuucccaucaugcaugaucgaaccaaaauacgucaacugccuaaccuucugagagguuacgaacacaucagguugucgacacauaauguaauuaacgccgagaaggcaccagggggacccuauaaaaucggcacuucaggcagcugcccuaauguuaccaacgggaauggauucuuugccacaauggcuugggcagugccaaagaacgacaauaacaaaaccgccacgaauagucucacuauugaagucccguacaucuguacagagggugaggaucagauaaccauuuggggcuuccacuccgacaacgaaacucagauggcuaagcuguauggggauucuaagccccagaaauuuacaagcuccgccaacggagugaccacgcacuacgugucacaaaucggcgguuucccuaaucagaccgaggacgggggacugccacagaguggccggauugucguugauuauauggugcaaaagagcggcaaaacagggacuaucaccuaccagcgcggaauccucuuaccccagaagguauggugcgcgucugguagauccaaagugauuaagggcucacugccucuuauaggggaagcagacuguuugcaugagaaauauggaggccugaacaagagcaagccauacuacacaggugagcacgccaaagcuaucgggaauugccccauuugggucaagacuccgcuaaaacucgccaacggcaccaaguauaggccucccgcaaaacugcuuaaggaacggggauuuuucggcgcuaucgccggguuucuggagggagguugggaaggcaugauagcgggguggcauggauacacaagucacggcgcccacgguguggcaguugcugccgauuugaagucuacccaggaggcuauuaauaaaaucacuaagaaccucaauucccugagcgaauuagaggugaaaaaccugcagcgccucucgggggccauggacgagcuucauaaugaaauccuggaguuggaugaaaaggucgacgaccuacgagcagauacgauuucuucccaaaucgagcuggccgugcuccugucaaacgaaggcauuauaaauagugaggacgagcaccuucuggcuuuggaaagaaaacucaagaagaugcugggaccaagcgcgguagagaucggcaacggguguuucgaaacaaaacauaagugcaaucagaccugcuuagauaggauugcagccggaacuuuugacgcuggugaguucucccugccuaccuuugauucucuaaacaucacagccgcaagccucaaugacgauggccuggacaaccacaccauccuuuuguauuacucaacugccgcuaguucccuggccguuacacucaugauugcaauauucguggucuauauggugagccgggauaacgucucuuguucaaucugccuguga

SEQ ID NO: 154687 - RNA, 1758 nt, Artificial Sequence; identical to SEQ ID NO: 154656
  derived and/or modified CDS sequence (opt3) from hemagglutinin__InfluenzaB__AEP20409

SEQ ID NO: 154688 - RNA, 1758 nt, Artificial Sequence; identical to SEQ ID NO: 154656
  derived and/or modified CDS sequence (opt3) from hemagglutinin__InfluenzaB__AEP20420

SEQ ID NO: 154689 - RNA, 1758 nt, Artificial Sequence; identical to SEQ ID NO: 154656
  derived and/or modified CDS sequence (opt3) from hemagglutinin__InfluenzaB__AEP20431

SEQ ID NO: 154690 - RNA, 1758 nt, Artificial Sequence; identical to SEQ ID NO: 154656
  derived and/or modified CDS sequence (opt3) from hemagglutinin__InfluenzaB__AEP20442

SEQ ID NO: 154691 - RNA, 1758 nt, Artificial Sequence; identical to SEQ ID NO: 154656
  derived and/or modified CDS sequence (opt3) from hemagglutinin__InfluenzaB__AEP20453

SEQ ID NO: 154692 - RNA, 1755 nt, Artificial Sequence; identical to SEQ ID NO: 154474
  derived and/or modified CDS sequence (opt3) from hemagglutinin__InfluenzaB__AEQ39027

SEQ ID NO: 154693 - RNA, 1758 nt, Artificial Sequence
  derived and/or modified CDS sequence (opt3) from hemagglutinin__InfluenzaB__AEQ39260
augaaggccaucauugugcugcucauggucguuaccagcaacgcugacagaauaugcacaggcaucacuuccucuaauucaccccacgugguaaaaacggcaacccagggggaggugaacgucacaggagugauuccucuuacuaccacaccaaccaagagucauuucgccaaucugaaagguacugaaacaaggggcaaguuguguccgaaaugcuuaaacuguaccgaucuggacguugcgcuagggcggcccaagugcacgggaaagaucccuagcgcucgcguguccauucuccacgagguccgaccagugacuucuggcuguuuucccaucaugcaugaucguaccaaaauaagacaacugccuaaucuucugagggguuacgaacacauccgguugucgacacauaacguaauuaaugccgagaacgcaccagggggacccuauaagaucggcacuucaggcagcugcccuaauguuaccaacgggaauggauucuuugccacaauggcuugggcagugccgaaaaacgacaagaauaaaaccgccacgaacccacucacuauugaaguccccuacaucuguacagagggugaggaucagauaaccguguggggcuuccacagugacaaugaaacucagauggcuaagcuguauggggauuccaagccucagaaauuuacaucuagcgccaacggagugaccacgcacuacgucucccaaauuggcgguuucccaaaccagaccgaggacgggggacugccccagucaggccgcaucguuguggauuauaugguacagaagaguggcaaaacagggacuauuaccuaccaaagaggaauccucuuaccucagaagguguggugcgcgagcgguaggucuaaagucaucaagggcucccugccacuuauuggggaagcagacuguuugcaugagaaauauggaggccugaauaagucaaagcccuacuacacaggugagcacgccaaagcuauagggaacugcccgaucugggugaagacuccucuaaaacucgccaauggcaccaaguaucggcccccagcaaaacugcuuaaggaacgcggauuuuucggcgcuauugccggguuucuggagggagguugggaaggcaugaucgcgggguggcauggauacacaagccacggcgcccacgguguugcaguggcugccgauuugaagaguacccaggaggcuauaaacaaaauuacuaagaaucucaacucucuguccgaauuagaggucaaaaaucugcagcgacucagcggggccauggacgagcuucauaacgaaauccuggaguuggaugaaaagguggacgaccuaagagcagauacgaucucgucucaaauugagcuggccguacuccuguccaaugaaggcaucauuaacucagaggacgagcaccuucuggcuuuggaaaggaaacucaagaagaugcugggaccuagugcgguugagauaggcaauggguguuucgaaacaaaacauaagugcaaccagaccugcuuagaucggaucgcagccggaacuuuugacgcuggugaguucagccugcccaccuuugauucccuaaauauuacagccgcaucucucaacgacgauggccuggacaaucacaccauccuuuuguauuacagcacugccgcuucaagucuggccgugacacucaugaucgcaauuuucgucguguauauggucucccgugauaacgugagcuguucuauaugccuguga

SEQ ID NO: 154694 - RNA, 1758 nt, Artificial Sequence; identical to SEQ ID NO: 154693
  derived and/or modified CDS sequence (opt3) from hemagglutinin__InfluenzaB__AEQ39271

SEQ ID NO: 154695 - RNA, 1758 nt, Artificial Sequence
  derived and/or modified CDS sequence (opt3) from hemagglutinin__InfluenzaB__AEQ39282
augaaggccaucauugugcugcucauggucguuaccagcaacgcugacagaauaugcacaggcaucacuuccucuaauucaccccacgugguaaaaacggcaacccagggggaggugaacgucacaggagugauuccucuuacuaccacaccaaccaagagucauuucgccaaucugaaagguacugaaacaaggggcaaguuguguccgaaaugcuuaaacuguaccgaucuggacguugcgcuagggcggcccaagugcacgggaaagaucccuagcgcucgcguguccauucuccacgagguccgaccagugacuucuggcuguuuucccaucaugcaugaucguaccaaaauaagacaacugccuaaucuucugagggguuacgaacacauccgguugucgacacauaacguaauuaaugccgagaacgcaccagggggacccuauaagaucggcacuucaggcagcugcccuaauguuaccaacgggaauggauucuuugccacaauggcuugggcagugccgaaaaacgacaagaauaaaaccgccacgaacccacucacuauugaaguccccuacaucuguacagagggugaggaucagauaaccguguggggcuuccacagugacaaugaaacucagauggcuaagcuguauggggauuccaagccucagaaauuuacaucuagcgccaacggagugaccacgcacuacgucucccaaauuggcgguuucccaaaccagaccgaggacgggggacugccccagucaggccgcaucguuguggauuauaugguacagaagaguggcaaaacagggacuauuaccuaccaaagaggaauccucuuaccucagaagguguggugcgcgagcgguaggucuaaagucaucaagggcucccugccacuuauuggggaagcagacuguuugcaugagaaauauggaggccugaauaagucaaagcccuacuacacaggugagcacgccaaagcuauagggaacugcccgaucugggugaagacuccucuaaaacucgccaauggcaccaaguaucggcccccagcaaaacugcuuaaggaacgcggauuuuucggcgcuauugccggguuucuggagggagguugggaaggcaugaucgcgggguggcauggauacacaagccacggcgcccacgguguugcaguggcugccgauuugaagaguacccaggaggcuauaaacaaaauuacuaagaaucucaacucucuguccgaauuagaggucaaaaaucugcagcgacucagcggggccauggacgagcuucauaacgaaauccuggaguuggaugaaaagguggacgaccuaagagcagauacgaucucgucucaaauugagcuggccguacuccuguccaaugaaggcaucauuaacucagaggacgagcaccuucuggcuuuggaaaggaaacucaagaagaugcugggaccuagugcgguugagauaggcaauggguguuucgaaacaaaacauaagugcaaccagaccugcuuagaucggaucgcagccggaacuuuugacgcuggugaguucagccugcccaccuuugauucccuaaauauuacagccgcaucucucaacggcgacgaacuggauaaucacaccauccuuuuguauuacagcacugccgcuucaagucuggccgugacacucaugaucgcaauuuucgucguguauauggucucccgugacaacgugagcuguucuauaugccuguga

SEQ ID NO: 154696 - RNA, 1758 nt, Artificial Sequence
  derived and/or modified CDS sequence (opt3) from hemagglutinin__InfluenzaB__AEQ39315
augaaggccaucauugugcugcucauggucguuaccagcaacgcugacagaauaugcacaggcaucacuuccucuaauucaccccacgugguaaaaacggcaacccagggggaggugaacgucacaggagugauuccucuuacuaccacaccaaccaagagucauuucgccaaucugaaagguacugaaacaaggggcaaguuguguccgaaaugcuuaaacuguaccgaucuggacguugcgcuagggcggcccaagugcacgggaaagaucccuagcgcucgcguguccauucuccacgagguccgaccagugacuucuggcuguuuucccaucaugcaugaucguaccaaaauaagacaacugccuaaucuucugagggguuacgaacacauccgguugucgacacauaacguaauuaaugccgagaacgcaccagggggacccuauaagaucggcacuucaggcagcugcccuaauguuaccaacgggaauggauucuuugccacaauggcuugggcagugccgaaaaacgacaagaauaaaaccgccacgaacccacucacuauugaaguccccuacaucuguacagagggugaggaucagauaaccguguggggcuuccacagugacaaugaaacucagauggcuaagcuguauggggauuccaagccucagaaauuuacaucuagcgccaacggagugaccacgcacuacgucucccaaauuggcgguuucccaaaccagaccgaggacgggggacugccccagucaggccgcaucguuguggauuauaugguacagaagaguggcaaaacagggacuauuaccuaccaaagaggaauccucuuaccucagaagguguggugcgcgagcgguaggucuaaagucaucaagggcucccugccacuuauuggggaagcagacuguuugcaugagaaauauggaggccugaauaagucaaagcccuacuacacaggugagcacgccaaagcuauagggaacugcccgaucugggugaagacuccucuaaaacucgccaauggcaccaaguaucggcccccagcaaaacugcuuaaggaacgcggauuuuucggcgcuauugccggguuucuggagggagguugggaaggcaugaucgcgggguggcauggauacacaagccacggcgcccacgguguugcaguggcugccgauuugaagaguacccaggaggcuauaaacaaaauuacuaagaaucucaacucucuguccgaauuagaggucaaaaaucugcagcgacucagcggggccauggacgagcuucauaacgaaauccuggaguuggaugaaaagguggacgaccuaagagcagauacgaucucgucucaaauugagcuggccguacuccuguccaaugaaggcaucauuaacucagaggacgagcaccuucuggcuuuggaaaggaaacucaagaagaugcugggaccuagugcgguugagauaggcaauggguguuucgaaacaaaacauaagugcaaccagaccugcuuagaucggaucgcagccggaacuuuugacgcuggugaguucagccugcccaccuuugauucccuaaauauuacagccgcaucucucaacggcgacgggcuggauaaucacaccauccuuuuguauuacagcacugccgcuucaagucuggccgugacacucaugaucgcaauuuucgucguguauauggucucccgugacaacgugagcuguucuauaugccuguga

SEQ ID NO: 154697 - RNA, 1758 nt, Artificial Sequence; identical to SEQ ID NO: 154696
  derived and/or modified CDS sequence (opt3) from hemagglutinin__InfluenzaB__AEQ39326

SEQ ID NO: 154698 - RNA, 1758 nt, Artificial Sequence
  derived and/or modified CDS sequence (opt3) from hemagglutinin__InfluenzaB__AEQ39337
augaaggccaucauugugcugcucauggucguuaccagcaacgcugacagaauaugcacaggcaucacuuccucuaauucaccccacgugguaaaaacggcaacccagggggaagugaacgucacaggagugauuccucuuacuaccacaccaaccaagagucauuucgccaaucugaaagguacugaaacaaggggcaaguuguguccgaaaugcuuaaacuguaccgaucuggacguugcgcuagggcggcccaagugcacgggaaagaucccuagcgcucgcguguccauucuccacgagguccgaccagugacuucuggcuguuuucccaucaugcaugaucguaccaaaauaagacaacugccuaaucuucugagggguuacgaacacauccgguugucgacacauaacguaauuaaugccgggaacgcaccaggaggccccuauaagaucggcacuucagggagcugcccuaauguuaccaacggaaaugguuucuuugccacaauggcuugggcagugccgaaaaacgacaagaauaaaaccgccacgaacccacucacuauugagguccccuacaucuguacagaaggcgaggaucagauaaccguguggggguuccacagugacaaugagacucagauggcuaagcuguauggagauuccaagccucagaaauuuacaucuagcgccaacggcgugaccacgcacuacgucucccaaauugguggguucccaaaccagaccgaagacggaggccugccccagucaggccgcaucguuguggauuauaugguacagaagagugggaaaacaggaacuauuaccuaccaaagagguauccucuuaccucagaagguguggugcgcgagcggcaggucuaaagucaucaaggggucccugccacuuauuggagaggcagacuguuugcaugaaaaauauggcggucugaauaagucaaagcccuacuacacaggggagcacgccaaagcuauaggcaacugcccgaucugggugaagaaaccucuaaagcucgccaauggaacuaaauaucggcccccagcaaagcugcuuaaggagcgcggcuuuuucggggcuauugccggauuucuggaagguggcugggaggggaugaucgcgggauggcauggcuacaccagccacggugcccacgggguugcaguggcugccgauuugaaaaguacacaggaagcuauaaacaagauuaccaaaaaucucaacucucuguccgaguuagaagucaagaaucugcagcgacucagcggcgccauggacgagcuucauaacgagauccuggaauuggaugagaaaguggacgaccuaagagcagauacuaucucgucucaaauugaacuggccguacuccuguccaaugagggaaucauuaacucagaagacgagcaccuucuggcuuuggagaggaagcucaagaaaaugcugggcccuagugcgguugaaauagggaauggauguuucgagacgaagcauaaaugcaaccagacaugcuuagaucggaucgcagccgguaccuuugacgcuggcgaguucagccugcccacuuuugauucccuaaauauuaccgccgcaucucucaacgacgaugggcuggacaaucacacaauccuuuuguauuacagcaccgccgcuucaagucuggccgugacucucaugaucgcaauuuucgucguguauauggucucccgugauaacgugagcuguucuauaugccuguga

SEQ ID NO: 154699 - RNA, 1758 nt, Artificial Sequence
  derived and/or modified CDS sequence (opt3) from hemagglutinin__InfluenzaB__AEQ39348
augaaggccaucauugugcugcucauggucguuaccagcaacgcugacagaauaugcacaggcaucacuuccucuaauucaccccacgugguaaaaacggcaacccagggggaggugaacgucacaggagugauuccucuuacuaccacaccaaccaagagucauuucgccaaucugaaagguacugaaacaaggggcaaguuguguccgaaaugcuuaaacuguaccgaucuggacguugcgcuagggcggcccaagugcacgggaaagaucccuagcgcucgcguguccauucuccacgagguccgaccagugacuucuggcuguuuucccaucaugcaugaucguaccaaaauaagacaacugccuaaucuucugagggguuacgaacacauccgguugucgacacauaacguaauuaaugccgagaacgcaccagggggacccuauaagaucggcacuucaggcagcugcccuaauguuaccaacgggaauggauucuuugccacaauggcuugggcagugccgaaaaacgacaagaauaaaaccgccacgaacccacucacuauugaaguccccuacaucuguacagagggugaggaucagauaaccguguggggcuuccacagugacaaugaaacucagauggcuaagcuguauggggauuccaagccucagaaauuuacaucuagcgccaacggagugaccacgcacuacgucucccaaauuggcgguuucccaaaccagaccgaggacgggggacugccccagucaggccgcaucguuguggauuauaugguacagaagaguggcaaaacagggacuauuaccuaccaaagaggaauccucuuaccucagaagguguggugcgcgagcgguaggucuaaagucaucaagggcucccugccacuuauuggggaagcagacuguuugcaugagaaauauggaggccugaauaagucaaagcccuacuacacaggugagcacgccaaagcuauagggaacugcccgaucugggugaagacuccucuaaaacucgccaauggcaccaaguaucggcccccagcaaaacugcuuaaggaacgcggauuuuucggcgcuauugccggguuucuggagggagguugggaaggcaugaucgcgggguggcauggauacacaagccacggcgcccacgguguugcaguggcugccgauuugaagaguacccaggaggcuauaaacaaaauuacuaagaaucucaacucucuguccgaauuagaggucaaaaaucugcagcgacucagcggggccauggacgagcuucauaacgaaauccuggaguuggaugaaaagguggacgaccuaagagcagauacgaucucgucucaaauugagcuggccguacuccuguccaaugaaggcaucauuaacucagaggacgagcaccuucuggcuuuggaaaggaaacucaagaagaugcugggaccuagugcgguugagauaggcaauggguguuucgaaacaaaacauaagugcaaccagaccugcuuagaucggaucgcagccggaacuuuugacgcuggugaguucagccugcccaccuuugauucccuaaauauuacagccgcaucucucaacgacgauggccuggacaaucacaucauccuuuuguauuacagcaccgccgcuucaagucuggccgugacucucaugauugcaauauucgucguguauauggucucccgugauaacgugagcuguucuaucugccuguga

SEQ ID NO: 154700 - RNA, 1758 nt, Artificial Sequence; identical to SEQ ID NO: 154696
  derived and/or modified CDS sequence (opt3) from hemagglutinin__InfluenzaB__AEQ39359

SEQ ID NO: 154701 - RNA, 1758 nt, Artificial Sequence
  derived and/or modified CDS sequence (opt3) from hemagglutinin__InfluenzaB__AEQ39370
augaaggccaucauugugcugcucauggucguuaccagcaacgcugacagaauaugcacaggcaucacuuccucuaauucaccccacgugguaaaaacggcaacccagggggaggugaacgucacaggagugauuccucuuacuaccacaccaaccaagagucauuucgccaaucugaaagguacugaaacaaggggcaaguuguguccgaaaugcuuaaacuguaccgaucuggacguugcgcuagggcggcccaagugcacgggaaauaucccuagcgcucgcguguccauucuccacgagguccgaccagugacuucuggcuguuuucccaucaugcaugaucguaccaagauaagacaacugccuaaccuucugagggguuacgaacacauccgguugucgacacauaauguaguuaacgccgagaaugcaccagggggacccuauaaaauuggcacuucaggcagcugcccuaacgugaccaaugggaacggauucuuugccacaauggcuugggcagucccaaagaaugacaacaauaaaaccgccacgaacagucucacuaucgaagugccguacauuuguacagagggugaggaucagaucaccguguggggcuuccacuccgacaacgaaacucagauggcuaagcuguauggggauucuaaaccccagaaguuuacaagcuccgccaauggagucaccacgcacuacguuucacaaauaggcgguuucccuaaccagaccgaggacgggggacugccacagaguggccgcauugugguagauuauauggugcaaaagagcggcaaaacagggacuaucaccuaccagagagguauucucuuaccccagaaggucuggugcgcgucuggaagguccaaagugaucaagggcucacugccucuuaucggggaagcagacuguuugcaugagaaauauggaggccugaauaagagcaaaccauacuacacaggugagcacgccaaggcuauugggaacugccccauauggguuaagacuccgcuaaaacucgccaauggcaccaaguaucggccucccgcaaaacugcuuaaggaacgcggauuuuucggcgcuaucgccggguuucuggagggagguugggaaggcaugauugcgggguggcauggauacacaagucacggcgcccacgguguggcagucgcugccgauuugaaaucuacccaggaggcuaucaacaagauaacuaagaaucucaacucccugagcgaauuagaggugaaaaaucugcagcgacucucgggggccauggacgagcuucauaacgaaauucuggaguuggaugaaaagguagacgaccuaagagcagauacgaucucuucccaaaucgagcuggccguucuccugucaaaugaaggcauuaucaacagugaggacgagcaccuucuggcuuuggaaaggaaacucaagaaaaugcugggaccaagcgcgguggagauuggcaauggguguuucgaaacaaagcauaagugcaaccagaccugcuuagaucggauagcagccggaacuuuugacgcuggugaguucucccugccuaccuuugauucucuaaauaucacagccgcaagccucaacgacgauggccuggacaaccacaccauucuuuuguauuacucaacugccgcuaguucccuggccgucacacucaugaucgcaaucuucguggucuauauggugagccgugauaauguuucuuguucaauuugccuguga

SEQ ID NO: 154702 - RNA, 1755 nt, Artificial Sequence; identical to SEQ ID NO: 154474
  derived and/or modified CDS sequence (opt3) from hemagglutinin__InfluenzaB__AEQ39392

SEQ ID NO: 154703 - RNA, 1755 nt, Artificial Sequence; identical to SEQ ID NO: 154474
  derived and/or modified CDS sequence (opt3) from hemagglutinin__InfluenzaB__AEQ39429

SEQ ID NO: 154704 - RNA, 1755 nt, Artificial Sequence; identical to SEQ ID NO: 154474
  derived and/or modified CDS sequence (opt3) from hemagglutinin__InfluenzaB__AEQ39440

SEQ ID NO: 154705 - RNA, 1755 nt, Artificial Sequence; identical to SEQ ID NO: 154474
  derived and/or modified CDS sequence (opt3) from hemagglutinin__InfluenzaB__AEQ39451

SEQ ID NO: 154706 - RNA, 1758 nt, Artificial Sequence; identical to SEQ ID NO: 154686
  derived and/or modified CDS sequence (opt3) from hemagglutinin__InfluenzaB__AEQ39462

SEQ ID NO: 154707 - RNA, 1758 nt, Artificial Sequence; identical to SEQ ID NO: 154693
  derived and/or modified CDS sequence (opt3) from hemagglutinin__InfluenzaB__AEQ39484

SEQ ID NO: 154708 - RNA, 1755 nt, Artificial Sequence; identical to SEQ ID NO: 154453
  derived and/or modified CDS sequence (opt3) from hemagglutinin__InfluenzaB__AEQ39506

SEQ ID NO: 154709 - RNA, 1758 nt, Artificial Sequence
  derived and/or modified CDS sequence (opt3) from hemagglutinin__InfluenzaB__AEQ39517
augaaggccaucauugugcugcucauggucguuaccagcaacgcugacagaauaugcacaggcaucacuuccucuaauucaccccacgugguaaaaacggcaacccagggggaggugaacgucacaggagugauuccucuuacuaccacaccaaccaagagucauuucgccaaucugaaagguacuaagacaaggggcaaauuguguccgaagugcuuaaacuguaccgaucuggacguugcgcuagggcggcccaagugcacgggaaauaucccuagcgcugaaguguccauucuccacgagguccgcccagugacuucuggcuguuuucccaucaugcaugaucgaaccaaaauacgucaacugccuaaccuucugagagguuacgaacacaucagguugucgacacauaauguaauuaacgccgagaaggcaccagggggacccuauaaaaucggcacuucaggcagcugcccuaauguuaccaacgggaauggauucuuugccacaauggcuugggcagugccaaagaacgacaauaacaaaaccgccacgaauagucucacuauugaagucccguacaucuguacagagggugaggaucagauaaccauuuggggcuuccacuccgacaacgaaacucagauggcuaagcuguauggggauucuaagccccagaaauuuacaagcuccgccaacggagugaccacgcacuacgugucacaaaucggcgguuucccuaaucagaccgaggacgggggacugccacagaguggccggauugucguugauuauauggugcaaaagagcggcaaaacagggacuaucaccuaccagcgcggaauccucuuaccccagaagguauggugcgcgucugguagauccaaagugauuaagggcucacugccucuuauaggggaagcagacuguuugcaugagaaauauggaggccugaacaagagcaagccauacuacacaggugagcacgccaaagcuaucgggaauugccccauuugggucaagacuccgcuaaaacucgccaacggcaccaaguauaggccucccgcaaaacugcuuaaggaacggggauuuuucggcgcuaucgccggguuucuggagggagguugggaaggcaugauagcgggguggcauggauacacaagucacggcgcccacgguguggcaguugcugccgauuugaagucuacccaggaggcuauuaauaaaaucacuaagaaccucaauucccugagcgaauuagaggugaaaaaccugcagcgccucucgggggccauggacgagcuucauaaugaaauccuggaguuggaugaaaaggucgacgaccuacgagcagauacgauuucuucccaaaucgagcuggccgugcuccugucaaacgaaggcauuauaaauagugaggacgagcaccuucuggcuuuggaaagaaaacucaagaagaugcugggaccaagcgcgguagagaucggcaacggguguuucgaaacaaaacauaagugcaaucagaccugcuuagauaggauugcagccggaacuuuugacgcuggugaguucucccugccuaccuuugauucucuaaacaucacagccgcaagccucaaugacaacggccuggauaaccacaccauccuuuuguauuacucaacugccgcuaguucccuggccguuacacucaugauugcaauauucguggucuauauggugagccgggacaaugucucuuguucaaucugccuguga

SEQ ID NO: 154710 - RNA, 1758 nt, Artificial Sequence
  derived and/or modified CDS sequence (opt3) from hemagglutinin__InfluenzaB__AER27038
augaaggccaucauugugcugcucauggucguuaccagcaacgcugacagaauaugcacaggcaucacuuccucuaauucaccccacgugguaaaaacggcaacccagggggaagugaacgucacaggagugauuccucuuacuaccacaccaaccaagagucauuucgccaaucugaaagguacugaaacaaggggcaaguuguguccgaaaugccccaacuguaccgauuuagacguugcgcuggggcggccuaagugcacgggaaagaucccaagcgcucgcguguccauucuacacgagguccgacccgugacuucuggcuguuuuccuaucaugcaugaucguaccaaaauaagacaacucccaaaucugcuuagggguuacgaacacauccggcugucgacacauaacguaauuaaugccgagaacgcacccgggggaccuuauaagaucggcacuucaggcagcugcccaaauguuaccaacgggaauggauucuuugccacaauggcuugggcagugccgaaaaacgacaagaauaaaaccgccacgaaccccuugacuauugaagucccuuacaucuguacaaagggugaggaucagauaaccguguggggcuuccacagugacaaugagacucagauggcuaagcucuauggggauuccaaaccacagaaguuuacaucuagcgccaacggagugaccacgcacuacgucucccaaauuggcgguuuccccaaccagaccgaagacgggggacugccucagucaggccgcaucguuguggauuauaugguacagaaaaguggcaagacagggacuauuaccuaccaaagaggaauccugcucccacagaaaguguggugcgcgagcgguaggucuaaggucaucaaaggcuccuuaccccugauuggggaggcagacugucuucaugaaaaguauggaggcuugaauaagucaaaaccguacuacacaggugagcacgccaaggcuauagggaacugcccuaucugggugaaaacuccccugaagcuagccaauggcaccaaauaucggccuccagcaaagcuccugaaggagcgcggauuuuucggcgcuauugccggguuucuugaaggagguugggagggcaugaucgcgggguggcauggauacacaagccacggcgcccacgguauagcaguugcugccgaucugaaaaguacccaggaagcuauuaacaagaucacuaaaaauuugaacucucucuccgagcuggaagugaagaauuuacagcgacugagcggggccauggacgagcuccauaacgagauccuugaacuggaugagaaagucgacgacuugagagcagauacgauuucgucucaaaucgaacuagccgugcugcucuccaaugagggcauuauaaacucagaagacgagcaucugcuugcucuggagaggaaguugaagaaaaugcucggacccagugcgguagaaaucggcaauggguguuucgagacaaagcacaaaugcaaccagaccugccuggaucggauugcagccggaacuuuugacgcuggugaguucagcuuaccaaccuuugauucccugaauaucacagccgcaucucuaaacgacgauggccucgacaaucacaccauccugcuuuauuacagcacugccgcuucaaguuuggccguuacacugaugauugcaauauucguggucuauauggugucccgugauaacgucagcuguucuaucugccucuga

SEQ ID NO: 154711 - RNA, 1758 nt, Artificial Sequence; identical to SEQ ID NO: 154656
  derived and/or modified CDS sequence (opt3) from hemagglutinin__InfluenzaB__AER27060

SEQ ID NO: 154712 - RNA, 1758 nt, Artificial Sequence
  derived and/or modified CDS sequence (opt3) from hemagglutinin__InfluenzaB__AET10061
augaaggccaucauugugcugcucauggucguuaccagcaacgcugacagaauaugcacaggcaucacuuccucuaauucaccccacgugguaaaaacggcaacccagggggaagugaacgucacaggagugauuccucuuacuaccacaccaaccaagagucauuucgccaaucugaaagguacugaaacaaggggcaaguuguguccgaaaugcuuaaacuguaccgaucuggacguugcgcuagggcggcccaagugcacgggaaauaucccuagcgcucgcguguccauucuccacgagguccgaccagugacuucuggcuguuuucccaucaugcaugaucguaccaagauaagacaacugccuaaccuucugagggguuacgaacacauccgguugucgacacauaauguaauuaacgccaaaaaugcaccagggggacccuauaagaucggcacuucaggcagcugcccuaacguuaccaaugggaacggauucuuugccacaauggcuugggcagugccaaagaaugacaagaaccgcaccgccacgaauagucucacuauugaggucccguacaucuguaaagaaggugaggaucagauaacaguguggggcuuccacuccgacaacgagacccagauggcuaagcuguauggggauucuaagccccagaaauuuacuagcuccgccaacggagugacaacccacuacgucucacaaauuggcgguuucccuaaucagacggaagacgggggacugccacagaguggcagaaucguuguggauuauaugguacagaaaagcggcaaaaccgggacaauuacuuaccaaaggggaauccucuuaccccagaagguguggugcgcgucuggucgguccaaagucaucaagggcucacugccucuuauuggggaggcagacuguuugcaugaaaaauauggaggccugaacaagagcaagccauacuacaccggugagcacgccaaagcuauagggaauugccccaucugggugaagacaccgcuaaaacucgccaacggcacuaaguaucgcccucccgcaaaacugcuuaaggagcgaggauuuuucggcgcuauugccggguuucuggaaggagguugggagggcaugaucgcgggguggcauggauacaccagucacggcgcccacgguguugcaguggcugccgauuugaagucuacacaggaagcuauaaauaaaauuaccaagaaccucaauucccugagcgaguuagaagucaaaaaccugcagagacucucgggggccauggacgagcuucauaaugagauccuggaauuggaugagaagguggacgaccuaagggcagauacuaucucuucccaaauugaacuggccguacuccugucaaacgagggcaucauuaauagugaagacgagcaccuucuggcuuuggagcggaaacucaagaagaugcugggaccaagcgcgguugaaauaggcaacggguguuucgagacgaaacauaagugcaaucagacaugcuuagaucguaucgcagccggaaccuuugacgcuggugaguucucccugccuacuuuugauucucuaaacauuaccgccgcaagccucaaugacgauggccuggacaaccacacaauccuuuuguauuacucaaccgccgcuaguucccuggccgugacucucaugaucgcaauuuucgucguguauauggucagccgcgauaacgugucuuguucaauaugccuguga

SEQ ID NO: 154713 - RNA, 1755 nt, Artificial Sequence
  derived and/or modified CDS sequence (opt3) from hemagglutinin__InfluenzaB__AET10062
augaaggccaucauugugcugcucauggucguuaccagcaacgcugacagaauaugcacaggcaucacuuccucuaauucaccccacgugguaaaaacggcaacccagggggaagugaacgucacaggagugauuccucuuacuaucaccccaacaaagaguuacuucgccaaucugaaagguaccaggacucggggcaaguuguguccggauugcuuaaacuguacagaccuggauguugcgcuagggcgccccaugugcgugggaaccacgccuagcgcuaaagccuccauucuccaugaaguccgaccagugacuucuggcuguuuucccaucaugcacgaccguaccaagauaagacaacugccuaaucuucugagggguuaugagaacauccgguugucgacacagaauguaauugaugcagaaaaggccccagggggacccuaccgccucggcacuucaggcagcugcccuaacgcuaccaguaaaaucggguucuuugcaacaauggccugggcuguuccaaaggacaauuauaaaaacgccaccaauccgcugacgguggagguccccuacauuuguaaggaaggagaggaucagaucacugugugggguuuccauuccgacaacaaaacacagaugaagaaucuguauggcgauucuaacccucaaaaguuuaccagcuccgcgaauggggugacuacacacuacgucucacagauaggagacuucccagaucagaccgaggacggcggucucccccagagugggagaauuguuguggauuauaugaugcaaaaaccuggaaagacgggcaccaucguauaccagaggggcguguuacugccacagaaagucuggugcgcaagcgggcggucuaaggugauuaaaggaucccuucccuugaucggugaagccgacugucugcaugagaaguacggcgggcuaaacaaaucaaagccguauuacacaggagaacacgcuaaggccaucggcaacugcccuauuuggguuaaaacuccccucaagcuggcaaaugguaccaaauaucgcccuccagcuaaacuucugaaggagcgaggguuuuucggcgccauagcgggauuuuuggagggcgggugggaaggaaugaucgccgguuggcacggcuacacaagccauggggcacacggaguggcugucgccgcugaccucaagaguacucaggaggccauuaacaagaucaccaaaaaucugaacucuuuauccgaacuggaggugaagaaucuccaaagacuuagcggcgcaauggaugaacugcauaacgagauauuggagcuagacgaaaaaguagaugaccugagggccgauacaauuucgucucagaucgagcucgcuguucugcuuuccaaugaagguaucauuaacucagaggacgaacaccuguuggcgcucgagcggaagcugaaaaagauguuagggcccagugcaguggauaucggcaauggauguuucgagaccaagcacaaaugcaaccagacuugccuggaccguauugccgcuggcacguuuaaugccggggaguucagccuaccaacauuugauucccucaacauaaccgcagccucucugaaugacgauggacuugacaaccauacuaucuugcuguauuacagcaccgcugccucaagucucgcagucacacugaugcuugcgauuuucaucguguauauggucucccgcgacaaugugagcuguucuaucugccuguga

SEQ ID NO: 154714 - RNA, 1755 nt, Artificial Sequence
  derived and/or modified CDS sequence (opt3) from hemagglutinin__InfluenzaB__AET10064
augaaggccaucauugugcugcucauggucguuaccagcaacgcugacagaauaugcacaggcaucacuuccucuaauucaccccacgugguaaaaacggcaacccagggggaagugaacgucacaggagugauuccucuuacuaccacaccaaccaagaguuacuucgccaaucugaaagguacuaggacacggggcaaguuguguccggauugcuuaaacuguaccgaccuggauguugcgcuagggcgccccaugugcgugggaacgacuccuagcgcuaaagccuccauccuccaugaaguccgaccagugaccucuggcuguuuucccauuaugcacgaccguacaaagaucagacaacugccuaaucuucugagggguuaugagaacauacgguugucgacucagaauguaaucgaugcagaaaaggccccagggggacccuaccgccucggcaccucaggcagcugcccuaacgcuacaaguaaaauuggguucuuugcaaccauggccugggcuguuccaaaggacaauuauaaaaacgccacgaauccgcugacuguggagguccccuacaucuguacagaaggagaggaucagauuaccaucugggguuuccauuccgacaacaagacucagaugaaaaaucuguauggcgauucuaacccucaaaaguuuacaagcuccgcgaauggggugaccacgcacuacgugucacagauaggagacuucccagaucagaccgaggacggcggucucccccagagugggagaauugucguugauuauaugaugcaaaagccuggaaaaacaggcacuaucguguaccagaggggcguauuacugccacagaagguguggugcgcaagcgggcggucuaaagucauuaagggaucccuucccuugaucggugaagccgacugucugcaugagaaauacggcgggcuaaacaagucaaaaccguauuacaccggagaacacgcuaaggccaucggcaacugcccuauuugggugaagacaccccucaaacuggcaaaugguacuaaguaucgcccuccagcuaaacuucugaaggagcgaggguuuuucggcgccauagcgggauuuuuggagggcgggugggaaggaaugaucgccgguuggcacggcuacaccagccauggggcacacggaguugcuguggccgcugaccucaaaaguacacaggaggccauuaacaagaucaccaagaaucugaacucuuuauccgaacuggaggucaaaaaucuccaaagacuuagcggcgcaauggaugaacugcauaacgagauauuggagcuagacgaaaagguggaugaccugagggccgauacuauuucgucucagaucgagcucgcuguacugcuuuccaaugaagguaucauuaacucagaggacgaacaccuguuggcgcucgagcggaaacugaagaaaauguuagggcccagugcaguugauaucggcaauggauguuucgagacgaagcacaagugcaaccagacaugccuggaccguauugccgcuggcaccuuuaaugccggggaguucagccuaccaacuuuugauucccucaacauaaccgcagccucucugaaugacgauggacuugacaaccauacaaucuugcuguauuacagcaccgcugccucaagucucgcagugacucugaugcuugcgauuuucaucgucuauauggugucccgcgacaaugucagcuguucuaucugccuguga

SEQ ID NO: 154715 - RNA, 1755 nt, Artificial Sequence
  derived and/or modified CDS sequence (opt3) from hemagglutinin__InfluenzaB__AET10065
augaaggccaucauugugcugcucauggucguuaccagcaacgcugacagaauaugcacaggcaucacuuccucuaauucaccccacgugguaaaaacggcaacccagggggaagugaacgucacaggagugauuccucuuacuaccacaccaaccaagaguuacuucgccaaucugaaagguacuaggacacggggcaaguuguguccggauugcuuaaacuguaccgaccuggauguugcgcuagggcgccccaugugcgugggaacgacuccuagcgcuaaagccuccauccuccaugaaguccgaccagugaccucuggcuguuuucccauuaugcacgaccguacaaagaucagacaacugccuaaucuucugagggguuaugagaacauacgguugucgacucagaauguaaucgaugcagaaaaggccccagggggacccuaccgccucggcaccucaggcagcugcccuaacgcuacaaguaaaauuggguucuuugcaaccauggccugggcuguuccaaaggacaauuauaaaaacgccacgaauccgcugacuguggagguccccuacaucuguaaggaaggagaggaucagauuacagugugggguuuccauuccgacaacaaaacccagaugaagaaucuguauggcgauucuaacccucaaaaguuuacuagcuccgcgaauggggugacaacccacuacgucucacagaucggagacuucccagaucagacggaggacggcggucucccccagagugggagaauaguuguggauuauaugaugcaaaaaccuggaaagaccggcacaauuguauaccagaggggcguguuacugccacagaaagucuggugcgcaagcgggcggucuaaggugaucaaaggaucccuucccuugauuggugaagccgacugucugcaugagaaguacggcgggcuaaacaaaucaaagccguauuacacuggagaacacgcuaaggccaucggcaacugcccuaucuggguuaaaaccccucucaagcuggcaaaugguacaaaauaucgcccacccgcuaaacuucugaaagagcgaggguuuuucggcgccauugcgggauuuuuggagggcgggugggaaggaaugauagccgguuggcacggcuacacuagccauggggcacacggaguggcugucgccgcugaccucaagaguacccaggaggccaucaacaagauuacaaagaaucugaacucuuuauccgaacuggaggugaagaaucuccaaagacuuagcggcgcaauggaugaacugcauaacgagaucuuggagcuagacgaaaaaguagaugaccugagggccgauaccauaucgucucagauugagcucgcuguucugcuuuccaaugaagguaucaucaacucagaggacgaacaccuguuggcgcucgagcggaagcugaaaaagauguuagggcccagugcaguggauauuggcaauggauguuucgagacuaagcacaaaugcaaccagacgugccuggaccguaucgccgcuggcacauuuaaugccggggaguucagccuaccaaccuuugauucccucaacauuacugcagccucucugaaugacgauggacuugacaaccauaccauauugcuguauuacagcacagcugccucaagucucgcagucacccugaugcuugcgaucuucauuguguauauggucucccgcgacaaugugagcuguucuaucugccuguga

SEQ ID NO: 154716 - RNA, 1755 nt, Artificial Sequence; identical to SEQ ID NO: 154715
  derived and/or modified CDS sequence (opt3) from hemagglutinin__InfluenzaB__AET10066

SEQ ID NO: 154717 - RNA, 1755 nt, Artificial Sequence
  derived and/or modified CDS sequence (opt3) from hemagglutinin__InfluenzaB__AET10067
augaaggccaucauugugcugcucauggucguuaccagcaacgcugacagaauaugcacaggcaucacuuccucuaauucaccccacgugguaaaaacggcaacccagggggaagugaacgucacaggagugauuccucuuacugccaccccaacaaagaguuacuucgcgaaucugaaagguaccaggacucggggcaaguuguguccggauugcuuaaacuguacagaccuggauguugcucuagggcgccccaugugcgugggaaccacgccuagcgccaaagcauccauccuccaugaaguccgaccagugacuucuggcuguuuucccauuaugcacgaccguaccaagaucagacaacugccuaaucuucugagggguuaugagaacauacgguugucgacacagaauguaaucgaugccgaaaaggcuccagggggacccuaccgccucggcacuucaggcagcugcccuaacgcaaccaguaaaauuggguucuuugccacaauggcuugggccguuccaaaggacaauuauaaaaacgcgaccaauccgcugacgguggagguccccuacaucuguaaggaaggagaggaucagauuacugugugggguuuccauuccgacaacaaaacacagaugaagaaucuguauggcgauucuaacccucaaaaguuuaccagcuccgcaaauggggugacuacacacuacgucucacagaucggagacuucccagaucagaccgaggacggcggucucccccagagugggagaauaguuguggauuauaugaugcaaaaaccuggaaagacgggcaccauuguauaccagaggggcguguuacugccacagaaagucuggugcgccagcgggcggucuaaggugaucaaaggaucccuucccuugauuggugaagcugacugucugcaugagaaguacggcgggcuaaacaaaucaaagccguauuacacaggagaacacgccaaggcaaucggcaacugcccuaucuggguuaaaacuccccucaagcuggcuaaugguaccaaauaucgcccuccagccaaacuucugaaggagcgaggguuuuucggcgcgauugccggauuuuuggagggcgggugggaaggaaugauagcagguuggcacggcuacacaagccauggggcucacggaguggccgucgcugccgaccucaagaguacucaggaggcaaucaacaagauuaccaaaaaucugaacucuuuauccgaacuggaggugaagaaucuccaaagacuuagcggcgccauggaugaacugcauaacgagaucuuggagcuagacgaaaaaguagaugaccugagggcugauacaauaucgucucagauugagcucgcgguucugcuuuccaaugaagguaucaucaacucagaggacgaacaccuguuggcacucgagcggaagcugaaaaagauguuagggcccagugccguggauauuggcaauggauguuucgagaccaagcacaaaugcaaccagacuugccuggaccguaucgcugccggcacguuuaaugcaggggaguucagccuaccaacauuugauucccucaacauuaccgccgcuucucugaaugacgauggacuugacaaccauacuauauugcuguauuacagcaccgccgcaucaagucucgcggucacacugaugcuugcuaucuucauuguguauauggucucccgcgacaaugugagcuguucuaucugccuguga

SEQ ID NO: 154718 - RNA, 1755 nt, Artificial Sequence
  derived and/or modified CDS sequence (opt3) from hemagglutinin__InfluenzaB__AET10068
augaaggccaucauugugcugcucauggucguuaccagcaacgcugacagaauaugcacaggcaucacuuccucuaauucaccccacgugguaaaaacggcaacccagggggaagugaacgucacaggagugauuccucuuacuaccgccccaacaaagaguuacuucgcgaaucugaaagguaccaggacucggggcaaguuguguccggauugcuuaaacuguacagaccuggauguugcucuagggcgccccaugugcgccggaaccacgccuagcgcaaaagccuccauccuccaugaagugcgaccagucacuucuggcuguuuucccauuaugcacgaccguaccaagaucagacaacugccuaaucuucugagggguuaugagaacauacgguugucgacacagaaugugaucgaugcugaaaaggcaccagggggacccuaccgccucggcacuucaggcagcugcccuaacgccaccaguaaaauuggguucuuugcuacaauggccugggcgguaccaaaggacaauuauaaaaacgcaaccaauccgcugacgguugaggugcccuacaucuguaaggaaggagaggaucagauuacugucugggguuuccauuccgacaacaaaacacagaugaagaaucuguauggcgauucuaacccucaaaaguuuaccagcuccgccaauggggugacuacacacuacgugucacagaucggagacuucccagaucagaccgaggacggcggucucccccagagugggagaauagucguugauuauaugaugcaaaaaccuggaaagacgggcaccauuguguaccagaggggcguauuacugccacagaaaguguggugcgcuagcgggcggucuaaggucaucaaaggaucccuucccuugauuggugaagccgacugucugcaugagaaguacggcgggcuaaacaaaucaaagccguauuacacaggagaacacgcaaaggcuaucggcaacugcccuaucugggugaaaacuccccucaagcuggccaaugguaccaaauaucgcccuccagcgaaacuucugaaggagcgaggguuuuucggcgccauugcaggauuuuuggagggcgggugggaaggaaugauagcugguuggcacggcuacacaagccauggggcccacggaguugcuguggccgcagaccucaagaguacucaggaggccaucaacaagauuaccaaaaaucugaacucuuuauccgaacuggaggucaagaaucuccaaagacuuagcggcgcuauggaugaacugcauaacgagaucuuggagcuagacgaaaaaguggaugaccugagggcggauacaauaucgucucagauugagcucgcaguacugcuuuccaaugaagguaucaucaacucagaggacgaacaccuguuggcccucgagcggaagcugaaaaagauguuagggcccagugcuguugauauuggcaauggauguuucgagaccaagcacaaaugcaaccagacuugccuggaccguaucgccgcaggcacguuuaaugccggggaguucagccuaccaacauuugauucccucaacauuaccgcugccucucugaaugacgauggacuugacaaccauacuauauugcuguauuacagcaccgcagcgucaagucucgcugugacacugaugcuugccaucuucauugucuauauggugucccgcgacaaugucagcuguucuaucugccuguga

SEQ ID NO: 154719 - RNA, 1755 nt, Artificial Sequence; identical to SEQ ID NO: 154715
  derived and/or modified CDS sequence (opt3) from hemagglutinin__InfluenzaB__AET10069

SEQ ID NO: 154720 - RNA, 1758 nt, Artificial Sequence
  derived and/or modified CDS sequence (opt3) from hemagglutinin__InfluenzaB__AET10070
augaaggccaucauugugcugcucauggucguuaccagcaacgcugacagaauaugcacaggcaucacuuccucuaauucaccccacgugguaaaaacggcaacccagggggaggugaaggucacaggagugauuccucuuacuaccacaccaaccaaaagucauuucgccaaccugaaggguacugaaacaaggggcaaauuguguccgaagugccccaauuguaccgauuuagacguugcgcuggggcggccuaagugcacgggaaaaaucccaagcgcucgcguguccauucuacacgagguccgacccgugacuucuggcuguuuuccuaucaugcaugaucguaccaagauaagacaacucccaaaccugcuuagggguuacgaacacauccggcugucgacacauaauguaauuaacgccgagaaugcacccgggggaccuuauaaaaucggcacuucaggcagcugcccaaacguuaccaaugggaacggauucuuugccacaauggcuugggcagugccgaagaaugacaaaaacaagaccgccacgaaucccuugacuauugaagucccuuacaucuguacagagggugaggaucagauaaccguguggggcuuccacagugacaacgaaacucagauggcuaagcucuauggggauuccaaaccacagaaguuuacaucuagcgccaauggagugaccacgcacuacgucucccaaauuggcgguuuccccaaccagaccgaggacgggggacugccucagucaggccgcaucguuguggauuauaugguacagaaaaguggcaagacagggacuauuaccuaccaaagaggaauccugcucccacagaaaguguggugcgcgagcgguaggucuaaggucaucaaaggcuccuuaccccugauuggggaagcagacugucuucaugagaaguauggaggcuugaacaagucaaaaccguacuacacaggugagcacgccaaggcuauagggaauugcccuaucugggugaaaacuccccugaagcuagccaacggcaccaaauaucggccuccagcaaagcuccugaaggaacgcggauuuuucggcgcuauugccggguuucuugagggagguugggaaggcaugaucgcgggguggcauggauacacaagccacggcgcccacgguguugcaguggcugccgaucugaaaaguacccaggaggcuauaaauaagauuacuaaaaaccuuaauucucucuccgaacuggaggucaagaacuuacagcgacugagcggggccauggacgagcuccauaaugaaauccuugagcuggaugaaaaaguggacgacuugagagcagauacgaucucgucucaaauugagcuagccguacugcucuccaacgaaggcaucauuaauucagaggacgagcaccuguuggcucuggaaaggaaguugaagaaaaugcucggacccagugcgguugagauaggcaacggguguuucgaaacaaagcauaaaugcaaucagaccugccuggaucggaucgcagccggaacuuuugacgcuggugaguucagcuuaccaaccuuugauucccugaacauuacagccgcaucucuaaaugacgauggccucgacaaccacaccauccugcuuuauuacagcacugccgcuucaaguuuggccgugacacugaugaucgcaauuuucgucguguauauggucucccgugauaaugugagcuguucuauaugccucuga

SEQ ID NO: 154721 - RNA, 1758 nt, Artificial Sequence; identical to SEQ ID NO: 154656
  derived and/or modified CDS sequence (opt3) from hemagglutinin__InfluenzaB__AET10071

SEQ ID NO: 154722 - RNA, 1758 nt, Artificial Sequence; identical to SEQ ID NO: 154656
  derived and/or modified CDS sequence (opt3) from hemagglutinin__InfluenzaB__AET10072

SEQ ID NO: 154723 - RNA, 1755 nt, Artificial Sequence
  derived and/or modified CDS sequence (opt3) from hemagglutinin__InfluenzaB__AET10073
augaaggccaucauugugcugcucauggucguuaccagcaacgcugacagaauaugcacaggcaucacuuccucuaauucaccccacgugguaaaaacggcaacccagggggaagugaacgucacaggagugauuccucuuacuaccacaccaaccaagaguuacuucgccaaucugaaagguacuaggacacggggcaaguuguguccggauugcuuaaacuguaccgaccuggauguugcgcuagggcgccccaugugcgugggaacgacuccuagcgcuaaagccuccauccuccaugaaguccgaccagugaccucuggcuguuuucccauuaugcacgaccguacaaagaucagacaacugccuaaucuucugagggguugcgagaacauacgguugucgacucagaauguaaucgaugcagaaaaggccccagggggacccuaucgccucggcaccucaggcagcuguccuaacgcuacaaguaaaauuggguucuuugcaaccauggccugggcuguuccaaaggacaauuacaaaaacgccacgaauccgcugacuguggagguccccuauaucugcaaggaaggagaggaucagauuacagugugggguuuccauuccgacaacaaaacccagaugaagaaucuguacggcgauucuaacccucaaaaguuuacuagcuccgcgaauggggugacaacccacuaugucucacagaucggagacuucccagaucagacggaggacggcggucucccccagagugggagaauaguuguggauuacaugaugcaaaaaccuggaaagaccggcacaauuguauaucagaggggcguguuacugccacagaaagucuggugugcaagcgggcggucuaaggugaucaaaggaucccuucccuugauuggugaagccgacugccugcaugagaaguacggcgggcuaaacaaaucaaagccguacuauacuggagaacacgcuaaggccaucggcaacuguccuaucuggguuaaaaccccucucaagcuggcaaaugguacaaaauaccgcccacccgcuaaacuucugaaagagcgaggguuuuucggcgccauugcgggauuuuuggagggcgggugggaaggaaugauagccgguuggcacggcuauacuagccauggggcacacggaguggcugucgccgcugaccucaagaguacccaggaggccaucaacaagauuacaaagaaucugaacucuuuauccgaacuggaggugaagaaucuccaaagacuuagcggcgcaauggaugaacugcauaacgagaucuuggagcuagacgaaaaaguagaugaccugagggccgauaccauaucgucucagauugagcucgcuguucugcuuuccaaugaagguaucaucaacucagaggacgaacaccuguuggcgcucgagcggaagcugaaaaagauguuagggcccagugcaguggauauuggcaauggaugcuucgagacuaagcacaaaugcaaccagacgugucuggaccguaucgccgcuggcacauuuaaugccggggaguucagccuaccaaccuuugauucccucaacauuacugcagccucucugaaugacgauggacuugacaaccauaccauauugcuguacuauagcacagcugccucaagucucgcagucacccugaugcuugcgaucuucauuguguacauggucucccgcgacaaugugagcugcucuaucugucuguga

SEQ ID NO: 154724 - RNA, 1758 nt, Artificial Sequence
  derived and/or modified CDS sequence (opt3) from hemagglutinin__InfluenzaB__AET10074
augaaggccaucauugugcugcucauggucguuaccagcaacgcugacagaauaugcacaggcaucacuuccucuaauucaccccacgugguaaaaacggcaacccagggggaggugaacgucacaggagugauuccucuuacuaccacaccaaccaggagucauuucgccaaucugaaggguacugaaacacggggcaaauuguguccgaagugccccaacuguaccgauuuagacguugcgcuggggcgcccuaaaugcacgggaaagaucccaagcgcucgaguguccauucuacacgagguccgucccgugacuucuggcuguuuuccuaucaugcaugauagaaccaagauaaggcaacucccaaaucugcuucgggguuacgaacacauccgccugucgacacauaacguaauuaaugccgagaacgcacccgggggaccuuauaaaaucggcacuucaggcagcugcccaaauguuaccaacgggaauggauucuuugccacaauggcuugggcagugccgaagaacgacaaaaauaagaccgccacgaaccccuugacuauugaagucccuuacaucuguacagagggugaggaucagauaaccguguggggcuuccacagugacaaugaaacucagauggcuaaacucuauggggauuccaagccacagaaguuuacaucuagcgccaacggagugaccacgcacuacgucucccaaauuggcgguuuccccaaccagaccgaggacgggggacugccucagucaggcagaaucguuguggauuauaugguacagaaaaguggcaggacagggacuauuaccuaccaacggggaauccugcucccacagaagguguggugcgcgagcggucgcucuaaagucaucaagggcuccuuaccccugauuggggaagcagacugucuucaugagaaauauggaggcuugaauaagucaaaaccguacuacacaggugagcacgccaaggcuauagggaacugcccuaucugggugaagacuccccugaaacuagccaauggcaccaaguaucgaccuccagcaaaacuccugaaggaaagaggauuuuucggcgcuauugccggguuucuugagggagguugggaaggcaugaucgcgggguggcauggauacacaagccacggcgcccacgguguugcaguggcugccgaucugaaaaguacccaggaggcuauaaacaagauuacuaagaauuugaacucucucuccgaacuggaggucaaaaauuuacagaggcugagcggggccauggacgagcuccauaacgaaauccuugagcuggaugaaaagguggacgacuugcgggcagauacgaucucgucucaaauugagcuagccguacugcucuccaaugaaggcaucauuaacucagaggacgagcaucugcuugcucuggaacguaaauugaagaaaaugcucggacccagugcgguugagauaggcaauggguguuucgaaacaaagcacaagugcaaccagaccugccuggaucgcaucgcagccggaacuuuugacgcuggugaguucagcuuaccaaccuuugauucccugaauauuacagccgcaucucuagacgaugacggccucgauaaccacaccauccugcuuuauuacagcacugccgcuucaaguuuggccgugacacugaugaucgcaauuuucgucguguauauggucuccagagacaaugugagcuguucuauaugccucuga

SEQ ID NO: 154725 - RNA, 1758 nt, Artificial Sequence; identical to SEQ ID NO: 154656
  derived and/or modified CDS sequence (opt3) from hemagglutinin__InfluenzaB__AET10076

SEQ ID NO: 154726 - RNA, 1758 nt, Artificial Sequence; identical to SEQ ID NO: 154656
  derived and/or modified CDS sequence (opt3) from hemagglutinin__InfluenzaB__AET10077

SEQ ID NO: 154727 - RNA, 1758 nt, Artificial Sequence
  derived and/or modified CDS sequence (opt3) from hemagglutinin__InfluenzaB__AET10078
augaaggccaucauugugcugcucauggucguuaccagcaacgcugacagaauaugcacaggcaucacuuccucuaauucaccccacgugguaaaaacggcaacccagggggaggugaacgucacaggagugauuccucuuacuaccacaccaaccaagagucauuucgccaaucugaaagguacugaaacaaggggcaaguuguguccgaaaugcuuaaacuguaccgaucuggacguugcgcuagggcggcccaagugcacgggaaagaucccuagcgcucgcguguccguccuccacgaggugcgaccaguaacuucuggcuguuuucccauuaugcaugaucguaccaaaaucagacaacugccuaaucuucugagggguuacgaacacauacgguugucgacacauaacguuaucaaugccgagaacgcaccagggggacccuauaagauuggcacuucaggcagcugcccuaaugugaccaacgggaauggauucuuugccacaauggcuugggcagucccgaaaaacgacaagaauaaaaccgccacgaacccacucacuaucgaagugcccuacauuuguacagagggugaggaucagaucaccguguggggcuuccacagugacaaugaaacucagauggcuaagcuguauggggauuccaagccucagaaauuuacaucuagcgccaacggagucaccacgcacuacguuucccaaauaggcgguuucccaaaccagaccgaggacgggggacugccccagucaggccgcauugugguagauuauauggugcagaagaguggcaaaacagggacuaucaccuaccaaagagguauucucuuaccucagaaggucuggugcgcgagcggaaggucuaaagugaucaagggcucccugccacuuaucggggaagcagacuguuugcaugagaaauauggaggccugaauaagucaaagcccuacuacacaggugagcacgccaaagcuauugggaacugcccgauauggguuaagacuccucuaaaacucgccaauggcaccaaguaucggcccccagcaaaacugcuuaaggaacgcggauuuuucggcgcuaucgccggguuucuggagggagguugggaaggcaugauugcgggguggcauggauacacaagccacggcgcccacgguguggcagucgcugccgauuugaagaguacccaggaggcuaucaacaaaauaacuaagaaucucaacucucuguccgaauuagaggugaaaaaucugcagcgacucagcggggccauggacgagcuucauaacgaaauucuggaguuggaugaaaagguagacgaccuaagagcagauacgaucucgucucaaaucgagcuggccguucuccuguccaaugaaggcauuaucaacucagaggacgagcaccuucuggcuuuggaaaggaaacucaagaagaugcugggaccuagugcgguggagauuggcaauggguguuucgaaacaaaacauaagugcaaccagaccugcuuagaucggauagcagccggaacuuuuaaugcuggugaguucagccugcccaccuuugacucccuaaacaucacagccgcaucucucaaugaagauggccuggacaaccacgccauucuuuuguauuacagcaccgcugccucaagucuggcagucacucucaugaucgcgaucuucguggucuauauggugucccgugauaacguuagcuguucuauuugccuguga

SEQ ID NO: 154728 - RNA, 1758 nt, Artificial Sequence
  derived and/or modified CDS sequence (opt3) from hemagglutinin__InfluenzaB__AET10079
augaaggccaucauugugcugcucauggucguuaccagcaacgcugacggcauaugcacagggaucacuuccucuaauucaccccacgugguaaaaacggcaacccagggagaagugaacgucacaggugugauuccucuuacuaccacaccaaccaagagucauuucgccaaucugaaaggcacugaaacaagagggaaguuguguccgaaaugccccaacuguaccgauuuagacguugcgcugggaaggccuaagugcacgggcaagaucccaagcgcucggguguccauucuacacgagguccgccccgugacuucugguuguuuuccuaucaugcaugaucgaaccaaaauacgucaacucccaaaucugcuuagaggguacgaacacaucaggcugucgacacauaacguaauuaaugccgagaacgcacccggaggcccuuauaagaucggcacuucagggagcugcccaaauguuaccaacggaaaugguuucuuuacaaccauggccugggcugugccgaaaaacgacaagaauaaaacggcaacuaaccccuugacaauugaagucccuuacaucuguaccgagggcgaggaucagauaacuguguggggguuccacagugacaaugaaacacagauggccaagcucuauggagauuccaagccacagaaauuuaccucuagcgcuaacggcgugacgacccacuacgucucccaaauugguggguuccccaaccagacagaggacggaggccugccucagucaggccggaucguuguggauuauaugguacagaagagugggaaaacuggaaccauuacauaccaacgcgguauccugcucccacagaagguguggugcgccagcggcagaucuaaagucaucaagggguccuuaccccugauuggagaagcggacugucuucaugagaaauauggcgguuugaauaagucaaagccguacuacacuggggagcacgcaaaagccauaggcaacugcccuaucugggugaagaccccacugaaacuagcuaauggaacaaaguauaggcccccugccaaacuccugaaggaacggggcuuuuucggggcaauugcuggauuucuugaggguggcugggaagggaugaucgccggauggcauggcuacaccagccacggugcgcacgggguugccguggcagcugaucugaagaguacucaggaggccauaaacaaaauuacgaagaauuugaacucucucuccgaacuggaggucgagaauuuacagcgccugagcggcgcuauggacgaacuccauaacgagauccuugaacuggaugagaaaguggacgacuugcgagccgauacaaucucgucucaaauugaacuagcaguacugcucuccaaugagggaaucauuaacucagaggacgaacaucugcuugcccuggagagaaaguugaaaaagaugcucggccccagugcuguugaaauagggaauggauguuucgagaccaagcacaaaugcaaccagacuugccuggauaggaucgcggcagguaccuuugacgccggcgaguucagcuuaccaacauuugauucccugaauauuaccgcugccucucuaaacgacgaugggcucgacaaucacacuauccugcuuuauuacagcacagcagccucaaguuuggcugugacgcugaugaucgccauuuucgucguguauauggucucccgggauaacgugagcuguucuauaugccucuga

SEQ ID NO: 154729 - RNA, 1758 nt, Artificial Sequence; identical to SEQ ID NO: 154656
  derived and/or modified CDS sequence (opt3) from hemagglutinin__InfluenzaB__AET10080

SEQ ID NO: 154730 - RNA, 1758 nt, Artificial Sequence; identical to SEQ ID NO: 154656
  derived and/or modified CDS sequence (opt3) from hemagglutinin__InfluenzaB__AET10081

SEQ ID NO: 154731 - RNA, 1758 nt, Artificial Sequence
  derived and/or modified CDS sequence (opt3) from hemagglutinin__InfluenzaB__AET10082
augaaggccaucauugugcugcucauggucguuaccagcaacgcugacagaauaugcacaggcaucacuuccucuaauucaccccacauugugaaaacggcaacccagggggagguaaacgugacaggagucaucccucuuacuaccacaccaaccaagagucauuucgccaaucugaaagguacugaaacaaggggcaaguuguguccgaaaugcuuaaacuguaccgaucuggacguggcgcuagggcggcccaagugcacgggaaagauuccuagcgcucgcguuuccauccuccacgaggugcgaccagucacuucuggcuguuuucccauaaugcaugaucguaccaaaaucagacaacugccuaaucuucugagggguuacgaacacauucgguugucgacacauaacgugaucaaugccgagaacgcaccagggggacccuauaagauuggcacuucaggcagcugcccuaauaucaccaacgggaauggauucuuugccacaauggcuugggcaguaccgaaaaacgacaagaauaaaaccgccacgaacccacucacuauagaaguucccuacauuuguacagagggugaggaucagaucaccguguggggcuuccacagugacaaugaaacucagauggcuaagcuguauggggauuccaagccucagaaauuuacaucuagcgccaacggagucaccacgcacuacgugucccaaauuggcgguuucccaaaccagaccgaggacgggggacugccccagucaggccgcaucguggucgauuauaugguucagaagaguggcaaaacagggacuaucaccuaccaaagagguauucucuuaccucagaagguguggugcgcgagcggaaggucuaaaguaauaaagggcucccugccacuuaucggggaagcagacuguuugcaugagaaauauggaggccugaauaagucaaagcccuacuacacaggugagcacgccaaagcuauugggaacugcccgaucugggugaagacuccucuaaaacucgccaauggcaccaaguaucggcccccagcaaaacugcuuaaggaacgcggauuuuucggcgcuauagccggguuucuggagggagguugggaaggcaugauugcgggguggcauggauacacaagccacggcgcccacggugucgcaguggcugccgauuugaagaguacccaggaggcuaucaacaaaaucacuaagaaucucaacucucuguccgaauuagagguuaaaaaucugcagcgacucagcggggccauggacgagcuucauaacgaaauucuggaguuggaugaaaagguggacgaccuaagagcagauacgaucucgucucaaauugagcuggccguccuccuguccaaugaaggcauaaucaacucagaggacgagcaccuucuggcuuuggaaaggaaacucaagaagaugcugggaccuagugcgguggagauuggcaauggguguuucgaaacaaaacauaagugcaaccagaccugcuuagaucggaucgcagccggaacuuuugacgcuggugaguucagccugcccaccuuugauucccuaaauaucacagccgcaucucucaacgacgauggccuggacaaucacaccauucuuuuguauuacagcacugccgcuucaagucuggccguaacacucaugauagcaaucuucguuguguauauggucucccgugauaacgugagcuguucuauuugccuguga

SEQ ID NO: 154732 - RNA, 1758 nt, Artificial Sequence
  derived and/or modified CDS sequence (opt3) from hemagglutinin__InfluenzaB__AET10083
augaaggccaucauugugcugcucauggucguuaccagcaacgcugacagaauaugcacaggcaucacuuccucuaauucaccccacgugguaaaaacggcaacccagggggaggugaacgucacaggagugauuccucuuacuaccacaccaaccaagagucauuucgccaaucugaaagguacugaaacaaggggcaaguuguguccgaaaugcuuaaacuguaccgaucuggacguugcgcuagggcggcccaagugcacgggaaaggugccuagcgcucgcgucuccauccuccacgaggugcgaccaguaacuucuggcuguuuucccauuaugcaugaucguaccaaaaucagacaacugccuaaucuucugagggguuacgaacacauacgguugucgacacauaacguuaucaaugccgagaacgcaccagggggacccuauaagauuggcacuucaggcagcugcccuaauaucaccaacgggaauggauucuuugccacaauggcuugggcagugccgaaaaacgacaagaauaaaaccgccacgaacccacucacuauugaaguccccuacaucuguacagagggugaggaucagauaaccguguggggcuuccacagugacaaugaaacucagauggcuaagcuguauggggauuccaagccucagaaauuuacaucuagcgccaacggagugaccacgcacuacgucucccaaauuggcgguuucccaaaccagaccgaggacgggggacugccccagucaggccgcaucguuguggauuauaugguacagaagaguggcaaaacagggacuauuaccuaccaaagaggaauccucuuaccucagaagguguggugcgcgagcgguaggucuaaagucaucaagggcucccugccacuuauuggggaagcagacuguuugcaugagaaauauggaggccugaauaagucaaagcccuacuacacaggugagcacgccaaagcuauagggaacugcccgaucugggugaagacuccucuaaaacucgccaauggcaccaaguaucggcccccagcaaaacugcuuaaggaacgcggauuuuucggcgcuauugccggguuucuggagggagguugggaaggcaugaucgcgggguggcauggauacacaagccacggcgcccacgguguugcaguggcugccgauuugaagaguacccaggaggcuauaaacaaaauuacuaagaaucucaacucucuguccgaauuagaggucaaaaaucugcagcgacucagcggggccauggacgagcuucauaacgaaauccuggaguuggaugaaaagguggacgaccuaagagcagauacgaucucgucucaaauugagcuggccguacuccuguccaaugaaggcaucauuaacucagaggacgagcaccuucuggcuuuggaaaggaaacucaagaagaugcugggaccuagugcgguugagauaggcaauggguguuucgaaacaaaacauaagugcaaccagaccugcuuagaucggaucgcagccggaacuuuugacgcuggugaguucagccugcccaccuuugauucccuaaauauuacagccgcaucucucaacgacgauggccuggacaaucacaccauccuuuuguauuacagcacugccgcuucaagucuggccgugacacucaugaucgcaauuuucgucguguauauggucucccgugauaacgugagcuguucuauaugccuguga

SEQ ID NO: 154733 - RNA, 1758 nt, Artificial Sequence; identical to SEQ ID NO: 154693
  derived and/or modified CDS sequence (opt3) from hemagglutinin__InfluenzaB__AET10084

SEQ ID NO: 154734 - RNA, 1758 nt, Artificial Sequence; identical to SEQ ID NO: 154656
  derived and/or modified CDS sequence (opt3) from hemagglutinin__InfluenzaB__AET10085

SEQ ID NO: 154735 - RNA, 1758 nt, Artificial Sequence; identical to SEQ ID NO: 154696
  derived and/or modified CDS sequence (opt3) from hemagglutinin__InfluenzaB__AET43124

SEQ ID NO: 154736 - RNA, 1758 nt, Artificial Sequence; identical to SEQ ID NO: 154696
  derived and/or modified CDS sequence (opt3) from hemagglutinin__InfluenzaB__AET43135

SEQ ID NO: 154737 - RNA, 1758 nt, Artificial Sequence; identical to SEQ ID NO: 154696
  derived and/or modified CDS sequence (opt3) from hemagglutinin__InfluenzaB__AET43146

SEQ ID NO: 154738 - RNA, 1758 nt, Artificial Sequence; identical to SEQ ID NO: 154696
  derived and/or modified CDS sequence (opt3) from hemagglutinin__InfluenzaB__AET43157

SEQ ID NO: 154739 - RNA, 1758 nt, Artificial Sequence
  derived and/or modified CDS sequence (opt3) from hemagglutinin__InfluenzaB__AET43168
augaaggccaucauugugcugcucauggucguuaccagcaacgcugacagaauaugcacaggcaucacuuccucuaauucaccccacgugguaaaaacggcaacccagggggaggugaacgucacaggagugauuccucuuacuaccacaccaaccaagagucauuucgccaaucugaaagguacugaaacaaggggcaaguuguguccgaaaugcuuaaacuguaccgaucuggacguuacgcuagggcggcccaagugcacuggaaagaucccuagcgcgcgcguguccauucuccacgagguccgaccagugaccucuggcuguuuucccaucaugcaugaucguacaaaaauaagacaacugccuaaucuucugagggguuacgaacacauccgguugucgacucauaacguaauuaaugcugagaacgccccagggggacccuauaagaucggcaccucaggcagcugcccuaauguuacaaacgggaauggauucuuugcaaccauggccugggcugugccgaaaaacgacaagaauaaaacggcaacuaacccacucacaauugaaguccccuacaucuguaccgagggugaggaucagauaacuguguggggcuuccacagugacaaugaaacacagauggccaagcuguauggggauuccaagccucagaaauuuaccucuagcgcuaacggagugacgacccacuacgucucccaaauuggcgguuucccaaaccagacagaggacgggggacugccccagucaggccgcaucguuguggauuauaugguacagaagaguggcaaaacugggaccauuacauaccaaagaggaauccucuuaccucagaagguguggugcgccagcgguaggucuaaagucaucaagggcucccugccacuuauuggggaagcggacuguuugcaugagaaauauggaggccugaauaagucaaagcccuacuacacuggugagcacgcaaaagccauagggaacugcccgaucugggugaagaccccucuaaaacucgcuaauggcacaaaguaucggcccccagccaaacugcuuaaggaacgcggauuuuucggcgcaauugcuggguuucuggagggagguugggaaggcaugaucgccggguggcauggauacaccagccacggcgcgcacgguguugccguggcagcugauuugaagaguacucaggaggccauaaacaaaauuacgaagaaucucaacucucuguccgaauuagaggucaaaaaucugcagcgacucagcggggcuauggacgagcuucauaacgaaauccuggaguuggaugaaaagguggacgaccuaagagccgauacaaucucgucucaaauugagcuggcaguacuccuguccaaugaaggcaucauuaacucagaggacgagcaccuucuggccuuggaaaggaaacucaagaagaugcugggaccuagugcuguugagauaggcaauggguguuucgaaaccaaacauaagugcaaccagacuugcuuagaucggaucgcggcaggaaccuuugacgccggugaguucagccugcccacauuugauucccuaaauauuaccgcugccucucucaacgacgauggccuggacaaucacacuauccuuuuguauuacagcacagcagccucaagucuggcugugacgcucaugaucgccauuuucgucguguauauggucucccgugauaacgugagcuguucuauaugccuguga

SEQ ID NO: 154740 - RNA, 1758 nt, Artificial Sequence; identical to SEQ ID NO: 154696
  derived and/or modified CDS sequence (opt3) from hemagglutinin__InfluenzaB__AET43179

SEQ ID NO: 154741 - RNA, 1758 nt, Artificial Sequence; identical to SEQ ID NO: 154696
  derived and/or modified CDS sequence (opt3) from hemagglutinin__InfluenzaB__AET43190

SEQ ID NO: 154742 - RNA, 1758 nt, Artificial Sequence
  derived and/or modified CDS sequence (opt3) from hemagglutinin__InfluenzaB__AET43201
augaaggccaucauugugcugcucauggucguuaccagcaacgcugacagaauaugcacaggcaucacuuccucuaauucaccccacgugguaaaaacggcaacccagggggaagugaacgucacaggagugauuccucuuacuaccacaccaaccaagagucauuucgccaaucugaaagguacugaaacaaggggcaaguuguguccgaaaugcuuaaacuguaccgaucuggacguugcgcuagggcggcccaagugcacgggaaagaucccuagcgcucgcguguccauucuccacgagguccgaccagugacuucuggcuguuuucccaucaugcaugaucguaccaaaauaagacaacugccuaaucuucugagggguuacgaacacauccgguugucgacacauaacguaauuaaugccgggaacgcaccaggaggccccuauaagaucggcacuucagggagcugcccuaauguuaccaacggaaaugguuucuuugccacaauggcuugggcagugccgaaaaacgacaagaauaaaaccgccacgaacccacucacuauugagguccccuacaucuguacagaaggcgaggaucagauaaccguguggggguuccacagugacaaugagacucagauggcuaagcuguauggagauuccaagccucagaaauuuacaucuagcgccaacggcgugaccacgcacuacgucucccaaauugguggguucccaaaccagaccgaagacggaggccugccccagucaggccgcaucguuguggauuauaugguacagaagagugggaaaacaggaacuauuaccuaccaaagagguauccucuuaccucagaagguguggugcgcgagcggcaggucuaaagucaucaaggggucccugccacuuauuggagaggcagacuguuugcaugaaaaauauggcggucugaauaagucaaagcccuacuacacaggggagcacgccaaagcuauaggcaacugcccgaucugggugaagacuccucuaaaacucgccaauggaaccaaguaucggcccccagcaaaacugcuuaaggagcgcggcuuuuucggggcuauugccggauuucuggaagguggcugggaggggaugaucgcgggauggcauggcuacacaagccacggugcccacgggguugcaguggcugccgauuugaagaguacccaggaagcuauaaacaaaauuacuaagaaucucaacucucuguccgaguuagaagucaaaaaucugcagcgacucagcggcgccauggacgagcuucauaacgagauccuggaauuggaugagaagguggacgaccuaagagcagauacgaucucgucucaaauugaacuggccguacuccuguccaaugagggaaucauuaacucagaagacgagcaccuucuggcuuuggagaggaaacucaagaagaugcugggcccuagugcgguugaaauagggaauggauguuucgagacaaaacauaagugcaaccagaccugcuuagaucggaucgcagccgguacuuuugacgcuggcgaguucagccugcccaccuuugauucccuaaauauuacagccgcaucucucaacgacgaugggcuggacaaucacaccauccuuuuguauuacagcacugccgcuucaagucuggccgugacacucaugaucgcaauuuucgucguguauauggucucccgugauaacgugagcuguucuauaugccuguga

SEQ ID NO: 154743 - RNA, 1758 nt, Artificial Sequence; identical to SEQ ID NO: 154696
  derived and/or modified CDS sequence (opt3) from hemagglutinin__InfluenzaB__AET43212

SEQ ID NO: 154744 - RNA, 1758 nt, Artificial Sequence; identical to SEQ ID NO: 154696
  derived and/or modified CDS sequence (opt3) from hemagglutinin__InfluenzaB__AET43223

SEQ ID NO: 154745 - RNA, 1758 nt, Artificial Sequence; identical to SEQ ID NO: 154742
  derived and/or modified CDS sequence (opt3) from hemagglutinin__InfluenzaB__AET50943

SEQ ID NO: 154746 - RNA, 1758 nt, Artificial Sequence; identical to SEQ ID NO: 154696
  derived and/or modified CDS sequence (opt3) from hemagglutinin__InfluenzaB__AET50954

SEQ ID NO: 154747 - RNA, 1758 nt, Artificial Sequence; identical to SEQ ID NO: 154696
  derived and/or modified CDS sequence (opt3) from hemagglutinin__InfluenzaB__AET50965

SEQ ID NO: 154748 - RNA, 1758 nt, Artificial Sequence; identical to SEQ ID NO: 154696
  derived and/or modified CDS sequence (opt3) from hemagglutinin__InfluenzaB__AET50976

SEQ ID NO: 154749 - RNA, 1758 nt, Artificial Sequence; identical to SEQ ID NO: 154696
  derived and/or modified CDS sequence (opt3) from hemagglutinin__InfluenzaB__AET74255

SEQ ID NO: 154750 - RNA, 1758 nt, Artificial Sequence; identical to SEQ ID NO: 154742
  derived and/or modified CDS sequence (opt3) from hemagglutinin__InfluenzaB__AET74277

SEQ ID NO: 154751 - RNA, 1758 nt, Artificial Sequence; identical to SEQ ID NO: 154696
  derived and/or modified CDS sequence (opt3) from hemagglutinin__InfluenzaB__AET74288

SEQ ID NO: 154752 - RNA, 1758 nt, Artificial Sequence
  derived and/or modified CDS sequence (opt3) from hemagglutinin__InfluenzaB__AET74299
augaaggccaucauugugcugcucauggucguuaccagcaacgcugacagaauaugcacaggcaucacuuccucuaauucaccccacgugguaaaaacggcaacccagggggaggugaacgucacaggagugauuccucuuacuaccacaccaaccaagagucauuucgccaaucugaaagguacugaaacaaggggcaaguuguguccgaaaugcuuaaacuguaccgaucuggacguuacgcuagggcggcccaagugcacuggaaagaucccuagcgcgcgcguguccauucuccacgagguccgaccagugaccucuggcuguuuucccaucaugcaugaucguacaaaaauaagacaacugccuaaucuucugagggguuacgaacacauccgguugucgacucauaacguaauuaaugcugagaacgccccagggggacccuauaagaucggcaccucaggcagcugcccuaauguuacaaacgggaauggauucuuugcaaccauggccugggcugugccgaaaaacgacaagaauaaaacggcaacuaacccacucacaauugaaguccccuacaucuguaccgagggugaggaucagauaacuguguggggcuuccacagugacaaugaaacacagauggccaagcuguauggggauuccaagccucagaaauuuaccucuagcgcuaacggagugacgacccacuacgucucccaaauuggcgguuucccaaaccagacagaggacgggggacugccccagucaggccgcaucguuguggauuauaugguacagaagaguggcaaaacugggaccauuacauaccaaagaggaauccucuuaccucagaagguguggugcgccagcgguaggucuaaagucaucaagggcucccugccacuuauuggggaagcggacuguuugcaugagaaauauggaggccugaauaagucaaagcccuacuacacuggugagcacgcaaaagccauagggaacugcccgaucugggugaagaccccucuaaaacucgcuaauggcacaaaguaucggcccccagccaaacugcuuaaggaacgcggauuuuucggcgcaauugcuggguuucuggagggagguugggaaggcaugaucgccggguggcauggauacaccagccacggcgcgcacgguguugccguggcagcugauuugaagaguacucaggaggccauaaacaaaauuacgaauaaccucaauucucuguccgaauuagaggucaagaaccugcagcgacucagcggggcuauggacgagcuucauaaugaaauccuggaguuggaugaaaaaguggacgaccuaagagccgauacaaucucgucucaaauugagcuggcaguacuccuguccaacgaaggcaucauuaauucagaggacgagcaccuucuggccuuggaaaggaagcucaaaaagaugcugggaccuagugcuguugagauaggcaacggguguuucgaaaccaagcauaaaugcaaucagacuugcuuagaucggaucgcggcaggaaccuuugacgccggugaguucagccugcccacauuugauucccuaaacauuaccgcugccucucucaaugacgauggccuggacaaccacacuauccuuuuguauuacagcacagcagccucaagucuggcugugacgcucaugaucgccauuuucgucguguauauggucucccgugauaacgugagcuguucuauaugccuguga

SEQ ID NO: 154753 - RNA, 1758 nt, Artificial Sequence; identical to SEQ ID NO: 154696
  derived and/or modified CDS sequence (opt3) from hemagglutinin__InfluenzaB__AET74329

SEQ ID NO: 154754 - RNA, 1758 nt, Artificial Sequence; identical to SEQ ID NO: 154696
  derived and/or modified CDS sequence (opt3) from hemagglutinin__InfluenzaB__AET74340

SEQ ID NO: 154755 - RNA, 1758 nt, Artificial Sequence; identical to SEQ ID NO: 154696
  derived and/or modified CDS sequence (opt3) from hemagglutinin__InfluenzaB__AET74351

SEQ ID NO: 154756 - RNA, 1758 nt, Artificial Sequence; identical to SEQ ID NO: 154693
  derived and/or modified CDS sequence (opt3) from hemagglutinin__InfluenzaB__AEY69077

SEQ ID NO: 154757 - RNA, 1758 nt, Artificial Sequence; identical to SEQ ID NO: 154693
  derived and/or modified CDS sequence (opt3) from hemagglutinin__InfluenzaB__AFB77676

SEQ ID NO: 154758 - RNA, 1758 nt, Artificial Sequence
  derived and/or modified CDS sequence (opt3) from hemagglutinin__InfluenzaB__AFB77677
augaaggccaucauugugcugcucauggucguuaccagcaacgcugacagaauaugcacaggcaucacuuccucuaauucaccccacgugguaaaaacggcaacccagggggaggugaacgucacaggagugauuccucuuacuaccacaccaaccaagagucauuucgccaaucugaaagguacugaaacaaggggcaaguuguguccgaaaugcuuuaacuguaccgauuuagacguugcgcuggggcggcccaagugcacgggaaagaucccuagcgcucgcguguccauucuacacgagguccgaccagugacuucuggcuguuuccccaucaugcaugaucguaccaaaauaagacaacucccuaaucugcuuagggguuacgaacacauccggcugucgacacauaacguaauuaaugccgagaacgcaccagggggacccuauaagaucggcacuucaggcagcugcccuaauguuaccaacgggaauggauuuuucgccacaauggcuugggcagugccgaaaaacgacaagaauaaaaccgccacgaacccauugacuauugaaguccccuacaucuguacagagggugaggaucagauaaccguguggggcuuucacagugacaaugaaacucagauggcuaagcucuauggggauuccaagccucagaaauucacaucuagcgccaacggagugaccacgcacuacgucucccaaauuggcgguuuuccaaaccagaccgaggacgggggacugccccagucaggccgcaucguuguggauuauaugguacagaagaguggcaaaacagggacuauuaccuaccaaagaggaauccugcucccucagaagguguggugcgcgagcgguaggucuaaagucaucaagggcuccuuaccacugauuggggaagcagacugucuucaugagaaauauggaggcuugaauaagucaaagcccuacuacacaggugagcacgccaaagcuauagggaacugcccgaucugggugaagacuccucugaaacuagccaauggcaccaaguaucggcccccagcaaaacuccugaaggaacgcggauucuuuggcgcuauugccggguuccuugagggagguugggaaggcaugaucgcgggguggcauggauacacaagccacggcgcccacgguguugcaguggcugccgaucugaagaguacccaggaggcuauaaacaaaauuacuaagaauuugaacucucucuccgaacuggaggucaaaaauuuacagcgacugagcggggccauggacgagcuccauaacgaaauccuugagcuggaugaaaagguggacgacuugagagcagauacgaucucgucucaaauugagcuagccguacugcucuccaaugaaggcaucauuaacucagaggacgagcaucugcuugcucuggaaaggaaauugaagaagaugcucggaccuagugcgguugagauaggcaauggguguuuugaaacaaaacacaagugcaaccagaccugccuggaucggaucgcagccggaacuuucgacgcuggugaguuuagcuuacccaccuucgauucccugaauauuacagccgcaucucuaaacgacgauggccucgacaaucacaccauccugcuuuauuacagcacugccgcuucaaguuuggccgugacacugaugaucgcaauuuucgucguguauauggucucccgugauaacgugagcuguucuauaugccucuga

SEQ ID NO: 154759 - RNA, 1758 nt, Artificial Sequence; identical to SEQ ID NO: 154693
  derived and/or modified CDS sequence (opt3) from hemagglutinin__InfluenzaB__AFB77678

SEQ ID NO: 154760 - RNA, 1758 nt, Artificial Sequence; identical to SEQ ID NO: 154693
  derived and/or modified CDS sequence (opt3) from hemagglutinin__InfluenzaB__AFB77679

SEQ ID NO: 154761 - RNA, 1758 nt, Artificial Sequence
  derived and/or modified CDS sequence (opt3) from hemagglutinin__InfluenzaB__AFB77680
augaaggccaucauugugcugcucauggucguuaccagcaacgcugacagaauaugcacaggcaucacuuccucuaauucaccccacgugguaaaaacggcaacccagggggaggugaacgucacaggagugauuccucuuacuaccacaccaaccaagagucauuucgccaaucugaaagguacugaaacaaggggcaaguuguguccgaaaugcuuaaacuguaccgaucuggacguugcgcuagggcggcccaagugcacgggaaagaucccuagcgcucgcguguccauucuccacgagguccgaccaaucacuucuggcuguuuucccauaaugcaugaucguaccaaaaucagacaacugccuaaucuucugagggguuacgaacacauucgguugucgacacauaacgugaucaaugccgagaacgcaccagggggacccuauaagauuggcacuucaggcagcugcccuaauguaaccaacgggaauggauucuuugccacaauggcuugggcaguuccgaaaaacgacaagaauaaaaccgccacgaacccacucacuaucgaagugcccuacauauguacagagggugaggaucagauuaccgucuggggcuuccacagugacaaugaaacucagauggcuaagcuguauggggauuccaagccucagaaauuuacaucuagcgccaacggagugaccacgcacuacgugucccaaaucggcgguuucccaaaccagaccgaggacgggggacugccccagucaggccgcauugucguugauuauauggugcagaagaguggcaaaacagggacuaucaccuaccaaagaggaauccucuuaccucagaagguauggugcgcgagcgguaggucuaaagugauuaagggcucccugccacuuauaggggaagcagacuguuugcaugagaaauauggaggccugaauaagucaaagcccuacuacacaggugagcacgccaaagcuaucgggaacugcccgauuugggucaagacuccucuaaaacucgccaauggcaccaaguaucggcccccagcaaaacugcuuaaggaacgcggauuuuucggcgcuaucgccggguuucuggagggagguugggaaggcaugauagcgggguggcauggauacacaagccacggcgcccacgguguggcaguugcugccgauuugaagaguacccaggaggcuauuaacaaaaucacuaagaaucucaacucucuguccgaauuagaggugaaaaaucugcagcgacucagcggggccauggacgagcuucauaacgaaauccuggaguuggaugaaaaggucgacgaccuaagagcagauacgauuucgucucaaaucgagcuggccgugcuccuguccaaugaaggcauuauaaacucagaggacgagcaccuucuggcuuuggaaaggaaacucaagaagaugcugggaccuagugcgguagagaucggcaauggguguuucgaaacaaaacauaagugcaaccagaccugcuuagaucggauugcagccggaacuuuugacgcuggugaguucagccugcccaccuuugauucccuaaauaucacagccgcaucucucaacgacgauggccuggacaaucacaccauccuuuuguauuacagcacugccgcuucaagucuggccguuacacucaugauugcaauauucguggucuauauggugucccgugauaacgucagcuguucuaucugccuguga

SEQ ID NO: 154762 - RNA, 1758 nt, Artificial Sequence; identical to SEQ ID NO: 154693
  derived and/or modified CDS sequence (opt3) from hemagglutinin__InfluenzaB__AFB77681

SEQ ID NO: 154763 - RNA, 1758 nt, Artificial Sequence
  derived and/or modified CDS sequence (opt3) from hemagglutinin__InfluenzaB__AFB77682
augaaggccaucauugugcugcucauggucguuaccagcaacgcugacagaauaugcacaggcaucacuuccucuaauucaccccacgugguaaaaacggcaacccagggggaggugaacgucacaggagugauuccucuuacuaccacaccaaccaagagucauuucgccaaucugaaagguacugaaacaaggggcaaguuguguccgaaaugcuuaaacuguaccgaucuggacguugcgcuagggcggcccaagugcacgggaaagaucccuagcgcucgcguguccauucuccacgagguccgaccagugacuucuggcuguuuucccaucaugcaugaucguaccaaaauaagacaacugccuaaucuucugagggguuacgaacacauccgguugucgacacauaacguaauuaaugccgagaacgcaccagggggacccuauaagaucggcacuucaggcagcugcccuaauauuaccaacgggaauggauucuuugccacaauggcuugggcaguuccgaaaaacgacaagaauaaaaccgccacgaacccacucacuaucgaagugcccuacauauguacagagggugaggaucagauuaccgucuggggcuuccacagugacaaugaaacucagauggcuaagcuguauggggauuccaagccucagaaauuuacaucuagcgccaacggagugaccacgcacuacgugucccaaaucggcgguuucccaaaccagaccgaggacgggggacugccccagucaggccgcauugucguugauuauauggugcagaagaguggcaaaacagggacuaucaccuaccaaagaggaauccucuuaccucagaagguauggugcgcgagcgguaggucuaaagugauuaagggcucccugccacuuauaggggaagcagacuguuugcaugagaaauauggaggccugaauaagucaaagcccuacuacacaggugagcacgccaaagcuaucgggaacugcccgauuugggucaagacuccucuaaaacucgccaauggcaccaaguaucggcccccagcaaaacugcuuaaggaacgcggauuuuucggcgcuaucgccggguuucuggagggagguugggaaggcaugauagcgggguggcauggauacacaagccacggcgcccacgguguggcaguugcugccgauuugaagaguacccaggaggcuauuaacaaaaucacucagaaucucaacucucuguccgaauuagaggugaagaaucugcaacgacucagcggggccauggacgagcuucauaacgaaauccuggaguuggaugaaaaagucgacgaccuaagagcagauacgauuucgucucagaucgagcuggccgugcuccuguccaaugaaggcauuauaaacucagaggacgagcaccuucuggcuuuggaaaggaagcucaaaaagaugcugggaccuagugcgguagagaucggcaauggguguuucgaaacaaagcauaaaugcaaccagaccugcuuagaucggauugcagccggaacuuuugacgcuggugaguucagccugcccaccuuugauucccuaaauaucacagccgcaucucucaacgacgauggccuggacaaucacaccauccuuuuguauuacagcacugccgcuucaagucuggccguuacacucaugauugcaauauucguggucuauauggugucccgugauaacgucagcuguucuaucugccuguga

SEQ ID NO: 154764 - RNA, 1758 nt, Artificial Sequence; identical to SEQ ID NO: 154693
  derived and/or modified CDS sequence (opt3) from hemagglutinin__InfluenzaB__AFB77683

SEQ ID NO: 154765 - RNA, 1758 nt, Artificial Sequence; identical to SEQ ID NO: 154693
  derived and/or modified CDS sequence (opt3) from hemagglutinin__InfluenzaB__AFB77684

SEQ ID NO: 154766 - RNA, 1758 nt, Artificial Sequence
  derived and/or modified CDS sequence (opt3) from hemagglutinin__InfluenzaB__AFB77685
augaaggccaucauugugcugcucauggucguuaccagcaacgcugacagaauaugcacaggcaucacuuccucuaauucaccccacgugguaaaaacggcaacccagggggaagugaacgucacaggagugauuccucuuacuaccacaccaaccaagagucauuucgccaaucugaaagguacugaaacaaggggcaaguuguguccgaaaugcuuaaacuguaccgaucuggacguugcgcuagggcggcccaagugcacgggaaagacuccuagcgcucgcguguccauccuccacgagguccgaccagugaccucuggcuguuuucccauuaugcaugaucguacaaaaaucagacaacugccuaaucuucugagggguuacgaacacauacgguugucgacucauaacguaaucaaugccgagaacgcaccagggggacccuauaagauuggcaccucaggcagcugcccuaauaucacaaacgggaauggauucuuugccaccauggcuugggcaguuccgaaaaacgacaagaauaaaacggccacuaacccacucacaauugaagugcccuacaucuguaccgagggugaggaucagauaacugucuggggcuuccacagugacaaugaaacacagauggcuaagcuguauggggauuccaagccucagaaauuuaccucuagcgccaacggagugacgacccacuacauuucccaaaucggcgguuucccaaaccagacagaggacgggggacugccccagucaggccgcauuguggucgauuauaugguucagaagagugagaaaacuggcaccaucacauaccaaagagggauccucuuaccucagaagguguggugcgcgagcggaaggucuaaaguaauuaaggguucccugccacuuauaggcgaagcagacuguuugcaugagaaauaugggggacugaauaagucaaagcccuacuacacuggcgaacacgccaaagcuaucgguaacugcccgauuugggugaagaccccucuaaaacucgccaaugggacaaaguaucggcccccagcaaaacugcuuaaggagcgcggcuuuuucggagcuaucgccggcuuucuggaagggggaugggaggguaugauagcgggcuggcauggguacaccagccacggagcccacggcgucgcaguggcugccgauuugaagaguacucaggaagcuauuaacaaaaucacgaagaaucucaacucucuguccgaguuagagguuaaaaaucugcagcgacucagcggugccauggacgaacuucauaacgagauccuggaauuggaugagaagguggacgaccuaagagcagauacaauuucgucucaaaucgaacuggccguccuccuguccaaugaggggauuauaaacucagaggacgaacaccuucuggcuuuggagaggaaacucaagaagaugcugggcccuagugcgguggaaaucggaaauggcuguuucgagaccaaacauaagugcaaccagacuugcuuagaucggauugcagccgggaccuuugacgcuggagaguucagccugcccacauuugauucccuaaauaucaccgccgcaucucucaacgacgauggucuggacaaucacacuauccuuuuguauuacagcacagccgcuucaagucuggccguaacgcucaugauugcaauauucguuguguauauggucucccgugauaacgugagcuguucuaucugccuguga

SEQ ID NO: 154767 - RNA, 1758 nt, Artificial Sequence
  derived and/or modified CDS sequence (opt3) from hemagglutinin__InfluenzaB__AFB77686
augaaggccaucauugugcugcucauggucguuaccagcaacgcugacagaauaugcacaggcaucacuuccucuaauucaccccacgugguaaaaacggcaacccagggggaggugaacgucacaggagugauuccucuuacuaccacaccaaccaagagucauuucgccaaucugaaagguacugaaacaaggggcaaguuguguccgaaaugcuuaaacuguaccgaucuggacguugcgcuagggcggcccaagugcacgggaaagaucccuagcgcucgcguguccauucuccacgagguccgaccagugacuucuggcuguuuucccaucaugcaugaucguaccaaaauaagacaacugccuaaucuucugagggguuacgaacacauccgguugucgacacauaacguaauuaaugccgagaacgcaccagggggacccuauaagaucggcacuucaggcagcugcccuaauauuaccaacgggaauggauucuuugccacaauggcuugggcaguuccaaagaacgacaagaauaaaaccgccacgaacccgcucacuaucgaagugcccuacauauguacagagggugaggaucagauuaccgucuggggcuuccacagugacaaugaaacucagauggcuaagcuguauggggauuccaagccucagaaauuuacaucuagcgccaacggagugaccacgcacuacgugucccaaaucucaggcuucccaaaccagaccgaggacggugggcugccccagaguggacgcauugucguugauuauauggugcagaaaagcggcaaaacaggcacuaucaccuaccaaagagggauccucuuaccucagaagguauggugcgcgucuggaagguccaaagugauuaaggguucacugccacuuauaggcgaagcagacuguuugcaugagaaauaugggggacugaauaagagcaagcccuacuacacaggcgagcacgccaaagcuaucgguaacugcccgauuugggucaagacuccucuaaaacucgccaaugggaccaaguaucggcccccagcaaaacugcuuaaggaacgcggcuuuuucggagcuaucgccggcuuucuggaagggggaugggaggguaugauagcgggcuggcauggguacacaagucacggagcccacggcguggcaguugcugccgauuugaagucuacccaggaggcuauuaacaaaaucacucagaaucucaacucccugagcgaauuagaggugaagaaucugcaacgacucucgggugccauggacgagcuucauaacgaaauccuggaguuggaugaaaaagucgacgaccuaagagcagauacgauuucuucccagaucgagcuggccgugcuccugucaaaugaagggauuauaaacagugaggacgagcaccuucuggcuuuggaaaggaagcucaaaaagaugcugggcccuagcgcgguagagaucggaaauggcuguuucgaaacaaagcauaaaugcaaccagaccugcuuagaucggauugcagccgggacuuuugacgcuggagaguucucccugcccaccuuugauucucuaaauaucacagccgcaagccucaacgacgauggucuggacaaucacaccauccuuuuguauuacucaacugccgcuaguucccuggccguuacacucaugauugcaauauucguggucuauauggugagccgugauaacgucucuuguucaaucugccuguga

SEQ ID NO: 154768 - RNA, 1758 nt, Artificial Sequence
  derived and/or modified CDS sequence (opt3) from hemagglutinin__InfluenzaB__AFB77687
augaaggccaucauugugcugcucauggucguuaccagcaacgcugacagaauaugcacaggcaucacuuccucuaauucaccccacgugguaaaaacggcaacccagggggaggugaacgucacaggagugauuccucuuacuaccacaccaaccaagagucauuucgccaaucugaaagguacugaaacaaggggcaaguuguguccgaaaugcuuaaacuguaccgaucuggacguugcgcuagggcggcccaagugcacgggaaagaucccuagcgcucgcguguccauucuccacgagguccgaccagugacuucuggcuguuuucccaucaugcaugaucguaccaaaauaagacaacugccuaaucuucugagggguuacgaacacaucaaguugucgacacauaacguaauuaaugccgagaacgcaccagggggacccuauaaaaucggcacuucaggcagcugcccuaauguuaccaacgggaauggauucuuugccacaauggcuugggcagugccaaagaacgacaaaaauaagaccgccacgaacccgcucacuauugaaguccccuacaucuguacagagggugaggaucagauaaccguguggggcuuccacagugacaaugaaacucagauggcuaagcuguauggggauuccaaaccucagaaguuuacaucuagcgccaacggagugaccacgcacuacgucucccaaauuggcgguuucccaaaccagaccgaggacgggggacugccccagucaggccggaucguuguggauuauaugguacagaaaaguggcaagacagggacuauuaccuaccaacgcggaauccucuuaccucagaaaguguggugcgcgagcgguagaucuaaggucaucaaaggcucccugccacuuauuggggaagcagacuguuugcaugagaaguauggaggccugaauaagucaaaacccuacuacacaggugagcacgccaaggcuauagggaacugcccgaucugggugaaaacuccucuaaagcucgccaauggcaccaaauauaggcccccagcaaagcugcuuaaggaacggggauuuuucggcgcuauugccggguuucuggagggagguugggaaggcaugaucgcgggguggcauggauacacaagccacggcgcccacgguguugcaguggcugccgauuugaaaaguacccaggaggcuauaaacaagauuacuaaaaaucucaacucucuguccgaauuagaggucaagaaucugcagcgccucagcggggccauggacgagcuucauaacgaaauccuggaguuggaugaaaaaguggacgaccuacgagcagauacgaucucgucucaaauugagcuggccguacuccuguccaaugaaggcaucauuaacucagaggacgagcaccuucuggcuuuggaaagaaagcucaagaaaaugcugggaccuagugcgguugagauaggcaauggguguuucgaaacaaagcauaaaugcaaccagaccugcuuagauaggaucgcagccggaacuuuugacgcuggugaguucagccugcccaccuuugauucccuaaauauuacagccgcaucucucaacgacgauggccuggacaaucacaccauccuuuuguauuacagcacugccgcuucaagucuggccgugacacucaugaucgcaauuuucgucguguauauggucucccgggauaacgugagcuguucuauaugccuguga

SEQ ID NO: 154769 - RNA, 1758 nt, Artificial Sequence
  derived and/or modified CDS sequence (opt3) from hemagglutinin__InfluenzaB__AFB77688
augaaggccaucauugugcugcucauggucguuaccagcaacgcugacagaauaugcacaggcaucacuuccucuaauucaccccacgugguaaaaacggcaacccagggggaggugaacgucacaggagugauuccucuuacuaccacaccaaccaagagucauuucgccaaucugaaagguacugaaacaaggggcaaguuguguccgaaaugcuuaaacuguaccgaucuggacguugcgcuagggcggcccaagugcacgggaaagaucccuagcgcucgcguguccauucuccacgagguccgaccagugacuucuggcuguuuucccaucaugcaugaucguaccaaaauaagacaacugccuaaucuucugagggguuacgaacacauccgguugucgacacauaacguaauuaaugccgagaacgcaccagggggacccuauaagaucggcacuucaggcagcugcccuaauguuaccaacgggaauggauucuuugccacaauggcuugggcagugccgaaaaacgacaagaauaaaaccgccacgaacccacucacuauugaaguccccuacaucuguacagagggugaggaucagauaaccguguggggcuuccacagugacaaugaaacucagauggcuaagcuguauggggauuccaagccucagaaauuuacaucuagcgccaacggagugaccacgcacuacgucucccaaauuggcgguuucccaaaccagaccgaggacgggggacugccccagucaggccgcaucguuguggauuauaugguacagaagaguggcaaaacagggacuauuaccuaccaaagaggaauccucuuaccucagaagguguggugcgcgagcgguaggucuaaagucaucaagggcucccugccacuuauuggggaagcagacuguuugcaugagaaauauggaggccugaauaagucaaagcccuacuacacaggugagcacgccaaagcuauagggaacugcccgaucugggugaaggccccucuaaaacucgcaaauggcacuaaguaucggcccccagcuaaacugcuuaaggaacgcggauuuuucggcgccauugcgggguuucuggagggagguugggaaggcaugaucgccggguggcauggauacaccagccacggcgcacacgguguugcuguggccgcugauuugaagaguacacaggaggccauaaacaaaauuaccaagaaucucaacucucuguccgaauuagaggucaaaaaucugcagcgacucagcggggcaauggacgagcuucauaacgaaauccuggaguuggaugaaaagguggacgaccuaagagccgauacuaucucgucucaaauugagcuggcuguacuccuguccaaugaaggcaucauuaacucagaggacgagcaccuucuggcguuggaaaggaaacucaagaagaugcugggaccuagugcaguugagauaggcaauggguguuucgaaacgaaacauaagugcaaccagacaugcuuagaucggaucgccgcuggaaccuuugacgccggugaguucagccugcccacuuuugauucccuaaauauuaccgcagccucucucaacgacgauggccuggacaaucacacaauccuuuuguauuacagcaccgcugccucaagucuggcagugacucucaugaucgcgauuuucgucguguauauggucucccgugauaacgugagcuguucuauaugccuguga

SEQ ID NO: 154770 - RNA, 1758 nt, Artificial Sequence; identical to SEQ ID NO: 154693
  derived and/or modified CDS sequence (opt3) from hemagglutinin__InfluenzaB__AFB77689

SEQ ID NO: 154771 - RNA, 1758 nt, Artificial Sequence; identical to SEQ ID NO: 154693
  derived and/or modified CDS sequence (opt3) from hemagglutinin__InfluenzaB__AFB77690

SEQ ID NO: 154772 - RNA, 1758 nt, Artificial Sequence; identical to SEQ ID NO: 154731
  derived and/or modified CDS sequence (opt3) from hemagglutinin__InfluenzaB__AFE00360

SEQ ID NO: 154773 - RNA, 1758 nt, Artificial Sequence; identical to SEQ ID NO: 154731
  derived and/or modified CDS sequence (opt3) from hemagglutinin__InfluenzaB__AFF18534

SEQ ID NO: 154774 - RNA, 1758 nt, Artificial Sequence; identical to SEQ ID NO: 154731
  derived and/or modified CDS sequence (opt3) from hemagglutinin__InfluenzaB__AFF18543

SEQ ID NO: 154775 - RNA, 1758 nt, Artificial Sequence; identical to SEQ ID NO: 154693
  derived and/or modified CDS sequence (opt3) from hemagglutinin__InfluenzaB__AFG48978

SEQ ID NO: 154776 - RNA, 1758 nt, Artificial Sequence; identical to SEQ ID NO: 154693
  derived and/or modified CDS sequence (opt3) from hemagglutinin__InfluenzaB__AFG48997

SEQ ID NO: 154777 - RNA, 1758 nt, Artificial Sequence
  derived and/or modified CDS sequence (opt3) from hemagglutinin__InfluenzaB__AFG48998
augaaggccaucauugugcugcucauggucguuaccagcaacgcugacagaauaugcacaggcaucacuuccucuaauucaccccacgugguaaaaacggcaacccagggggaagugaacgucacaggagugauuccucuuacuaccacaccaaccaagagucauuucgccaaucugaaagguacugaaacaaggggcaaguuguguccgaaaugccccaacuguaccgauuuagacguugcgcuggggcggccuaagugcacgggaaagaucccaagcgcucgcguguccauucuacacgagguccgacccgugacuucuggcuguuuuccuaucaugcaugaucguaccaaaauaagacaacucccaaaucugcuuagggguuacgaacacauccggcugucgacacauaacguaauuaaugccgagaacgcacccgggggaccuuauaagaucggcacuucaggcagcugcccaaauguuaccaacgggaauggauucuuugaaacaauggccugggcugugccgaaaaacgacaagaauaaaaccgcaacgaaccccuugacuauugaggucccuuacaucuguacagagggugaagaucagauaaccguguggggcuuccacagugacaaugagacucagauggccaagcucuauggggauuccaagccacagaaauuuacaucuagcgcuaacggagugaccacgcacuacgucucccaaauuggcgguuuccccaaccagaccgaagacgggggacugccucagucaggccgcaucguuguggauuauaugguacagaagaguggcaaaacagggacuauuaccuaccaaagaggaauccugcucccacagaagguguggugcgccagcgguaggucuaaagucaucaagggcuccuuaccccugauuggggaggcggacugucuucaugagaaauauggaggcuugaauaagucaaagccguacuacacaggugaacacgcaaaagccauagggaacugcccuaucugggugaagacuccccugaaacuagcuaauggcaccaaguaucggccuccagccaaacuccugaaggagcgcggauuuuucggcgcaauugcuggguuucuugaaggagguugggagggcaugaucgccggguggcauggauacacaagccacggcgcgcacgguguugccguggcagcugaucugaagaguacccaggaagccauaaacaaaauuacuaagaauuugaacucucucuccgagcuggaggucaaaaauuuacagcgacugagcggggcuauggacgaacuccauaacgagauccuugaacuggaugagaagguggacgacuugagagccgauacgaucucgucucaaauugaacuagcaguacugcucuccaaugagggcaucauuaacucagaggacgaacaucugcuugcccuggagaggaaauugaagaagaugcucggacccagugcuguugaaauaggcaauggguguuucgagacaaaacacaagugcaaccagaccugccuggaucggaucgcggcaggaacuuuugacgccggugaguucagcuuaccaaccuuugauucccugaauauuacagcugccucucuaaacgacgauggccucgacaaucacaccauccugcuuuauuacagcacugcagccucaaguuuggcugugacacugaugaucgccauuuucgucguguauauggucucccgugauaacgugagcuguucuauaugccucuga

SEQ ID NO: 154778 - RNA, 1755 nt, Artificial Sequence
  derived and/or modified CDS sequence (opt3) from hemagglutinin__InfluenzaB__AFG49012
augaaggccaucauugugcugcucauggucguuaccagcaacgcugacagaauaugcacaggcaucacuuccucuaauucaccccacgugguaaaaacggcaacccagggggaagugaacgucacaggagugauuccucuuacuaccacaccaaccaagaguuacuucgccaaucugaaagguacuaagacaaggggcaaauuguguccggauugcuuaaacuguaccgaccuggauguugcgcuagggcggcccaugugcgugggaacgacuccuagcgcuaaggccuccauccuccaugaaguccgcccagugaccucuggcuguuuucccauuaugcacgaccgaacaaagauccgucaacugccuaaucuucugagagguuaugagaacauaagguugucgacucagaauguaaucgaugcagaaaaagccccagggggacccuaccggcucggcaccucaggcagcugcccuaacgcuacaaguaagauuggguucuuugcaaccauggccugggcuguuccaaaagacaauuauaagaacgccacgaauccgcugacuguggagguccccuacaucuguacagaaggagaggaucagauuaccgugugggguuuccauuccgacaacaaaacucagaugaagaaucuguauggcgauucuaacccucaaaaguuuacaagcuccgcgaauggggugaccacgcacuacgucucacagaucggagacuucccagaucagaccgaggacggcggucucccccagagugggcgcauaguuguggauuauaugaugcaaaaaccuggaaagacaggcacuauuguauaccagagaggcguguuacugccacagaaagucuggugcgcaagcgggaggucuaaggugaucaaaggaucccuucccuugauuggugaagccgacugucugcaugagaaguacggcgggcuaaacaaaucaaagccguauuacaccggagaacacgcuaaggccaucggcaacugcccuaucuggguuaaaacaccccucaagcuggcaaaugguacuaaauaucggccuccagcuaaacuucugaaggagcgcggguuuuucggcgccauugcgagcuuuuuggagggaggcugggaagggaugauagccggauggcacgguuacaccagucauggcgcacacgggguggcugucgccgcugaccucaagucuacacaggaggccaucaacaagauuaccaaaaaucugaacuccuuaagcgaacuggaggugaagaaucuccaacgacuuucgggagcaauggaugaacugcauaacgagaucuuggagcuagacgaaaaaguagaugaccugagagccgauacuauaucuucccagauugagcucgcuguucugcuuucaaaugaaggcaucaucaacagugaggacgaacaccuguuggcgcucgagaggaagcugaaaaagauguuaggucccagcgcaguggauauugggaauggcuguuucgagacgaagcacaaaugcaaccagacaugccuggaccggaucgccgcuggaaccuuuaaugccggcgaguucucccuaccaacuuuugauucucucaacauuaccgcagccagccugaaugacgaugggcuugacaaccauacaauauugcuguauuacucaaccgcugccaguucccucgcagucacucugaugcuugcgaucuucauuguguauauggucagccgugacaaugugucuuguucaaucugccuguga

SEQ ID NO: 154779 - RNA, 1755 nt, Artificial Sequence
  derived and/or modified CDS sequence (opt3) from hemagglutinin__InfluenzaB__AFG49013
augaaggccaucauugugcugcucauggucguuaccagcaacgcugacagaauaugcacaggcaucacuuccucuaauucaccccacgugguaaaaacggcaacccagggggaggugaacgucacaggagugauuccucuuacuaccacaccaaccaagaguuacuucgccaaucugaaagguacuaagacaaggggcaaauuguguccggauugcuuaaacuguaccgaccuggauguugcgcuagggcggcccaugugcgugggaacgacuccuagcgcuaaggccuccauccuccaugaaguccgcccagugaccucuggcuguuuucccauuaugcacgaccgaacaaagauccgucaacuggcaaaucuucugagagguuaugagaacauaagguugucgacucagaauguaaucgaugccgaaaaagcuccugggggaccauaccggcucggcaccucaggcagcugccccaacgcaacaaguaaguccggguucuuugccaccauggcuugggccguuccuaaagacaauaacaagaaugcgacgaacccacugacuguggaggucccguauauuuguacagaaggagaggaucagaucaccgugugggguuuccauucugacaauaaaacucagaugaagaaccuguacggcgauagcaauccccaaaaguuuacauccucagcaaacggggugaccacgcacuaugucagucagauuggaggcuucccugaccagaccgaggauggugggcucccacagagcggacgcaucguuguggacuacaugaugcaaaaacccggcaagacaggcacuauaguauaucagagagggguguuacugccucagaaagucuggugcgccucuggaagguccaaggugauuaaagguucacuuccauugaucggcgaagcugauugucugcaugagaaguacgggggacuaaacaaaagcaagcccuacuauaccggcgaacacgccaaggcaauugguaauugcccgaucuggguuaaaacaccucucaagcuggcuaacgggacuaaauaccggcccccagccaagcugcugaaagagcgcggcuuuuucggagcgaucgccggcuuuuuggaagggggaugggaagguaugauugcaggcuggcacggguauaccagucauggagcucacggcguggccgucgcugccgaccucaagucuacacaggaggcaauaaauaagaucaccaaaaaccuuaauuccuuaagcgaacuggaggugaagaaccuccaacgacuuucgggugccauggacgaacugcauaaugagauuuuggagcuagaugaaaaaguagacgaucugagagcugacacuaucucuucccagauagagcucgcgguucugcuuucaaacgaagggauuaucaauagugaggaugaacaccuguuggcacucgagaggaagcugaaaaagauguuaggcccuagcgccguggacaucggaaacggcuguuucgagacgaagcacaaaugcaaucagacaugccuggaucggauugcugccgggaccuuuaacgcaggagaguucucccuacccacuuuugacucucucaauaucaccgccgcuagccugaacgaugacggucuugauaaucauacaauuuugcuguacuauucaaccgccgcaaguucccucgcggucacucugaugcuugcuauauucaucguguacauggucagccgugacaacgugucuuguucaauuugccuguga

SEQ ID NO: 154780 - RNA, 1755 nt, Artificial Sequence
  derived and/or modified CDS sequence (opt3) from hemagglutinin__InfluenzaB__AFH57865
augaaggccaucauugugcugcucauggucguuaccagcaacgcugacagaauaugcacaggcaucacuuccucuaauucaccccacgugguaaaaacggcaacccagggggaggugaacgucacaggagugauuccucuuacuaccacaccaaccaagaguuacuucgccaaucugaaagguacuaggacacggggcaaguuguguccggauugcuuaaacuguaccgaccuggauguugcgcuagggcgccccaugugcgugggaacgacuccuagcgcuaaagccuccauccuccaugaaguccgaccagugaccucuggcuguuuucccauuaugcacgaccguacaaagaucagacaacugccuaaucuucugagggguuaugagaacauacgguugucgacucagaauguaaucgaugcagaaaaggccccagggggacccuaccgccucggcaccucaggcagcugcccuaacgcuacaaguaaauccggguucuuugcaaccauggccugggcuguuccaaaggacaauaacaaaaaugccacgaacccgcugacuguggagguccccuauauuuguacagaaggagaggaucagaucaccgugugggguuuccauucugacaauaagacuccuaugaaaaaccuguacggcgauagcaauccacagaaguuuacauccucagcgaacggggugaccacgcacuaugucagucaaauuggaggcuuccccgaccagaccgaggauggugggcucccucagagcggaagaaucguuguggacuacaugaugcagaagccaggcaaaacaggcacuauaguauaucaaaggggaguguuacugccccagaaggucuggugcgcaucugggcgguccaaagugauuaaggguucacuuccguugaucggcgaagccgauugucugcaugagaaauacgggggacuaaacaagagcaaaccuuacuauaccggcgaacacgcuaaggccauugguaauugccccaucuggguuaagacaccacucaaacuggcaaacgggacuaaguaccgcccucccgcuaaacuucugaaggagcgaggcuuuuucggagccaucgcgggcuuuuuggaagggggaugggaagguaugauugccggcuggcacggguauaccagucauggagcacacggcguggcugucgccgcugaccucaaaucuacacaggaggccauaaauaagaucaccaagaacuuaaauucccugagcgaacuggaggugaaaaaccuccagagacuuucgggugcaauggacgaacugcauaaugagauuuuggagcuagaugaaaagguagacgaucugagggccgacacuaucucuucccaaauagagcucgcuguucugcuuucaaacgaagggauuaucaauagugaggaugaacaccuguuggcgcucgagcggaaacugaagaaaauguuaggcccaagcgcaguggacaucggaaacggcuguuucgagacgaagcacaagugcaaucagacaugccuggaucguauugccgcugggaccuuuaacgccggagaguucucccuacccacuuuugacucucucaauaucaccgcagccagccugaacgaugacggucuugauaaucauacaauuuugcuguacuauucaaccgcugccaguucccucgcagucacucugaugcuugcgauauucaucguguacauggucagccgcgacaacgugucuuguucaauuugccuguga

SEQ ID NO: 154781 - RNA, 1755 nt, Artificial Sequence
  derived and/or modified CDS sequence (opt3) from hemagglutinin__InfluenzaB__AFH57876
augaaggccaucauugugcugcucauggucguuaccagcaacgcugacagaauaugcacaggcaucacuuccucuaauucaccccacgugguaaaaacggcaacccagggggaggugaacgucacaggagugauuccucuuacuaccacaccaaccaagaguuacuucgccaaucugaaagguacuaggacacggggcaaguuguguccggauugcuuaaacuguaccgaccuggauguugcgcuagggcgccccaugugcgugggaacgacuccuagcgcuaaagccuccauccuccaugaaguccgaccagugaccucuggcuguuuucccauuaugcacgaccguacaaagaucagacaacugccuaaucuucugagggguuaugagaacauacgguugucgacucagaauguaaucgaugcagaaaaggccccagggggacccuaccgccucggcaccucaggcagcugcccuaacgcuacaaguaaauccggguucuuugcaaccauggccugggcuguuccaaaggacaauaacaaaaaugccacgaacccgcugacuguggagguccccuauauuuguacagaaggagaggaucagaucaccgugugggguuuccauucugacaauaagaaccagaugaaaaaucuguacggcgauagcaacccucaaaaguuuacuuccucagcgaacggggugacaacccacuaugucagucagauuggcagcuucccagaccagacggaggauggaggucucccccagucugggagaaucguuguggacuacaugaugcaaaagccuggaaaaaccggcacaauaguauaucagaggggcauuuuacugccacagaagguguggugcgcauccgggcggucaaaagucaucaagggaagccuucccuugauuggugaagccgauugucugcaugagaaauacggcgggcuaaauaagaguaaaccguacuauacuggagaacacgcuaaggccaucggcaacugcccuaucugggugaagaccccucucaaacuggcaaaugguacaaaguaccgcccacccgcuaaacuucugaaggagcgaggguuuuucggcgccauugcgggauuuuuggagggcgggugggaaggaaugauagccgguuggcacggcuauacuucucauggggcacacggaguugcuguggccgcugaccucaaauccacccaggaggccaucaacaagauuacaaagaaucugaacagcuuaucggaacuggaggucaaaaaucuccaaagacuuucuggcgcaauggacgaacugcauaacgagaucuuggagcuagaugaaaagguggacgaucugagggccgacaccauauccucacagauugagcucgcuguacugcuuaguaaugaagguaucaucaacagcgaggaugaacaccuguuggcgcucgagcggaaacugaagaaaauguuagggcccuccgcaguugagauuggcaauggauguuucgaaacuaagcacaagugcaaccagacgugccuggaccguaucgccgcuggcacauuuaaugccggggaguucucucuaccaaccuuugauagccucaacauuacugcagccucacugaaugacgauggacuugacaaccauaccauauugcuguacuauaguacagcugccuccagccucgcagugacccugaugcuugcgaucuucauugucuacauggugucucgcgauaacgucucauguaguaucugccuguga

SEQ ID NO: 154782 - RNA, 1755 nt, Artificial Sequence
  derived and/or modified CDS sequence (opt3) from hemagglutinin__InfluenzaB__AFH57942
augaaggccaucauugugcugcucauggucguuaccagcaacgcugacagaauaugcacaggcaucacuuccucuaauucaccccacgugguaaaaacggcaacccagggggaagugaacgucacaggagugauuccucuuacuaccacaccaaccaagaguuacuucgccaaucugaaagguacuaggacacggggcaaguuguguccggauugcuuaaacuguaccgaccuggauguugcgcuagggcgccccaugugcgugggaacgacuccuagcgcuaaagccuccauccuccaugaaguccgaccagugaccucuggcuguuuucccauuaugcacgaccguacaaagaucagacaacugccuaaucuucugagggguuaugagaacauacgguugucgacucagaauguaaucgaugcagaaaaggccccagggggacccuaccgccucggcaccucaggcagcugcccuaacgcuacaaguaaaauuggguucuuugcaaccauggccugggcuguuccaaaggacaauuauaaaaacgccacgaauccgcugacuguggagguccccuacaucuguacagaaggagaggaucagauuaccgugugggguuuccauuccgacaacaagaaucagaugaaaucucuguauggcgauagcaacccucaaaaguuuacuuccucagcgaauggggugacaacccacuacgucagucagaucggagacuucccagaucagacggaggacggcggucucccccagagcgggagaauaguuguggauuauaugaugcaaaagccuggaaaaaccggcacaauuguauaccagaggggcguguuacugccacagaaggucuggugcgcaucugggcgguccaaagugaucaagggaucacuucccuugauuggugaagccgacugucugcaugagaaauacggcgggcuaaacaagagcaaaccguauuacacuggagaacacgcuaaggccaucggcaacugcccuaucuggguuaagacuccccucaaacuggcaaaugguacaaaguaucgcccuccagcuaaacuucugaaggagcgaggguuuuucggcgccauugcgggauuuuuggagggcgggugggaaggaaugauagccgguuggcacggcuacaccagucauggggcacacggaguggcugucgccgcugaccucaaaucuacccaggaggccaucaacaagauuacaaagaaucugaacuccuuaagcgaacuggaggugaaaaaucuccaaagacuuucgggcgcaauggaugaacugcauaacgagaucuuggagcuagacgaaaagguagaugaccugagggccgauaccauaucuucccagauugagcucgcuguucugcuuucaaaugaagguaucaucaacagugaggacgaacaccuguuggcgcucgagcggaaacugaagaaaauguuagggcccagcgcaguggauauuggcaauggauguuucgagacuaagcacaagugcaaccagacgugccuggaccguaucgccgcuggcacauuuaaugccggggaguucucccuaccaaccuuugauucucucaacauuacugcagccagccugaaugacgauggacuugacaaccauaccauauugcuguauuacucaacagcugccaguucccucgcagucacccugaugcuugcgaucuucauuguguauauggucagccgcgacaaugugucuuguucaaucugccuguga

SEQ ID NO: 154783 - RNA, 1752 nt, Artificial Sequence
  derived and/or modified CDS sequence (opt3) from hemagglutinin__InfluenzaB__AFH57986
augaaggccaucauugugcugcucauggucguuaccagcaacgcugacagaauaugcacaggcaucacuuccucuaauucaccccacgugguaaaaacggcaacccagggggaggugaacgucacaggagugauuccucuuacuaccacaccaaccaagagucauuucgccaaucugaaagguacuaagacaaggggcaaauuguguccgaacugcuuaaauuguaccgaucuggacguugcgcuagggcggcccaugugcgugggaacgacuccuagcgcuaaggccuccauccuccacgaaguccgcccagugaccucuggcuguuuucccauuaugcaugaucgaacaaagauccgucaacugccuaaccuucugagagguuacgagaauauaagguugucgacucagaacguaaucaaugcagaacgggccccagggggacccuaucgccucggcaccucaggcagcugcccuaacguuacaaguagagacggguucuuugcuaccauggcaugggccgugccaagggauaauaaaacggcuacuaacccgcugacagucgaggugcccuacauuuguaccaagggagaagaccagaucacugugugggguuuccacuccgaugacaaaacacagaugaagaaucuguauggcgauucuaacccucaaaaauuuaccagcuccgccaauggggucacgacccauuacguuucacagauuggaggcuucccaaaccagacagaggacggugggcucccccagaguggacggaucgugguagauuauauggugcaaaagccuggcaagacuggcaccauagucuaccagcgcgggguguuacugccacagaaaguuuggugcgcgagcggacgaucuaaggugauuaaagguucccuucccuugaucggcgaggcagacugucugcacgaaaaguaugggggacuaaacaaaucaaagccguacuacacaggcgagcacgccaaagcuauugguaauugcccuaucugggucaagacuccccucaagcuggccaacgggaccaaauauagaccuccagcaaagcugcugaaagaaaggggcuuuuucggagcuaucgccggcuuuuuggaagggggaugggaggguaugauugcgggcuggcauggguacacaagccacggagcccauggcguggcaguagcugccgaucucaagaguacccaggaggcuauaaauaaaaucacuaagaaccuuaauucuuuauccgagcuggaaguuaagaaccuccaacggcuuagcggugccauggacgagcugcacaaugaaauuuuggagcuagacgagaaaguggaugaccugcgugcagauacgaucucgucucagauagaacucgccguccugcuuuccaacgaggggauuaucaauucagaagacgagcaccuguuggcucucgaacgcaagcugaaaaagauguuaggccccagugcgguggauaucggaaacggcuguuucgagacaaaacauaagugcaaucagaccugccuggacagaauugcagccgggacuuuuaacgcuggagaguucagccuaccaaccuuugauucccucaauaucacagccgcaucucugaacgacgauggucuugacaaucacaccauuuugcuguauuacagcacugccgcuucaagucucgccgucacacugaugauagcaaucuucauuguguauaugguuuccagggauaacgugagcuguucuaucugccuuuga

SEQ ID NO: 154784 - RNA, 1758 nt, Artificial Sequence
  derived and/or modified CDS sequence (opt3) from hemagglutinin__InfluenzaB__AFH58249
augaaggccaucauugugcugcucauggucguuaccagcaacgcugacagaauaugcacaggcaucacuuccucuaauucaccccacgugguaaaaacggcaacccagggggaagugaacgucacaggagugauuccucuuacuaccacaccaaccaagagucauuucgccaaucugaaagguacuaagacaaggggcaaauuguguccgaagugcuuaaacuguaccgaucuggacguugcgcuagggcggcccaagugcacgggaaauaucccuccagcuaaagugagcauucuccacgaaguccgccccgugacuuccggcuguuuuccuaucaugcaugaucgaaccaagauacgucaacugccaaaccuucugagagguuacgagaggauccgguugucuaaucacaacguaauuaaugccgaagaggcacccgggggaccuuauaaaaucggcacaucgggcucaugcccaaacguuacuaaugggaacggauucuuugccaccauggcuugggcagugccgaagaaugaaaacaauaaaacagccaccaacagccucacgauugagguccccuacaucuguacugagggugaagaccagauaacaguguggggcuuccauagugauuccgagacccagauggcuaagcuguauggggacucuaagccucagaaauuuacuagcuccgccaacggagugacaacccacuacgucucacaaauuggcgguuucccaaaucagacggaagaugggggacugccccagaguggccgcaucguuguggacuauaugguacaaaagagcggcaaaaccgggacaauuacuuaccagagaggaauccucuuaccucagaagguguggugcgcgucugguagguccaaagucaucaagggcucacugccacuuauuggggaggcagauuguuugcacgagaaauauggaggccugaacaagagcaagcccuacuacaccggugaacaugccaaagcuauagggaauugcccgaucugggugaagacaccucuaaaacucgccaacggcacuaaguaucggcccccagcaacccugcuuaaagagcgcggauuuuucggcgcuauugccggguuucuggaaggagguugggagggcaugaucgcgggguggcacggauacacaagucauggcgcccacgguguugcaguggcugccgacuugaagucuacccaggaagcuauaaauaagauuacuaaaaaccucaauucccugagcgaguuagaggucaagaaccugcagcgacucucgggggccauggaugaacuucacaaugagauccuggaauuggacgagaaaguggaugaccuaagagcagacacgaucucuucccaaauugaacuggccguacuccugucaaacgagggcaucauuaauagugaggaugaacaucuucuggcuuuggagaggaagcucaaaaagaugcugggaccuagcgcgguugaaauaggcaacggguguuucgagacaaagcacaaaugcaaucagaccugcuuagaccggaucgcagccggaacuuuuaacgcuggugaguucucccugcccaccuuugauucucuaaauauuacagccgcaagccucaacgacgauggccuggacaaccauaccauccuuuuguauuacucaacugccgcuaguucccuggccgugacacucaugaucgcaauuuucgucguguauauggucagccgugauaaugugucuuguucaauaugccuguga

SEQ ID NO: 154785 - RNA, 1758 nt, Artificial Sequence
  derived and/or modified CDS sequence (opt3) from hemagglutinin__InfluenzaB__AFH58260
augaaggccaucauugugcugcucauggucguuaccagcaacgcugacagaauaugcacaggcaucacuuccucuaauucaccccacgugguaaaaacggcaacccagggggaggugaacgucacaggagugauuccucuuacuaccacaccaaccaagagucauuucgccaaucugaaagguacuaagacaaggggcaaauuguguccgaagugcuuaaacuguaccgaucuggacguugcgcuagggcggcccaagugcacgggaaauaucccuagcgcugaaguguccauucuccacgagguccgcccagugacuucuggcuguuuucccaucaugcaugaucgaaccaaaauacgucaacugccuaaccuucugagagguuacgaacacaucagguugucgacacauaauguaauuaacgccgagaaggcaccagggggacccuauaaaaucggcacuucaggcagcugcccuaauguuaccaacgggaauggauucuuugccacaauggcuugggcagugccaaagaacgacaauaacaaaaccgccacgaauagucucacuauugaagucccguacaucuguacagagggugaggaucagauaaccguguggggcuuccacuccgacaacgaaauucagauggcuaagcuguauggggauucuaagccccagaaauuuacuagcuccucaaacggagugacaacccacuacgucagucaaaucggcgguuucccuaaucagacggaggacgggggacugccacagagcggccggauuguuguggauuauaugguacagaagucuggcaaaaccgggacaaucacuuaccaacgcggaauccucuuaccccagaagguguggugcgccuccgguagaucaaaagucauuaagggcagccugccucuuauaggggaagcggacuguuugcaugagagguauggaggccugaacaaaaguaagccauacuacaccggugagcacgcaaaggccaucgggaauugccccauuugggugaaaacaccgcuaaagcucgcuaacggcacuaaauaucggccucccgccaagcugcuuaaagaacgcggauuuuucggcgcaaucgcuggguuucuggagggagguugggaaggcaugauagccggguggcauggauacaccucucacggcgcgcacgguguugccguggcagcugauuugaaguccacacaggaggccauuaauaagaucaccaaaaaccucaauagccugucggaauuagaggucaagaaccugcagcgacucucuggggcuauggacgagcuucauaaugaaauccuggaguuggaugaaaaaguggacgaccuaagagccgauacuauuuccucacaaaucgagcuggcaguacuccugaguaacgaaggcauuauaaauagcgaggacgagcaccuucuggccuuggaaaggaagcucaaaaagaugcugggaccauccgcuguugagaucggcaacggguguuucgaaacgaagcauaaaugcaaucagacaugcuuagaucggauugcggcaggaaccuuugacgccggugaguucucucugccuacuuuugauagccuaaacaucaccgcugccucacucaaugacgauggccuggacaaccacacaauccuuuuguauuacaguaccgcagccuccagccuggcugugacucucaugauugccauauucgucguguauauggucucucgugauaacgugucauguaguaucugccuguga

SEQ ID NO: 154786 - RNA, 1755 nt, Artificial Sequence
  derived and/or modified CDS sequence (opt3) from hemagglutinin__InfluenzaB__AFH58271
augaaggccaucauugugcugcucauggucguuaccagcaacgcugacagaauaugcacaggcaucacuuccucuaauucaccccacgugguaaaaacggcaacccagggggaggugaacgucacaggagugauuccucuuacuaccacaccaaccaagaguuacuucgccaaucugaaagguacuaggacacggggcaaguuguguccggauugcuuaaacuguaccgaccuggauguugcgcuagggcgccccaugugcgugggaacgacuccuagcgcuaaagccuccauccuccaugaagucaagccagugaccucuggcuguuuucccauuaugcacgaccgaacaaagauccgucaacugccuaaucuucugagagguuaugagaacauaagguugucgacucagaauguaaucgaugcagaaaaagccccagggggacccuaccggcucggcaccucaggcagcugcccuaacgcuacaaguaaguccggguucuuugcaaccauggccugggcuguuccaaaagacaauaacaagaaugccacgaacccgcugacuguggagguccccuauauuuguacagaaggagaggaucagaucaccgugugggguuuccauucugacgauaaaacucagaugaagaaucuguacggcgacagcaacccucaaaaguuuacauccucagcgaauggggugaccacgcacuaugucagucagauuggcagcuucccagaucagaccgaggacggaggucucccccagucugggcgcaucguuguggauuacaugaugcaaaaaccuggaaagacaggcacuauaguauaucagagaggcguguuacugccacagaaagucuggugcgcauccgggaggucaaaggugauuaaaggaagccuucccuugaucggugaagccgacugucugcaugagaaguacggcgggcuaaacaaaaguaagccguacuauaccggagaacacgcuaaggccauuggcaacugcccuaucuggguuaaaacaccccucaagcuggcaaaugguacuaaauaccggccuccagcuaaacuucugaaggagcgcggguuuuucggcgccaucgcgggauuuuuggagggcgggugggaaggaaugauugccgguuggcacggcuauaccucucauggggcacacggaguggcugucgccgcugaccucaaguccacacaggaggccauaaacaagaucaccaaaaaucugaacagcuuaucggaacuggaggugaagaaucuccaacgacuuucuggcgcaauggaugaacugcauaacgagauuuuggagcuagacgaaaaaguagaugaccugagagccgauacuaucuccucacagauagagcucgcuguucugcuuaguaaugaagguauuaucaacagcgaggacgaacaccuguuggcgcucgagaggaagcugaaaaagauguuagggcccuccgcaguggagaucggcaauggauguuucgaaacgaagcacaaaugcaaccagacaugccuggaucggauugccgcuggcaccuuuaaugccggggaguucucucuaccaacuuuugacagccucaacaucaccgcagccucacugaaugaugacggacuugauaaccauacaauuuugcuguacuauaguaccgcugccuccagccucgcagucacucugaugcuugcgauauucaucguguacauggucucucgugacaaugugucauguaguauuugccuguga

SEQ ID NO: 154787 - RNA, 1755 nt, Artificial Sequence; identical to SEQ ID NO: 154786
  derived and/or modified CDS sequence (opt3) from hemagglutinin__InfluenzaB__AFH58282

SEQ ID NO: 154788 - RNA, 1758 nt, Artificial Sequence
  derived and/or modified CDS sequence (opt3) from hemagglutinin__InfluenzaB__AFH58293
augaaggccaucauugugcugcucauggucguuaccagcaacgcugacagaauaugcacaggcaucacuuccucuaauucaccccacgugguaaaaacggcaacccagggggaggugaacgucacaggagugauuccucuuacuaccacaccaaccaagagucauuucgccaaucugaaagguacugaaacaaggggcaaguuguguccgaaaugcuuaaacuguaccgaucuggacguugcgcuagggcggcccaagugcacgggaaagaucccuagcgcucgcguguccauucuccacgagguccgaccagugacuucuggcuguuuucccaucaugcaugaucguaccaaaauaagacaacugccuaaucuucugagggguuacgaacacauccgguugucgacacauaacguaauuaaugccgagaacgcaccagggggacccuauaagaucggcacuucaggcagcugcccuaauauuaccaacgggaauggauucuuugccacaauggcuugggcaguuccgaaaaacgacaagaauaaaaccgccacgaacccacucacuaucgaagugcccuacauauguacagagggugaggaucagauuaccgucuggggcuuccacagugacgaugaaacucagauggcuaagcuguauggggacuccaagccucagaaauuuacaucuagcgccaauggagugaccacgcacuacgugucccaaaucggcgguuucccaaaccagaccgaggaugggggacugccccagucaggccgcauugucguugacuauauggugcagaagaguggcaaaacagggacuaucaccuaccaaagaggaauccucuuaccucagaagguauggugcgcgagcgguaggucuaaagugauuaagggcucccugccacuuauaggggaagcagauuguuugcaugagaaauauggaggccugaacaagucaaagcccuacuacacaggugagcacgccaaagcuaucgggaauugcccgauuugggucaagacuccucuaaaacucgccaacggcaccaaguaucggcccccagcaaaacugcuuaaggaacgcggauuuuucggcgcuaucgccggguuucuggagggagguugggaaggcaugauagcgggguggcauggauacacaagccacggcgcccacgguguggcaguugcugccgacuugaagaguacccaggaggcuauuaauaaaaucacuaagaaccucaauucucuguccgaauuagaggugaaaaaccugcagcgacucagcggggccauggaugagcuucauaaugaaauccuggaguuggacgaaaaggucgacgaucuaagagcagacacgauuucgucucaaaucgagcuggccgugcuccuguccaacgaaggcauuauaaauucagaggaugagcaccuucuggcuuuggaaaggaaacucaagaagaugcugggaccuagugcgguagagaucggcaacggguguuucgaaacaaaacauaagugcaaucagaccugcuuagaccggauugcagccggaacuuuugaugcuggugaguucagccugcccaccuuugacucccuaaacaucacagccgcaucucucaaugaugacggccuggauaaccacaccauccuuuuguauuacagcacugccgcuucaagucuggccguuacacucaugauugcaauauucguggucuauauggugucccgugacaaugucagcuguucuaucugccuguga

SEQ ID NO: 154789 - RNA, 1755 nt, Artificial Sequence
  derived and/or modified CDS sequence (opt3) from hemagglutinin__InfluenzaB__AFH58304
augaaggccaucauugugcugcucauggucguuaccagcaacgcugacagaauaugcacaggcaucacuuccucuaauucaccccacgugguaaaaacggcaacccagggggaagugaacgucacaggagugauuccucuuacuaccacaccaaccaagaguuacuucgccaaucugaaagguacuaggacacggggcaaguuguguccggauugcuuaaacuguaccgaccuggauguugcgcuagggcgccccaugugcgugggaacgacuccuagcgcuaaagccuccauccuccaugaaguccgaccagugaccucuggcuguuuucccauuaugcacgaccguacaaagaucagacaacugccuaaucuucugagggguuaugagaacauacgguugucgacucagaauguaaucgaugcagaaaaggccccagggggacccuaccgccucggcaccucaggcagcugcccuaacgcuacaaguaaaauuggguucuuugcaaccauggccugggcuguuccaaaggacaauuauaaaaacgccacgaauccgcugacuguggagguccccuacaucuguacagaaggagaggaucagauuaccgugugggguuuccauuccgacgauaagacucagaugaaaaaccuguauggcgacucuaauccucaaaaguuuacaagcuccgcgaacggggugaccacgcacuacgucucacagaucggagauuucccagaccagaccgaggauggcggucucccccagagugggagaauaguuguggacuauaugaugcaaaagccuggaaaaacaggcacuauuguauaccagaggggcguguuacugccacagaaggucuggugcgcaagcgggcggucuaaagugaucaagggaucccuucccuugauuggugaagccgacugucugcaugagaaauacggcgggcuaaauaagucaaaaccguauuacaccggagaacacgcuaaggccaucggcaacugcccuaucuggguuaagacaccccucaaacuggcaaacgguacuaaguaucgcccuccagcuaaacuucugaaggagcgaggguuuuucggcgccauugcgggauuuuuggagggcgggugggaaggaaugauagccgguuggcacggcuacaccagccauggggcacacggaguggcugucgccgcugaucucaaaaguacacaggaggccaucaauaagauuaccaagaacuuaaauucucuguccgaacuggaggugaaaaaccuccaaagacuuagcggcgcaauggacgaacugcauaaugagaucuuggagcuagaugaaaagguagacgaucugagggccgacacuauaucgucucagauugagcucgcuguucugcuuuccaacgaagguaucaucaauucagaggaugaacaccuguuggcgcucgagcggaaacugaagaaaauguuagggcccagugcaguggacauuggcaacggauguuucgagacgaagcacaagugcaaucagacaugccuggaucguaucgccgcuggcaccuuuaacgccggggaguucagccuaccaacuuuugacucccucaauauuaccgcagccucucugaacgaugacggacuugacaaucauacaauauugcuguauuacagcaccgcugccucaagucucgcagucacucugaugcuugcgaucuucauuguguauauggucucccgcgauaacgugagcuguucuaucugccuguga

SEQ ID NO: 154790 - RNA, 1755 nt, Artificial Sequence; identical to SEQ ID NO: 154789
  derived and/or modified CDS sequence (opt3) from hemagglutinin__InfluenzaB__AFH58315

SEQ ID NO: 154791 - RNA, 1755 nt, Artificial Sequence
  derived and/or modified CDS sequence (opt3) from hemagglutinin__InfluenzaB__AFH58326
augaaggccaucauugugcugcucauggucguuaccagcaacgcugacagaauaugcacaggcaucacuuccucuaauucaccccacgugguaaaaacggcaacccagggggaagugaacgucacaggagugauuccucuuacuaccacaccaaccaagaguuacuucgccaaucugaaagguacuaggacacggggcaaguuguguccggauugcuuaaacuguaccgaccuggauguugcgcuagggcgccccaugugcgugggaacgacuccuagcgcuaaagccuccauccuccaugaaguccgaccagugaccucuggcuguuuucccauuaugcacgaccguacaaagaucagacaacugccuaaucuucugagggguuaugagaacauacgguugucgacucagaauguaaucgaugcagaaaaggccccagggggacccuaccgccucggcaccucaggcagcugcccuaacgcuacaaguaaaauuggguucuuugcaaccauggccugggcuguuccaaaggacaauuauaaaaacgccacgaauccgcugacuguggagguccccuacaucuguacagaaggagaggaucagauuaccgugugggguuuccauuccgacaacaaggcgcagaugaaaaaucuguauggcgauucuaacccucaaaaguuuacuagcuccgcaaauggggugacaacccacuacgucucacagaucggagacuucccagaucagacggaggacggcggucccccucagagugggagaauaguuguggauuauaugaugcaaaagccaggaaaaaccggcacaauuguauaccagaggggcgugcucuuaccccagaaggucuggugcgccagcgggcggucuaaagugaucaagggaucccugccgcuuauuggugaagcugacuguuugcaugagaaauacggcgggcugaacaagucaaaaccuuauuacacuggagaacacgccaaggcaaucggcaacugccccaucuggguuaagaccccacuaaaacucgcuaaugguacaaaguaucgcccucccgccaaacugcuuaaggagcgaggguuuuucggcgcgauugccggauuucuggagggcgggugggaaggaaugauagcagguuggcacggcuacacuagccauggggcucacggaguggccgucgcugccgacuugaaaaguacccaggaggcaaucaacaagauuacaaagaaucucaacucucuguccgaauuagaggugaaaaaucugcaaagacucagcggcgccauggaugaacuucauaacgagauccuggaguuggacgaaaagguagaugaccuaagggcugauaccauaucgucucagauugagcuggcgguucuccuguccaaugaagguaucaucaacucagaggacgaacaccuucuggcauuggagcggaaacucaagaaaaugcuggggccaagugccguggauauuggcaauggauguuucgagacuaagcacaagugcaaccagacgugcuuagaccguaucgcugccggcacauuuaaugcaggggaguucagccugcccaccuuugauucccuaaacauuacugccgcuucucucaaugacgauggacuggacaaccauaccauacuuuuguauuacagcacagccgcaucaagucuggcggucacccucaugcuggcuaucuucauuguguauauggucucccgcgacaaugugagcuguucuaucugccuuuga

SEQ ID NO: 154792 - RNA, 1755 nt, Artificial Sequence
  derived and/or modified CDS sequence (opt3) from hemagglutinin__InfluenzaB__AFH58337
augaaggccaucauugugcugcucauggucguuaccagcaacgcugacagaauaugcacaggcaucacuuccucuaauucaccccacgugguaaaaacggcaacccagggggaagugaacgucacaggagugauuccucuuacuaccacaccaaccaagaguuacuucgccaaucugaaagguacuaggacacggggcaaguuguguccggauugcuuaaacuguaccgaccuggauguugcgcuagggcgccccaugugcgugggaacgacuccuagcgcuaaagccuccauccuccaugaaguccgaccagugaccucuggcuguuuucccauuaugcacgaccguacaaagaucagacaacugccuaaucuucugagggguuaugagaacauacgguugucgacucagaauguaaucgaugcagaaaaggccccagggggacccuaccgccucggcaccucaggcagcugcccuaacgcuacaaguaaaauuggguucuuugcaaccauggccugggcuguuccaaaggacaauuauaaaaacgccacgaauccgcugacuguggagguccccuacaucuguacagaaggagaggaucagauuaccgugugggguuuccauuccgacaacaaggcgcagaugaaaaaucuguauggcgauucuaacccucaaaaguuuacuagcuccgcaaauggggugacaacccacuacgucucacagaucggagacuucccagaucagacggaggacggcggucucccccagagugggagaauaguuguggauuauaugaugcaaaagccuggaaaaaccggcacaauuguauaccagaggggcguguuacugccacagaaggucuggugcgccagcgggcggucuaaagugaucaagggaucccuucccuugauuggugaagcugacugucugcaugagaaauacggcgggcuaaacaagucaaaaccguauuacacuggagaacacgccaaggcaaucggcaacugcccuaucuggguuaagaccccucucaaacuggcuaaugguacaaaguaucgcccacccgccaaacuucugaaggagcgaggguuuuucggcgcgauugccggauuuuuggagggcgggugggaaggaaugauagcagguuggcacggcuacacuagccauggggcucacggaguggccgucgcugccgaccucaaaaguacccaggaggcaaucaacaagauuacaaagaaucugaacucuuuauccgaacuggaggugaaaaaucuccaaagacuuagcggcgccauggaugaacugcauaacgagaucuuggagcuagacgaaaagguagaugaccugagggcugauaccauaucgucucagauugagcucgcgguucugcuuuccaaugaagguaucaucaacucagaggacgaacaccuguuggcacucgagcggaaacugaagaaaauguuagggcccagugccguggauauuggcaauggauguuucgagacuaagcacaagugcaaccagacgugccuggaccguaucgcugccggcacauuuaaugcaggggaguucagccuaccaaccuuugauucccucaacauuacugccgcuucucugaaugacgauggacuugacaaccauaccauauugcuguauuacagcacagccgcaucaagucucgcggucacccugaugcuugcuaucuucauuguguauauggucucccgcgacaaugugagcuguucuaucugccuguga

SEQ ID NO: 154793 - RNA, 1758 nt, Artificial Sequence
  derived and/or modified CDS sequence (opt3) from hemagglutinin__InfluenzaB__AFH58348
augaaggccaucauugugcugcucauggucguuaccagcaacgcugacagaauaugcacaggcaucacuuccucuaauucaccccacgugguaaaaacggcaacccagggggaggugaacgucacaggagugauuccucuuacuaccacaccaaccaagagucauuucgccaaucugaaagguacugaaacaaggggcaaguuguguccgaaaugcuuaaacuguaccgaucuggacguugcgcuagggcggcccaagugcacgggaaauaucccuagcgcucgcguguccauucuccacgagguccgaccagugacuucuggcuguuuucccaucaugcaugaucguaccaagauaagacaacugccuaaccuucugagggguuacgaacacauccgguugucggcccauaauguaauuaacgcagagaaugccccagggggacccuauaaaaucggcacaucaggcagcugcccuaacguuacuaaugggaacggauucuuugcuaccauggcaugggccgugccaaagaaugacaacaauaaaacagcuaccaacagucucacgauugaagucccguacaucuguacugagggugaggaucagauaacaguguggggcuuccacuccgacaaggaaacccagauggccaaacuguauggggauucuaagccccagaaguuuacuagcuccgcgaacggagugacaacccacuacgucucacaaauuggcgguuucccuaaucagacggaggacgggggacugccacagaguggccgcaucguuguggauuauaugguacagaaaagcggcaagaccgggacaauuacuuaccaaagaggaauccucuuaccccagaaaguguggugcgcaucugguagguccaaggucaucaaaggcucacugccucuuauuggggaagccgacuguuugcaugagaaguauggaggccugaacaaaagcaagccauacuacaccggugagcacgcuaaggccauagggaauugccccaucugggugaaaacaccgcuaaagcucgcaaacggcacuaaauaucggccucccgcuaagcugcuuaaagaacgcggauuuuucggcgccauugcgggguuucuggagggagguugggaaggcaugaucgccggguggcauggauacaccagucacggcgcacacgguguugcuguggccgcugauuugaagucuacacaggaggccauaaauaagauuaccaaaaaccucaauucccugagcgaauuagaggucaagaaccugcagcgacucucgggggcaauggacgagcuucauaaugaaauccuggaguuggaugaaaaaguggacgaccuaagagccgauacuaucucuucccaaauugagcuggcuguacuccugucaaacgaaggcaucauuaauagugaggacgagcaccuucuggcguuggaaaggaagcucaaaaagaugcugggaccaagcgcaguugagauaggcaacggguguuucgaaacgaagcauaaaugcaaucagacaugcuuagaucggaucgccgcuggaaccuuuaacgccggugaguucucccugccuacuuuugacucucuaaauauuaccgcagccagccucaacgaugacggccuggauaaccacacaauccuuuuguauuacucaaccgcugccaguucccuggcagugacucucaugaucgcgauuuucgucguguauauggucagccgugacaaugugucuuguucaauaugccuguga

SEQ ID NO: 154794 - RNA, 1758 nt, Artificial Sequence
  derived and/or modified CDS sequence (opt3) from hemagglutinin__InfluenzaB__AFH58370
augaaggccaucauugugcugcucauggucguuaccagcaacgcugacagaauaugcacaggcaucacuuccucuaauucaccccacgugguaaaaacggcaacccagggggaggugaacgucacaggagugauuccucuuacuaccacaccaaccaagagucauuucgccaaucugaaagguacugaaacaaggggcaaguuguguccgaaaugcuuaaacuguaccgaucuggacguugcgcuagggcggcccaagugcacgggaaauaucccuagcgcucgcguguccauucuccacgagguccgaccagugacuucuggcuguuuucccaucaugcaugaucguaccaagauaagacaacugccuaaccuucugagggguuacgaacacauccgguugucggcccauaauguaauuaacgcagagaaugccccagggggacccuauaaaaucggcacaucaggcagcugcccuaacguuacuaaugggaacggauucuuugcuaccauggcaugggccgugccaaagaaugacaacaauaaaacagcuaccaacagucucacgauugaagucccguacaucuguacugagggugaggaucagauaacaguguggggcuuccacuccgacaacgaaauucagauggccaagcuguauggggauucuaaaccccagaaguuuaccagcuccgcgaauggagugacuacacacuacgucucacaaaucggcgguuucccuaaccagaccgaggacgggggacugccacagaguggccgcauuguuguggauuauaugguacagaagaguggcaaaacggggaccaucacauaccaaagaggaauccucuuaccccagaagguguggugcgcaucugguagguccaaagucauuaagggcucacugccucuuauaggggaagccgacuguuugcaugagaaauauggaggccugaauaagagcaaaccauacuacacuggugagcacgcuaaggccaucgggaacugccccauuugggugaagaccccgcuaaaacucgcaaauggcacaaaguaucggccucccgcuaaacugcuuaaggaacgcggauuuuucggcgccaucgcgggguuucuggagggagguugggaaggcaugauagccggguggcauggauacacuagccacggcgcacacgguguugcuguggccgcugauuugaaaucuacccaggaggccauuaacaagaucacaaagaaucucaacucccugagcgaauuagaggucaaaaaucugcagcgacucucgggggcaauggacgagcuucauaacgaaauccuggaguuggaugaaaagguggacgaccuaagagccgauaccauuucuucccaaaucgagcuggcuguacuccugucaaaugaaggcauuauaaacagugaggacgagcaccuucuggcguuggaaaggaaacucaagaaaaugcugggaccaagcgcaguugagaucggcaauggguguuucgaaacuaagcauaagugcaaccagacgugcuuagaucggauugccgcuggaacauuuaaugccggugaguucucccugccuaccuuugacucucuaaacaucacugcagccagccucaacgaugacggccuggauaaucacaccauccuuuuguauuacucaacagcugccaguucccuggcagugacccucaugauugcgauauucgucguguauauggucagccgugacaacgugucuuguucaaucugccuguga

SEQ ID NO: 154795 - RNA, 1758 nt, Artificial Sequence
  derived and/or modified CDS sequence (opt3) from hemagglutinin__InfluenzaB__AFH58392
augaaggccaucauugugcugcucauggucguuaccagcaacgcugacagaauaugcacaggcaucacuuccucuaauucaccccacgugguaaaaacggcaacccagggggaggugaacgucacaggagugauuccucuuacuaccacaccaaccaagagucauuucgccaaucugaaagguacugaaacaaggggcaaguuguguccgaaaugcuuaaacuguaccgaucuggacguugcgcuagggcggcccaagugcacgggaaagaucccuagcgcucgcguguccauucuccacgagguccgaccagugacuucuggcuguuuucccaucaugcaugaucguaccaaaauaagacaacugccuaaucuucugagggguuacgaacacauccgguugucgacacauaacguaauuaaugccgagaacgcaccagggggacccuauaagaucggcacuucaggcagcugcccuaauauuaccaacgggaauggauucuuugccacaauggcuugggcaguuccgaaaaacgacaagaauaaaaccgccacgaacccacucacuaucgaagugcccuacauauguacagagggugaggaucagauuaccgucuggggcuuccacagugacaaugaaauccagauggcuaagcuguauggggauuccaagccucagaaauuuacuucuagcgccaacggagugacaacccacuacgugucccaaauuggcgguuucccaaaccagacggaggacgggggacugccccagucaggccgcaucgucguugauuauauggugcagaagaguggcaaaaccgggacaaucacuuaccaaagagguauucucuuaccucagaagguauggugcgcgagcggaaggucuaaagugauaaagggcucccugccacuuaucggggaagcagacuguuugcaugagaaauauggaggccugaauaagucaaagcccuacuacaccggugagcacgccaaagcuauugggaacugcccgaucugggucaagacaccucuaaaacucgccaauggcacuaaguaucggcccccagcaaaacugcuuaaggaacgcggauuuuucggcgcuauagccggguuucuggagggagguugggaaggcaugauugcgggguggcauggauacaccagccacggcgcccacgguguggcaguugcugccgauuugaagaguacacaggaggcuaucaacaaaaucaccaagaaucucaacucucuguccgaauuagaggugaaaaaucugcagcgacucagcggggccauggacgagcuucauaacgaaauucuggaguuggaugaaaaggucgacgaccuaagagcagauacuaucucgucucaaauugagcuggccgugcuccuguccaaugaaggcauaaucaacucagaggacgagcaccuucuggcuuuggaaaggaaacucaagaagaugcugggaccuagugcgguagagauuggcaauggguguuucgaaacgaaacauaagugcaaccagacaugcuuagaucggaucgcagccggaaccuuugacgcuggugaguucagccugcccacuuuugauucccuaaauaucaccgccgcaucucucaacgacgauggccuggacaaucacacaauucuuuuguauuacagcaccgccgcuucaagucuggccguuacucucaugauagcaaucuucguggucuauauggugucccgugauaacgucagcuguucuauuugccuguga

SEQ ID NO: 154796 - RNA, 1758 nt, Artificial Sequence; identical to SEQ ID NO: 154788
  derived and/or modified CDS sequence (opt3) from hemagglutinin__InfluenzaB__AFH58403

SEQ ID NO: 154797 - RNA, 1758 nt, Artificial Sequence; identical to SEQ ID NO: 154788
  derived and/or modified CDS sequence (opt3) from hemagglutinin__InfluenzaB__AFH58414

SEQ ID NO: 154798 - RNA, 1758 nt, Artificial Sequence; identical to SEQ ID NO: 154788
  derived and/or modified CDS sequence (opt3) from hemagglutinin__InfluenzaB__AFH58425

SEQ ID NO: 154799 - RNA, 1758 nt, Artificial Sequence; identical to SEQ ID NO: 154788
  derived and/or modified CDS sequence (opt3) from hemagglutinin__InfluenzaB__AFH58436

SEQ ID NO: 154800 - RNA, 1758 nt, Artificial Sequence
  derived and/or modified CDS sequence (opt3) from hemagglutinin__InfluenzaB__AFH58458
augaaggccaucauugugcugcucauggucguuaccagcaacgcugacagaauaugcacaggcaucacuuccucuaauucaccccacgugguaaaaacggcaacccagggggaggugaacgucacaggagugauuccucuuacuaccacaccaaccaagagucauuucgccaaucugaaagguacugaaacaaggggcaaguuguguccgaaaugcuuaaacuguaccgaucuggacguugcgcuagggcggcccaagugcacgggaaagaucccuagcgcucgcguguccauucuccacgagguccgaccagugacuucuggcuguuuucccaucaugcaugaucguaccaaaauaagacaacugccuaaucuucugagggguuacgaacacauccgguugucgacaaacaauguaauuaacgccgagaaugcaccagggggacccuauaagaucggcacuucaggcagcugcccuaacguuaccaaugggaacggauucuuugccacaauggcuugggcagugcccaaaaaugacaagaacaaaaccgccacgaauccgcucacuauugaaguccccuacaucuguacagagggugaggaucagauaaccguguggggcuuccauagugacaacgaaauucagauggcuaagcuguauggggauucccgcccucagaaguuuacuucuagcgccaacggagugacaacccacuacgucucccaaaucggcgguuucccaaaucagacggaggacgggggacugccccagucaggcagaauuguuguggauuauaugguacagaaaaguggcaagaccgggacaaucacuuaccaaaggggaauccucuuaccucagaaaguguggugcgcgagcggucggucuaaggucauuaaaggcucccugccacuuauaggggaagcagacuguuugcacgagaaguauggaggccugaacaaaucaaagcccuacuacaccggugagcaugccaaggcuaucgggaauugcccgauuugggugaaaacaccucuaaagcucgccaacggcacuaaauaucgcccaccagcaaagcugcuuaaagaacgaggauuuuucggcgcuaucgccggguuucuggagggagguugggaaggcaugauagcgggguggcacggauacaccagccauggcgcccacgguguugcaguggcugccgauuugaagaguacacaggaggcuauuaauaagaucaccaaaaaccucaauucucuguccgaauuagaggucaagaaccugcagagacucagcggggccauggacgagcuucacaaugaaauccuggaguuggaugaaaaaguggacgaccuaagggcagauacuauuucgucucaaaucgagcuggccguacuccuguccaacgaaggcauuauaaauucagaggacgagcaucuucuggcuuuggaacggaagcucaaaaagaugcugggaccuagugcgguugagaucggcaacggguguuucgaaacgaagcacaaaugcaaucagacaugcuuagaucguauugcagccggaaccuuugacgcuggugaguucagccugcccacuuuugauucccuaaacaucaccgccgcaucucucaaugacgauggccuggacaaccauacaauccuuuuguauuacagcaccgccgcuucaagucuggccgugacucucaugauugcaauauucgucguguauauggucucccgcgauaacgugagcuguucuaucugccuguga

SEQ ID NO: 154801 - RNA, 1758 nt, Artificial Sequence; identical to SEQ ID NO: 154800
  derived and/or modified CDS sequence (opt3) from hemagglutinin__InfluenzaB__AFH58469

SEQ ID NO: 154802 - RNA, 1755 nt, Artificial Sequence; identical to SEQ ID NO: 154782
  derived and/or modified CDS sequence (opt3) from hemagglutinin__InfluenzaB__AFH58480

SEQ ID NO: 154803 - RNA, 1755 nt, Artificial Sequence
  derived and/or modified CDS sequence (opt3) from hemagglutinin__InfluenzaB__AFH58502
augaaggccaucauugugcugcucauggucguuaccagcaacgcugacagaauaugcacaggcaucacuuccucuaauucaccccacgugguaaaaacggcaacccagggggaagugaacgucacaggagugauuccucuuacuaccacaccaaccaagaguuacuucgccaaucugaaagguacuaggacacggggcaaguuguguccggauugcuuaaacuguaccgaccuggauguugcgcuagggcgccccaugugcgugggaacgacuccuagcgcuaaagccuccauccuccaugaaguccgaccagugaccucuggcuguuuucccauuaugcacgaccguacaaagaucagacaacugccuaaucuucugagggguuaugagaacauacgguugucgacucagaauguaaucgaugcagaaaaggccccagggggacccuaccgccucggcaccucaggcagcugcccuaacgcuacaaguaaaauuggguucuuugcaaccauggccugggcuguuccaaaggacaauuauaaaaacgccacgaauccgcugacuguggagguccccuacaucuguacagaaggagaggaucagauuaccgugugggguuuccauuccgacgauaagacucagaugaaaucucuguauggcgacagcaacccucaaaaguuuacauccucagcgaauggggugaccacgcacuacgucagucagaucggagauuucccagaccagaccgaggauggcggucucccccagagcgggagaauaguuguggacuauaugaugcaaaagccuggaaaaacaggcacuauuguauaccagaggggcguguuacugccacagaaggucuggugcgcaucugggcgguccaaagugaucaagggaucacuucccuugauuggugaagccgacugucugcaugagaaauacggcgggcuaaacaagagcaaaccguauuacaccggagaacacgcuaaggccaucggcaauugcccuaucuggguuaagacaccccucaaacuggcaaacgguacuaaguaucgcccuccagcuaaacuucugaaggagcgaggguuuuucggcgccauugcgggauuuuuggagggcgggugggaaggaaugauagccgguuggcacggcuacaccagucauggggcacacggaguggcugucgccgcugaucucaaaucuacacaggaggccaucaacaagauuaccaagaaucugaacuccuuaagcgaacuggaggugaaaaaucuccaaagacuuucgggcgcaauggacgaacugcauaacgagaucuuggagcuagaugaaaagguagacgaucugagggccgacacuauaucuucccagauugagcucgcuguucugcuuucaaaugaagguaucaucaacagugaggaugaacaccuguuggcgcucgagcggaaacugaagaaaauguuagggcccagcgcaguggacauuggcaauggauguuucgagacgaagcacaagugcaaccagacaugccuggaucguaucgccgcuggcaccuuuaaugccggggaguucucccuaccaacuuuugacucucucaacauuaccgcagccagccugaaugaugacggacuugacaaccauacaauauugcuguauuacucaaccgcugccaguucccucgcagucacucugaugcuugcgaucuucauuguguauauggucagccgcgauaaugugucuuguucaaucugccuguga

SEQ ID NO: 154804 - RNA, 1758 nt, Artificial Sequence
  derived and/or modified CDS sequence (opt3) from hemagglutinin__InfluenzaB__AFH58513
augaaggccaucauugugcugcucauggucguuaccagcaacgcugacagaauaugcacaggcaucacuuccucuaauucaccccacgugguaaaaacggcaacccagggggaggugaacgucacaggagugauuccucuuacuaccacaccaaccaagagucauuucgccaaucugaaagguacugaaacaaggggcaaguuguguccgaaaugccccaacuguaccgauuuagacguugcgcuggggcggccuaagugcacgggaaagaucccaagcgcucgcguguccauucuacacgagguccgacccgugacuucuggcuguuuuccuaucaugcaugaucguaccaaaauaagacaacucccaaaucugcuuagggguuacgaacacauccggcugucgacacauaacguaauuaaugccgagaacgcacccgggggaccuuauaagaucggcacuucaggcagcugcccaaauguuaccaacgggaauggauucuuugccacaauggcuugggcagugccgaaaaacgacaagaauaaaaccgccacgaaccccuugacuauugaagucccuuacaucuguacagagggugaggaucagauaaccguguggggcuuccacagugacgaugaaacucagauggcuaagcucuauggggacuccaagccacagaaauuuacaucuagcgccaauggagugaccacgcacuacgucucccaaauuggcgguuuccccaaccagaccgaggaugggggacugccucagucaggccgcaucguuguggacuauaugguacagaagaguggcaaaacagggacuauuaccuaccaaagaggaauccugcucccacagaagguguggugcgcgagcgguaggucuaaagucaucaagggcuccuuaccccugauuggggaagcagauugucuucaugagaaauauggaggcuugaacaagucaaagccguacuacacaggugagcacgccaaagcuauagggaauugcccuaucugggugaagacuccccugaaacuagccaacggcaccaaguaucggccuccagcaaaacuccugaaggaacgcggauuuuucggcgcuauugccggguuucuugagggagguugggaaggcaugaucgcgggguggcauggauacacaagccacggcgcccacgguguugcaguggcugccgaccugaagaguacccaggaggcuauaaauaaaauuacuaagaaccuuaauucucucuccgaacuggaggucaaaaacuuacagcgacugagcggggccauggaugagcuccauaaugaaauccuugagcuggacgaaaagguggacgauuugagagcagacacgaucucgucucaaauugagcuagccguacugcucuccaacgaaggcaucauuaauucagaggaugagcaccuguuggcucuggaaaggaaauugaagaagaugcucggacccagugcgguugagauaggcaacggguguuucgaaacaaaacauaagugcaaucagaccugccuggaccggaucgcagccggaacuuuugaugcuggugaguucagcuuaccaaccuuugacucccugaacauuacagccgcaucucuaaaugaugacggccucgauaaccacaccauccugcuuuauuacagcacugccgcuucaaguuuggccgugacacugaugaucgcaauuuucgucguguauauggucucccgugacaaugugagcuguucuauaugccucuga

SEQ ID NO: 154805 - RNA, 1758 nt, Artificial Sequence; identical to SEQ ID NO: 154804
  derived and/or modified CDS sequence (opt3) from hemagglutinin__InfluenzaB__AFH58524

SEQ ID NO: 154806 - RNA, 1755 nt, Artificial Sequence
  derived and/or modified CDS sequence (opt3) from hemagglutinin__InfluenzaB__AFH58535
augaaggccaucauugugcugcucauggucguuaccagcaacgcugacagaauaugcacaggcaucacuuccucuaauucaccccacgugguaaaaacggcaacccagggggaggugaacgucacaggagugauuccucuuacuaccacaccaaccaagagucauuucgccaaucugaaagguacucaaacaaggggcaaguuguguccgaacugcuuuaauuguaccgauuuagacguugcgcuggggcggcccaaaugcaugggaaacacgccuagcgcuaagguguccauccuacacgaagucaagccagccacuucuggcuguuuccccauuaugcaugaucgcaccaaaauccgacagcucccuaaucugcuucgugguuacgagaacauaagacugucgacaucaaaugugaucaacacugaaaccgcaccagggggacccuauaagguaggcacaagcggcaguugcccuaauguugccaacgggaauggauuuuucaacaccauggcuugggugauuccaaaagacaauaacaagacggcaaucaacccggucacuguggaggugcccuacauuuguuccgaaggugaggaucagaucacagucuggggcuuucacucugacgauaaaacccagauggagagguuguauggggacagcaauccucaaaaguucacuuccucagccaacggaguuacaacccauuacgugagucagauaggcgguuuuccaaaucagacggaagaugaggggcucaagcagagcggacggauuguaguggacuauaugguccaaaaacccggcaagaccggcacaaucguguaccagcgcgggauucugcugccucagaaaguuuggugcgcuucuggaagauccaaggugaucaaagguucacucccauuaaucggcgaagccgauugucugcacgagaaguaugggggacuuaacaaaagcaagcccuacuacacuggcgagcacgcgaaggcaauugguaauugcccgauaugggucaaaaccccuuugaagcuggccaacgggacaaaauauaggcccccagcuaagcuacucaaagaacggggcuucuuuggagccaucgcaggcuuccuggaagggggaugggaggguaugauugcuggcuggcauggguacacaagucacggagcccauggcguggcgguagccgcagaccuuaagucuacccaggaggcuaucaauaagauaacuaaaaaccugaauuauuuguccgaacucgagguuaagaaccugcaacgcuuaagcggugccaugaaugagcugcacgaugaaauucucgagcuugacgaaaaaguggacgaucugcgagcugacaccaucucgucucagaucgaguuggccguccuacuguccaacgaagggauuaucaauucagaggaugagcaccuccuggcacuugaaagaaagcugaaaaagauguugggcccuagugccguggagauuggaaacggcuguuuugaaacuaagcauaaaugcaaucagacgugccucgacaggauagcugcggggacauucaacgcaggagauuuuagccugcccaccuucgacuccuuaaacaucacugccgcuucucugaaugaugacggucuagauaaccacaccauucuccuguacuauagcacagccgcaucaagucuugccgucaccuugaugaucgcuaucuucauuguguacaugguuucccgggacaaugugagcuguucuauaugccuguga

SEQ ID NO: 154807 - RNA, 1752 nt, Artificial Sequence
  derived and/or modified CDS sequence (opt3) from hemagglutinin__InfluenzaB__AFH58557
augaaggccaucauugugcugcucauggucguuaccagcaacgcugacagaauaugcacaggcaucacuuccucuaauucaccccacgugguaaaaacggcaacccagggggaggugaacgucacaggagugauuccucuuacuaccacaccaaccaagagucauuucgccaaucugaaagguacuaagacaaggggcaaauuguguccgaacugcuuaaauuguaccgaucuggacguugcgcuagggcggcccaugugcgugggaacgacuccuagcgcuaaggccuccauccuccacgaaguccgcccagugaccucuggcuguuuucccauuaugcaugaucgaacaaagauccgucaacugccuaaccuucugagagguuacgagaauauaagguugucgacucagaacguaaucaaugcagaacgggccccagggggacccuaucgccucggcaccucaggcagcugcccuaacguuacaaguagagacggguucuuugcuaccauggcaugggccgugccaagggauaauaaaacggcuacuaacccgcugacagucgaggugcccuacauuuguaccaagggagaagaccagaucacugugugggguuuccacuccgaugacaaaacacagaugaagaaucuguauggcgauucuaacccucaaaaauuuaccagcuccgccaauggggucacgacccauuacguuucacagauuggaggcuucccaaaccagacagaggacggugggcucccccagaguggacggaucgugguagauuauauggugcaaaagccuggcaagacuggcaccauagucuaccagcgcgggguguuacugccacagaaaguuuggugcgcgagcggacgaucuaaggugauuaaagguucccuucccuugaucggcgaggcagacugucugcacgaaaaguaugggggacuaaacaaaucaaagccguacuacacaggcgagcacgccaaagcuauugguaauugcccuaucugggucaagacuccccucaagcuggccaacgggaccaaauauagaccuccagcaaagcugcugaaagaaaggggcuuuuucggagcuaucgccggcuuuuuggaagggggaugggaggguaugauugcgggcuggcauggguacacaagccacggagcccauggcguggcaguagcugccgaucucaagaguacccaggaggcuauaaauaaaaucacuaagaaccuuaauucuuuauccgagcuggaaguuaagaaccuccaacggcuuagcggugccauggacgagcugcacaaugaaauuuuggagcuagacgagaaaguggaugaccugcgugcagauacgaucucgucucagauagaacucgccguccugcuuuccaacgaggggauuaucaauucagaagacgagcaccuguuggcucucgaacgcaagcugaaaaagauguuaggccccagugcgguggauaucggaaacggcuguuucgagacaaaacauaagugcaaucagaccugccuggacagaauugcagccgggacuuuuaacgcuggagaguucagcuuuccaaccuucgauucccuaaauaucacagccgcaucucucaacgacgauggucuggacaaucacaccauucuuuuguauuacagcacugccgcuucaagucuggccgucacacucaugauagcaaucuucauuguguauaugguuuccagggauaacgugagcuguucuaucugccuguga

SEQ ID NO: 154808 - RNA, 1755 nt, Artificial Sequence
  derived and/or modified CDS sequence (opt3) from hemagglutinin__InfluenzaB__AFJ76224
augaaggccaucauugugcugcucauggucguuaccagcaacgcugacagaauaugcacaggcaucacuuccucuaauucaccccacgugguaaaaacggcaacccagggggaagugaacgucacaggagugauuccucuuacuaccacaccaaccaagagucauuucgccaaucugaaagguacuaagacaaggggcaaauuguguccgaccugcuuaaacuguacggaucuggacguugcgcuagggagccccaugugcgugggaaucacuccuuccgcuaaggccucuauucuccacgaaguccggccagugaccucgggcuguuuucccaucaugcaugaucgcacaaagauacgacaacugccuaaucuucugcgugguuacgagaaaaucagauugucaacucagaacguaauuaauaucgaaaaggcaccagggggacccuauaggcucggcaccagcggcaguugcccuaacgccacaucccggucuggguucuuugcuaccauggcaugggccguuccacgcgacaauaacaaaacggcuacuaauccgcugacaguggaggucccccacauuuguaccaaggaagaggaucagaucacuguguggggauuccauagcgacaacaaaacacagaugaagaaucuguacggugauuccaacccucaaaaguuuaccucaagugccaauggcgugacgacccacuaugucagccagauagggggauucccagaccagacagaggauggcggucucccccagucugggagaauuguuguggacuacaugguacaaaaaccuggaaagacuggcaccaucguguaucagaggggcauuuuacugccacagaaagucuggugcgcguccgggcggucaaaggugaucaaaggaagccuucccuugaucggugaagcagauugucugcacgagaaguacggcgggcuaaacaaaaguaagccguauuacacaggagaacaugccaaggcuauuggcaacugcccuauauggguuaaaacuccccucaagcuggccaaugguaccaaauaccgcccuccagcaaaacuucugaaggagcgaggguuuuucggcgcuaucgccggauuuuuggagggcgggugggaaggaaugauugcggguuggcacggcuauacaucucauggggcccacggaguggcagucgcugccgaccucaaguccacccaggaggcuaucaacaagauaacuaaaaaucugaacagcuuaucggaacuggaggugaagaaucuccaaagacuuucuggcgccauggaugaacugcacaacgagauuuuggagcuagacgaaaaaguagacgaucugagggcagacacgaucuccucacagaucgagcucgccguucugcuuaguaaugaagguauuaucaacagcgaggaugaacaucuguuggcucucgagcggaagcugaaaaagauguuagggcccuccgcgguggacauuggcaauggauguuucgagacaaagcacaaaugcaaccagaccugccuggaucguauagcagccggcacuuuuaaugcuggggaguucucucuaccaaccuuugacagccucaacaucacagccgcaucacugaaugaugacggacuugauaaccauaccauuuugcuguacuauaguacugccgcuuccagccucgccgucacacugaugaucgcaaucuucauuguguacaugauaucucgcgacaaugucucauguaguaucugccuuuga

SEQ ID NO: 154809 - RNA, 1755 nt, Artificial Sequence
  derived and/or modified CDS sequence (opt3) from hemagglutinin__InfluenzaB__AFJ76235
augaaggccaucauugugcugcucauggucguuaccagcaacgcugacagaauaugcacaggcaucacuuccucuaauucaccccacgugguaaaaacggcaacccagggggaggugaacgucacaggagugauuccucuuacuaccacaccaaccaagagucauuucgccaaucugaaagguacuaagacaaggggcaaauuguguccgaccugcuuaaacuguacggaucuggacguugcgcuagggagccccaugugcgugggaaucacuccuuccgcuaaggccucuauucuccacgaaguccggccagugaccucgcgcuguuuucccaucaugcaugaucgaacaaagauacgucaacugccuaaucuucugagaggcuacgagaaaaucagguugucaacucagaacguaauuaauaucgaaaaggcaccaggugggcccuaucggcucggaaccagcggcaguugcccuaacgccacaucccgcucuggcuucuuugcuaccauggcaugggccguuccaagagacaauaacaaaacggcuacuaauccgcugacaguggaggucccccacauuuguaccaaggaagaggaucagaucacuguguggggguuccauagcgacaacaaaacacagaugaagaaucuguacggagauuccaacccucaaaaguuuaccucaagugccaauggugugacgacccacuaugucagccagauaggcggguucccagaccagacagaggauggaggccucccccagucugguaggauuguuguggacuacaugguacaaaaaccugggaagacuggaaccaucguguaucagcggggcauuuuacugccacagaaagucuggugcgcguccggccgcucaaaggugaucaaagggagccuucccuugaucggagaagcagauugucugcacgagaaguacgguggccuaaacaaaaguaagccguauuacacaggggaacaugccaaggcuauuggaaacugcccuauauggguuaaaacuccccucaagcuggccaauggcaccaaauaccgaccuccagcaaaacuucugaaggagagagguuucuucggggcuaucgccggcuuuuuggagggaggcugggaagggaugauugcgggauggcacgguuauacaucucauggcgcccacgggguggcagucgcugccgaccucaaguccacccaggaggcuaucaacaagauaacuaaaaaucugaacagcuuaucggaacuggaggugaagaaucuccaaaggcuuucuggagccauggaugaacugcacaacgagauuuuggagcuagacgaaaaaguagacgaucugcgggcagacacgaucuccucacagaucgagcucgccguucugcuuaguaaugaaggcauuaucaacagcgaggaugaacaucuguuggcucucgagcguaagcugaaaaagauguuaggucccuccgcgguggacauugggaauggcuguuucgagacaaagcacaaaugcaaccagaccugccuggaucgcauagcagccggaacuuuuaaugcuggcgaauuuucucuaccaaccuuugacagccucaacaucacagccgcaucacugaaugaugacgggcuugauaaccauaccauuuugcuguacuauaguacugccgcuuccagccucgccgucacacugaugaucgcaaucuucauuguguacaugauaucuagagacaaugucucauguaguaucugccuuuga

SEQ ID NO: 154810 - RNA, 1755 nt, Artificial Sequence; identical to SEQ ID NO: 154808
  derived and/or modified CDS sequence (opt3) from hemagglutinin__InfluenzaB__AFJ76246

SEQ ID NO: 154811 - RNA, 1758 nt, Artificial Sequence; identical to SEQ ID NO: 154562
  derived and/or modified CDS sequence (opt3) from hemagglutinin__InfluenzaB__AFJ76268

SEQ ID NO: 154812 - RNA, 1758 nt, Artificial Sequence; identical to SEQ ID NO: 154613
  derived and/or modified CDS sequence (opt3) from hemagglutinin__InfluenzaB__AFJ76301

SEQ ID NO: 154813 - RNA, 1755 nt, Artificial Sequence; identical to SEQ ID NO: 154474
  derived and/or modified CDS sequence (opt3) from hemagglutinin__InfluenzaB__AFJ76323

SEQ ID NO: 154814 - RNA, 1758 nt, Artificial Sequence
  derived and/or modified CDS sequence (opt3) from hemagglutinin__InfluenzaB__AFJ76334
augaaggccaucauugugcugcucauggucguuaccagcaacgcugacagaauaugcacaggcaucacuuccucuaauucaccccacgugguaaaaacggcaacccagggggaagugaacgucacaggagugauuccucuuacuaccacaccaaccaagagucauuucgccaaucugaaagguacugaaacaaggggcaaguuguguccgaaaugcuuaaacuguaccgaucuggacguugcgcuagggcggcccaagugcacgggaaauaucccuagcgcucgcguguccauucuccacgagguccgaccagugacuucuggcuguuuucccaucaugcaugaucguaccaagauaagacaacugccuaaccuucugagggguuacgaacacauccgguugucgacacauaauguaauuaacgccgagaaugcaccagggggacccuauaaaaucggcacuucaggcagcugcccuaacguuaccaaugggaacggauucuuugccacaauggcuugggcagugccaaagaaugacaacaauaaaaccgccacgaacagucucacuauugaagucccguacaucuguacagagggugaggaucagauaaccguguggggcuuccacuccgacucugaaacucagauggcuaagcuguauggggauagcaaaccccagaaguuuacauccucagccaacggagugaccacgcacuacgucagucaaauuggcgguuucccuaaucagaccgaggacgggggacugccacagagcggccgcaucguuguggauuauaugguacagaagucuggcaaaacagggacuauuaccuaccaaagaggaauccucuuaccccagaagguguggugcgcguccgguaggucaaaagucaucaagggcagccugccucuuauuggggaagcagacuguuugcaugagaaauauggaggccugaacaagaguaaaccauacuacacaggugagcacgccaaggcuauagggaauugccccaucugggugaagacuccgcuaaaacucgccaacggcaccaaguaucggccucccgcaaaacugcuuaaggaacgcggauuuuucggcgcuauugccggguuucuggagggagguuggaaaggcaugaucgcgggguggcauggauacacaucucacggcgcccacgguguugcaguggcugccgauuugaaguccacccaggaagcuauaaauaagauuacuaaaaaccucaauagccugucggaguuagaagucaagaaccugcagcgacucucuggggccauggacgagcuucauaaugagauccuggaauuggaugagaaaguggacgaccuaagagcagauacgaucuccucacaaauugaacuggccguacuccugaguaacgagggcaucauuaauagcgaagacgagcaccuucuggcuuuggagaggaagcucaaaaagaugcugggaccauccgcgguugaaauaggcaacggguguuucgagacaaagcauaaaugcaaucagaccugcuuagaucggaucgcagccggaacuuuugacgcuggugaguucucucugccuaccuuugauagccuaaacauuacagccgcaucacucaaugacgauggccuggacaaccacaccauccuuuuguauuacaguacugccgcuuccagccuggccgugacacucaugaucgcagucuucguggucuauauggugucucgugauaacguuucauguaguauuugccuguga

SEQ ID NO: 154815 - RNA, 1758 nt, Artificial Sequence; identical to SEQ ID NO: 154562
  derived and/or modified CDS sequence (opt3) from hemagglutinin__InfluenzaB__AFJ77327

SEQ ID NO: 154816 - RNA, 1755 nt, Artificial Sequence; identical to SEQ ID NO: 154474
  derived and/or modified CDS sequence (opt3) from hemagglutinin__InfluenzaB__AFJ77369

SEQ ID NO: 154817 - RNA, 1755 nt, Artificial Sequence; identical to SEQ ID NO: 154474
  derived and/or modified CDS sequence (opt3) from hemagglutinin__InfluenzaB__AFJ77380

SEQ ID NO: 154818 - RNA, 1755 nt, Artificial Sequence
  derived and/or modified CDS sequence (opt3) from hemagglutinin__InfluenzaB__AFJ80139
augaaggccaucauugugcugcucauggucguuaccagcaacgcugacagaauaugcacaggcaucacuuccucuaauucaccccacgugguaaaaacggcaacccagggggaggugaacgucacaggagugauuccucuuacuaccacaccaaccaagagucauuucgccaaucugaaagguacuaagacaaggggcaaauuguguccgaccugcuuaaacuguacggaucuggacguugcgcuagggcggcccaugugcgugggaaucacuccuagcgcuaaggccuccauucuccacgaaguccgcccagugaccucuggcuguuuucccaucaugcaugaucgaacaaagauacgucaacugccuaaucuucugagagguuacgagaaaaucagguugucgacucagaacguaauuaaugcagaaaaggccccagggggacccuaucggcucggcaccucaggcagcugcccuaacgcuacaagucgcuccggguucuuugcaaccauggccugggcuguuccaagagacaauaacaaaacggccacuaauccgcugacaguggagguccccuacaucuguaccaaggaagaggaucagauuacuguguggggauuccacucugacaacaaaacacagaugaagaaucuguauggugauagcaacccucaaaaguuuaccuccucagcgaauggcgugacgacccauuacgucagucagaucgggggauucccagaccagacagaggauggcggucucccccagagcgggaggauaguuguggacuauaugguacaaaaaccuggaaagacuggcaccauuguguaccagcggggcaucuuacugccacagaaagucuggugcgcaucugggcgcuccaaggugauuaaaggauuucuucccuugaucggugaagccgauugucugcacgagaaguauggcgggcuaaacaaaucaaagccguacuacacaggagaacacgcuaaggccaucggcaacugcccuauuuggguuaaaacuccccucaagcuggcaaaugguaccaaauaucgaccuccagcuaaacuucugaaggagagaggguucuuuggcgccauagcgggauucuuggagggcgggugggaaggaaugaucgccgguuggcauggcuacacaagccacggggcacauggaguggcugucgccgcugaccucaagaguacccaggaggccauuaacaagaucacuaaaaaucugaacucuuuauccgaacuggaggugaagaaucuccaaaggcuuagcggcgcaauggaugaacugcacaacgagauauuggagcuagacgaaaaaguagacgaucugcgggccgacacgauuucgucucagaucgagcucgcuguucugcuuuccaaugaagguaucauuaacucagaggaugaacaccuguuggcgcucgagcguaagcugaaaaagauguuagggcccagugcaguggacaucggcaauggauguuuugagacaaagcauaaaugcaaccagaccugccuggaucgcauugccgcuggcacuuucaaugccggggaauuuagccuaccaaccuucgacucccucaacauaacagcagccucucugaaugaugacggacuugauaaccacaccaucuugcuguauuacagcacugcugccucaagucucgcagucacacugaugauugcgaucuucaucguguauaugauuuccagagacaaugucagcuguucuauaugccuuuga

SEQ ID NO: 154819 - RNA, 1755 nt, Artificial Sequence
  derived and/or modified CDS sequence (opt3) from hemagglutinin__InfluenzaB__AFJ80150
augaaggccaucauugugcugcucauggucguuaccagcaacgcugacagaauaugcacaggcaucacuuccucuaauucaccccacgugguaaaaacggcaacccagggggaagugaacgucacaggagugauuccucuuacuaccacaccaaccaagagucauuucgccaaucugaaagguacuaagacaaggggcaaauuguguccgaccugcuuaaacuguacggaucuggacguugcgcuagggcggcccaugugcgugggaaucacuccuagcgcuaaggccuccauucuccacgaaguccgcccagugaccucuggcuguuuucccaucaugcaugaucgaacaaagauacgucaacugccuaaucuucugagagguuacgagaaaaucagguugucgacucagaacguaauuaaugcagaaaaggccccagggggacccuaucggcucggcaccucaggcagcugcccuaacgcuacaagucgcuccggguucuuugcaaccauggccugggcuguuccaagagacaauaacaaaacggccacuaauccgcugacaguggagguccccuacaucuguaccaaggaagaggaucagauuacuguguggggauuccacucugacaacaaaacacagaugaagaaucuguauggugauagcaacccucaaaaguuuaccuccucagcgaauggcgugacgacccauuacgucagucagaucgggggauucccagaccagacagaggauggcggucucccccagagcgggaggauaguuguggacuauaugguacaaaaaccuggaaagacuggcaccauuguguaccagcggggcaucuuacugccacagaaagucuggugcgcaucugggcgcuccaaggugauuaaaggaucacuucccuugaucggugaagccgauugucugcacgagaaguauggcgggcuaaacaaaagcaagccguacuacacaggagaacacgcuaaggccaucggcaacugcccuauuuggguuaaaacuccccucaagcuggcaaaugguaccaaauaucgaccuccagcuaaacuucugaaggagagaggguuuuucggcgccauagcgggauuuuuggagggcgggugggaaggaaugaucgccgguuggcauggcuacacaagucacggggcacauggaguggcugucgccgcugaccucaagucuacccaggaggccauuaacaagaucacuaaaaaucugaacuccuuaagcgaacuggaggugaagaaucuccaaaggcuuucgggcgcaauggaugaacugcacaacgagauauuggagcuagacgaaaaaguagacgaucugcgggccgacacgauuucuucccagaucgagcucgcuguucugcuuucaaaugaagguaucauuaacagugaggaugaacaccuguuggcgcucgagcguaagcugaaaaagauguuagggcccagcgcaguggacaucggcaauggauguuucgagacaaagcauaaaugcaaccagaccugccuggaucgcauugccgcuggcacuuuuaaugccggggaguucucccuaccaaccuuugacucucucaacauaacagcagccagccugaaugaugacggacuugauaaccacaccaucuugcuguauuacucaacugcugccaguucccucgcagucacacugaugauugcgaucuucaucguguauaugauuagcagagacaaugucucuuguucaauaugccuuuga

SEQ ID NO: 154820 - RNA, 1755 nt, Artificial Sequence
  derived and/or modified CDS sequence (opt3) from hemagglutinin__InfluenzaB__AFJ80161
augaaggccaucauugugcugcucauggucguuaccagcaacgcugacagaauaugcacaggcaucacuuccucuaauucaccccacgugguaaaaacggcaacccagggggaagugaacgucacaggagccauuccucuuacuaccacaccaaccaagagucauuucgcgaaucugaaagguacuaagacaaggggcaaauuguguccgaccugcuuaaacuguacggaucuggacguggcucuagggcggcccaugugcguuggaaucacuccuagcgccaaggcauccauucuccacgaagugcgcccagucaccucuggcuguuuucccaucaugcaugaucgaacaaagauacgucaacugccuaaucuucugagagguuacgagaaaaucagguugucgacucagaacgugauuaaugccgaaaaggcuccagggggacccuaucggcucggcaccucaggcagcugcccuaacgcaacaagucgcuccggguucuuugccaccauggcuugggccguaccaagagacaauaacaaaacggcgacuaauccgcugacaguugaggugccccacaucuguaccaaggaagaggaucagauuacugucuggggauuccauucugacaacaaaacacagaugaagaaucuguacggugauagcaacccucaaaaguuuaccuccucagcaaauggcaucacgacccacuaugugagucagauagggggauucccagaccagacagaggauggcggucucccccagagcgggaggauuguggucgacuacaugguucaaaaaccuggaaagacuggcaccaucguguaucagcggggcauuuuacugccacagaaaguauggugcgccucugggcgcuccaaggugaucaaaggaucacuucccuugaucggugaagcugauugucugcacgagaaguacggcgggcuaaacaaaagcaagccguauuacacaggagaacaugccaaggcaauuggcaacugcccuauaugggucaaaacuccccucaagcuggcuaaugguaccaaauaccgaccuccagccaaacuucugaaggagagaggguuuuucggcgcgaucgccggauuuuuggagggcgggugggaaggaaugauugcagguuggcacggcuauacaagucauggggcucacggaguggccguugcugccgaccucaagucuacccaggaggcaaucaacaagauaacuaaaaaucugaacuccuuaagcgaacuggaggugaagaaucuccaaaggcuuucgggcgccauggaugaacugcacaacgagauuuuggagcuagacgaaaaagucgacgaucugcgggcugacacgaucucuucccagaucgagcucgcggugcugcuuucaaaugaagguauuaucaacagugaggaugaacaucuguuggcacucgagcguaagcugaaaaagauguuagggcccagcgccguagacauuggcaauggauguuucgagacaaagcacaaaugcaaccagaccugccuggaucgcauagcugccggcacuuuuaaugcaggggaguucucccuaccaaccuuugacucucucaacaucacagccgcuagccugaaugaugacggacuugauaaccauaccauuuugcuguacuauucaacugccgcaaguucccucgcgguuacacugaugaucgcuaucuucauuguguacaugauauucagagacaaugucagcuguucuaucugccuuuga

SEQ ID NO: 154821 - RNA, 1755 nt, Artificial Sequence
  derived and/or modified CDS sequence (opt3) from hemagglutinin__InfluenzaB__AFJ80172
augaaggccaucauugugcugcucauggucguuaccagcaacgcugacagaauaugcacaggcaucacuuccucuaauucaccccacgugguaaaaacggcaacccagggggaggugaacgucacaggagugauuccucuuacuaccacaccaaccaagagucauuucgccaaucugaaagguacuaagacaaggggcaaauuguguccgaccugcuuaaacuguacggaucuggacguugcgcuagggcggcccaugugcgugggaaucacuccuagcgcuaaggccuccauucuccacgaaguccgcccagugaccucuggcuguuuucccaucaugcaugaucgaacaaagauacgucaacugccuaaucuucugagagguuacgagaaaaucagguugucgacucagaacguaauuaaugcagaaaaggccccagggggacccuaucggcucggcaccucaggcagcugcccuaacgcuacaagucgcuccggguucuuugcaaccauggccugggcuguuccaagagacaauaacaaaacggccacuaauccgcugacaguggagguccccuacaucuguaccaaggaagaggaucagauuacuguguggggauuccacucugacaacaaaacacagaugaagaaucuguauggugauagcaacccucaaaaguuuaccuccucagcgaauggcgugacgacccauuacgucagucagaucggggacuucccagaucagacagaggacggaggccucccccagagcgguaggauaguuguggauuauaugguacaaaaaccugggaagacuggaaccauuguguaccagcggggcaucuuacugccacagaaagucuggugcgcaucuggccgcuccaaggugauuaaagggucacuucccuugaucggagaagccgacugucugcacgagaaguaugguggccuaaacaaaagcaagccguacuacacaggggaacacgcuaaggccaucggaaacugcccuauuuggguuaaaacuccccucaagcuggcaaauggcaccaaauaucgaccuccagcuaaacuucugaaggagagagguuucuucggggccauagcgggcuuuuuggagggaggcugggaagggaugaucgccggauggcaugguuacacaagucacggcgcacaugggguggcugucgccgcugaucucaagucuacccaggaggccauuaacaagaucacuaaaaaucugaacuccuuaagcgaacuggaggugaagaaucuccaaaggcuuucgggagcaauggacgaacugcacaacgagauauuggagcuagacgaaaaaguagaugaccugcgggccgauacgauuucuucccagaucgagcucgcuguucugcuuucaaaugaaggcaucauuaacagugaggacgaacaccuguuggcgcucgagcguaagcugaaaaagauguuaggucccagcgcaguggauaucgggaauggcuguuucgagacaaagcauaaaugcaaccagaccugccuggaccgcauugccgcuggaacuuuuaaugccggcgaauuuucccuaccaaccuuugauucucucaacauaacagcagccagccugaaugacgaugggcuugacaaccacaccaucuugcuguauuacucaacugcugccaguucccucgcagucacacugaugauugcgaucuucaucguguauaugauuagcagagauaaugucucuuguucaauaugccuuuga

SEQ ID NO: 154822 - RNA, 1755 nt, Artificial Sequence; identical to SEQ ID NO: 154808
  derived and/or modified CDS sequence (opt3) from hemagglutinin__InfluenzaB__AFJ80183

SEQ ID NO: 154823 - RNA, 1755 nt, Artificial Sequence; identical to SEQ ID NO: 154819
  derived and/or modified CDS sequence (opt3) from hemagglutinin__InfluenzaB__AFJ80194

SEQ ID NO: 154824 - RNA, 1755 nt, Artificial Sequence; identical to SEQ ID NO: 154808
  derived and/or modified CDS sequence (opt3) from hemagglutinin__InfluenzaB__AFJ80205

SEQ ID NO: 154825 - RNA, 1755 nt, Artificial Sequence; identical to SEQ ID NO: 154453
  derived and/or modified CDS sequence (opt3) from hemagglutinin__InfluenzaB__AFJ80216

SEQ ID NO: 154826 - RNA, 1755 nt, Artificial Sequence; identical to SEQ ID NO: 154808
  derived and/or modified CDS sequence (opt3) from hemagglutinin__InfluenzaB__AFJ80227

SEQ ID NO: 154827 - RNA, 1758 nt, Artificial Sequence
  derived and/or modified CDS sequence (opt3) from hemagglutinin__InfluenzaB__AFJ80238
augaaggccaucauugugcugcucauggucguuaccagcaacgcugacagaauaugcacaggcaucacuuccucuaauucaccccacgugguaaaaacggcaacccagggggaagugaacgucacaggagugauuccucuuacuaccacaccaaccaagagucauuucgccaaucugaaagguacuaagacaaggggcaaauuguguccgaagugcuuaaacuguaccgaucuggacguugcgcuagggcggcccaagugcacgggaaauaucccuagcgcuaaaguguccauucuccacgaaguccgcccagugacuucuggcuguuuucccaucaugcaugaucgaaccaagauacgucaacugccuaaccuucugagagguuacgagcacaucagguugucgauucauaauguaaucaacgccgaaaaagcaccagggggacccuauaagauuggcacaucaggcagcugcccuaauguuacuaacgggaauggauucuuugccaccauggcuugggcagugccgaaaaacgacaauaacaagacagccaccaauagucucacgaucgaggucccauacauauguacugaaggugaggaucagauuacaguguggggcuuccacuccgacaacgagacccagauggcuaagcuguauggggauucuaaaccccagaaguuuacuagcuccgccaacggagugacaacccacuacgucucacaaaucggcgguuucccuaaucagacggaagacgggggacugccacagaguggccggauuguuguggauuauaugguacagaaaagcggcaagaccgggacaaucacuuaccaacgcggaauccucuuaccccagaaaguguggugcgcgucugguagauccaaggucauuaaaggcucacugccucuuauaggggaggcagacuguuugcaugaaaaguauggaggccugaacaagagcaaaccauacuacaccggugagcacgccaaggcuaucgggaauugccccauuugggugaaaacaccgcuaaagcucgccaacggcacuaaauauaggccucccgcaaagcugcuuaaggagcggggauuuuucggcgcuaucgccggguuucuggaaggagguugggagggcaugauagcgggguggcauggauacaccagucacggcgcccacgguguugcaguggcugccgauuugaaaucuacacaggaagcuauuaauaagaucaccaaaaaccucaauucccugagcgaguuagaagucaagaaccugcagcgccucucgggggccauggacgagcuucauaaugagauccuggaauuggaugagaaaguggacgaccuacgagcagauacuauuucuucccaaaucgaacuggccguacuccugucaaacgagggcauuauaaauagugaagacgagcaccuucuggcuuuggagagaaagcucaagaaaaugcugggaccaagcgcgguugaaaucggcaacggguguuucgagacgaagcauaaaugcaaucagacaugcuuagauaggauugcagccggaaccuuugacgcuggugaguucucccugccuacuuuugauucucuaaacaucaccgccgcaagccucaaugacgauggccuggacaaccacacaauccuuuuguauuacucaaccgccgcuaguucccuggccgugacucucaugauugcaauauucgucguguauauggucagccgggauaacgugucuuguucaaucugccuguga

SEQ ID NO: 154828 - RNA, 1755 nt, Artificial Sequence
  derived and/or modified CDS sequence (opt3) from hemagglutinin__InfluenzaB__AFJ80656
augaaggccaucauugugcugcucauggucguuaccagcaacgcugacagaauaugcacaggcaucacuuccucuaauucaccccacgugguaaggacggcaacccagggggaagugaacgucacaggagugauuccucuuacuaccacaccaaccaaaagucauuucgccaaucugaaggguacuaaaacacggggcaaguuguguccgaccugcuuaaacuguacggaucuggacguugcgcuagggcgccccaugugcgugggaaucacuccuagcgcuaaagccuccauucuccacgaaguccgaccagugaccucuggcuguuuucccaucaugcaugaucguacaaagauaagacaacugccuaaucuucugagggguuacgagaagauccgguugucgacucagaacguaauuaaugcagaaaaagccccagggggacccuaucgccucggcaccucaggcagcugcccuaacgcuacaaguagauccggguucuuugcaaccauggccugggcuguuccaagggacaauaacaagacggccacuaauccgcugacaguggaggucccccacaucuguaccaaagaagaggaucagauuacuguguggggauuccauucugacaacaagacacagaugaaaaaucuguacggugauagcaacccucaaaaguuuaccuccucagcgaauggcgugacgacccacuaugucagucagaucgggggauucccagaccagacagaggauggcggucucccccagagcgggcggauaguuguggacuacaugguacaaaagccuggaaaaacuggcaccauuguguaucagcgcggcaucuuacugccacagaaggucuggugcgcaucugggcgauccaaagugauuaagggaucacuucccuugaucggugaagccgauugucugcacgagaaauacggcgggcuaaacaagagcaaaccguauuacacaggagaacaugcuaaggccaucggcaacugcccuauuuggguuaagacuccccucaaacuggcaaaugguaccaaguacagaccuccagcuaaacuucugaaggagaggggguuuuucggcgccauagcgggauuuuuggagggcgggugggaaggaaugaucgccgguuggcacggcuauacaagucauggggcacacggaguggcugucgccgcugaccucaaaucuacccaggaggccauuaacaagaucacuaagaaucugaacuccuuaagcgaacuggaggugaaaaaucuccaacggcuuucgggcgcaauggaugaacugcacaacgagauauuggagcuagacgaaaagguagacgaucugcgugccgacacgauuucuucccagaucgagcucgcuguucugcuuucaaaugaagguaucauuaacagugaggaugaacaucuguuggcgcucgagcgcaaacugaagaaaauguuagggcccagcgcaguggacaucggcaauggauguuucgagacaaagcacaagugcaaccagaccugccuggauagaauugccgcuggcacuuuuaaugccggggaguucucccuaccaaccuuugacucucucaacauaacagcagccagccugaaugaugacggacuugauaaccauaccaucuugcuguacuauucaacugcugccaguucccucgcagucacacugaugauugcgaucuucaucguguacaugauuagcagggacaaugucucuuguucaauaugccuuuga

SEQ ID NO: 154829 - RNA, 1755 nt, Artificial Sequence; identical to SEQ ID NO: 154808
  derived and/or modified CDS sequence (opt3) from hemagglutinin__InfluenzaB__AFJ80667

SEQ ID NO: 154830 - RNA, 1755 nt, Artificial Sequence; identical to SEQ ID NO: 154808
  derived and/or modified CDS sequence (opt3) from hemagglutinin__InfluenzaB__AFJ80678

SEQ ID NO: 154831 - RNA, 1755 nt, Artificial Sequence; identical to SEQ ID NO: 154808
  derived and/or modified CDS sequence (opt3) from hemagglutinin__InfluenzaB__AFJ80689

SEQ ID NO: 154832 - RNA, 1755 nt, Artificial Sequence
  derived and/or modified CDS sequence (opt3) from hemagglutinin__InfluenzaB__AFJ80711
augaaggccaucauugugcugcucauggucguuaccagcaacgcugacagaauaugcacaggcaucacuuccucuaauucaccccacgugguaaaaacggcaacccagggggaggugaacgucacaggagugauuccucuuacuaccacaccaaucaagaguuacuucgccaaucugaaagguaccaagacuaggggcaaauuguguccggauugcuuaaacuguacagaccuggauguugcgcuagggcggcccaugugcgugggaaccacgccuagcgcuaaggccuccauucuccaugaaguccgcccagugacuucuggcuguuuucccaucaugcacgaccgaaccaagauacgucaacugccuaaucuucugagagguuaugagaacaucagguugucgacacagaauguaauugaugcagaaaaagccccagggggacccuaccggcucggcacuucaggcagcugcccuaacgcuaccaguaaguccggguucuuugcaacaauggccugggcuguuccaaaagacaauaacaagaaugccaccaacccgcugacgguggagguccccuauguguguacugaaggagaggaucagaucacagugugggguuuccauucugacaauaaaacccagaugaagaaccuguacggcgauagcaauccucaaaaguuuacuuccucagcgaacggggucacaacccacuauguuagucagauuggaggcuucccagaccagacggaggauggugggcucccccagagcggacgcaucgugguagacuacauggugcaaaaaccuggcaagaccggcacaauagucuaucagagagggguguuacugccacagaaaguuuggugcgcaucuggaagguccaaggugauuaaagguucacuucccuugaucggcgaagccgauugucugcaugagaaguacgggggacuaaacaaaagcaagccguacuauacuggcgaacacgcuaaggccauugguaauugcccuaucugggucaaaaccccacucaagcuggcaaacgggacaaaauaccggcccccugcuaagcugcugaaagagcgcggcuuuuucggagccaucgcgggcuuuuuggaagggggaugggaagguaugauugccggcuggcacggguauacaagucauggagcacacggcguggcuguagccgcugaccucaagucuacccaggaggccauaaauaagaucacuaaaaaccuuaauuccuuaagcgaacuggagguuaagaaccuccaacgacuuucgggugcaauggacgaacugcauaaugagauuuuggagcuagaugaaaaaguggacgaucugagagccgacaccaucucuucccagauagagcucgcuguccugcuuucaaacgaagggauuaucaauagugaggaugaacaccuguuggcgcucgagaggaagcugaaaaagauguuaggccccagcgcaguggacaucggaaacggcuguuucgagacuaagcacaaaugcaaucagacgugccuggaucggauugccgcugggacauuuaacgccggagaguucucccuaccaaccuuugacucucucaauaucacugcagccagccugaacgaugacggucuugauaaucauaccauuuugcuguacuauucaacagcugccaguucccucgcagucacccugaugcuugcgauauucaucguguacaugguuagccgugacaacgugucuuguucaauuugccuguga

SEQ ID NO: 154833 - RNA, 1755 nt, Artificial Sequence; identical to SEQ ID NO: 154832
  derived and/or modified CDS sequence (opt3) from hemagglutinin__InfluenzaB__AFJ80722

SEQ ID NO: 154834 - RNA, 1755 nt, Artificial Sequence
  derived and/or modified CDS sequence (opt3) from hemagglutinin__InfluenzaB__AFJ80733
augaaggccaucauugugcugcucauggucguuaccagcaacgcugacagaauaugcacaggcaucacuuccucuaauucaccccacgugguaaaaacggcaacccagggggaggugaacgucacaggagugauuccucuuacuaccacaccaaccaagaguuacuucgccaaucugaaagguacuaggacacggggcaaguuguguccggauugcuuaaacuguaccgaccuggauguugcgcuagggcgccccaugugcaugggaacgacuccuagcgcuaaagccuccauccuccaugaagugcgaccagucaccucuggcuguuuucccauuaugcacgaccguacaaagaucagacaacugccuaaucuucugagggguuaugagaacauacgguugucgacucagaaugugaucgaugcagaaaaggccccagggggacccuaccgccucggcaccucaggcagcugcccugacgcuacaaacaaaaguggguucuuugcaaccauggccugggcuguaccaaaggauaauaacaaaaaugccacgaacccgcugacuguugaggugcccuauauuuguacagaaggagaggaccagaucaccgucugggguuuccauuccgauaauaagacucagaugaaaaaccuguacggcgacucuaauccucaaaaguuuacaagcuccgcgaacggggugaccacgcacuaugugucacagauuggaggcuucccagaucagaccgaggacggugggcucccccagaguggaagaaucgucguugauuacaugaugcaaaagccuggcaaaacaggcacuauaguguaucagaggggaguauuacugccacagaagguguggugcgcaagcgggcggucuaaagucauuaaggguucccuucccuugaucggcgaagccgacugucugcaugagaaauacgggggacuaaacaagucaaaaccguacuauaccggcgaacacgcuaaggccauugguaauugcccuaucugggugaagacaccccucaaacuggcaaacgggacuaaguaccgcccuccagcuaaacuucugaaggagcgaggcuuuuucggagccaucgcgggcuuuuuggaagggggaugggaagguaugauugccggcuggcacggguauaccagccauggagcacacggcguugcuguggccgcugaccucaaaaguacacaggaggccauaaauaagaucaccaagaacuuaaauucucuguccgaacuggaggucaaaaaccuccaaagacuuagcggugcaauggaugaacugcauaaugagauuuuggagcuagacgaaaagguggaugaccugagggccgauacuaucucgucucagauagagcucgcuguacugcuuuccaacgaagggauuaucaauucagaggacgaacaccuguuggcgcucgagcggaaacugaagaaaauguuaggccccagugcaguugauaucggaaacggcuguuucgagacgaagcacaagugcaaucagacaugccuggaccguauugccgcugggaccuuuaacgccggagaguucagccuaccaacuuuugauucccucaauaucaccgcagccucucugaacgacgauggucuugacaaucauacaauuuugcuguacuauagcaccgcugccucaagucucgcagugacucugaugcuugcgauauucaucgucuacauggugucccgcgacaacgucagcuguucuauuugccuguga

SEQ ID NO: 154835 - RNA, 1758 nt, Artificial Sequence; identical to SEQ ID NO: 154562
  derived and/or modified CDS sequence (opt3) from hemagglutinin__InfluenzaB__AFJ80744

SEQ ID NO: 154836 - RNA, 1758 nt, Artificial Sequence; identical to SEQ ID NO: 154562
  derived and/or modified CDS sequence (opt3) from hemagglutinin__InfluenzaB__AFJ80755

SEQ ID NO: 154837 - RNA, 1758 nt, Artificial Sequence; identical to SEQ ID NO: 154562
  derived and/or modified CDS sequence (opt3) from hemagglutinin__InfluenzaB__AFJ80781

SEQ ID NO: 154838 - RNA, 1758 nt, Artificial Sequence; identical to SEQ ID NO: 154562
  derived and/or modified CDS sequence (opt3) from hemagglutinin__InfluenzaB__AFJ80792

SEQ ID NO: 154839 - RNA, 1758 nt, Artificial Sequence; identical to SEQ ID NO: 154562
  derived and/or modified CDS sequence (opt3) from hemagglutinin__InfluenzaB__AFJ80803

SEQ ID NO: 154840 - RNA, 1758 nt, Artificial Sequence; identical to SEQ ID NO: 154562
  derived and/or modified CDS sequence (opt3) from hemagglutinin__InfluenzaB__AFJ80814

SEQ ID NO: 154841 - RNA, 1758 nt, Artificial Sequence
  derived and/or modified CDS sequence (opt3) from hemagglutinin__InfluenzaB__AFJ80825
augaaggccaucauugugcugcucauggucguuaccagcaacgcugacagaauaugcacaggcaucacuuccucuaauucaccccacgugguaaaaacggcaacccagggggaggugaacgucacaggagugauuccucuuacuaccacaccaaccaagagucauuucgccaaucugaaagguacugaaacaaggggcaaguuguguccgaaaugcuuaaacuguaccgaucuggacguugcgcuagggcggcccaagugcacgggaaauaucccuagcgcucgcguguccauucuccacgagguccgaccaaucacuucuggcuguuuucccauaaugcaugaucguaccaagaucagacaacugccuaaccuucugagggguuacgaacacauucgguugucgacacauaaugugaucaacgccgagaaugcaccagggggacccuauaaaauuggcacuucaggcagcugcccuaacguaaccaaugggaacggauucuuugccacaauggcuugggcaguuccaaagaaugacaacaauaaaaccgccacgaacagucucacuaucgaagugccguacauauguacagagggugaggaucagauuaccgucuggggcuuccacuccgacaacgaaacucagauggcuaagcuguauggggauucuaaaccccagaaguuuacaagcuccgccaauggagugaccacgcacuacgugucacaaaucggcgguuucccuaaccagaccgaggacgggggacugccacagaguggccgcauugucguugauuauauggugcaaaagagcggcaaaacagggacuaucaccuaccagagaggaauccucuuaccccagaagguauggugcgcgucugguagguccaaagugauuaagggcucacugccucuuauaggggaagcagacuguuugcaugagaaauauggaggccugaauaagagcaaaccauacuacacaggugagcacgccaaggcuaucgggaacugccccauuugggucaagacuccgcuaaaacucgccaauggcaccaaguaucggccucccgcaaaacugcuuaaggaacgcggauuuuucggcgcuaucgccggguuucuggagggagguugggaaggcaugauagcgggguggcauggauacacaagucacggcgcccacgguguggcaguugcugccgauuugaaaucuacccaggaggcuauuaacaagaucacuaagaaucucaacucccugagcgaauuagaggugaaaaaucugcagcgacucucgggggccauggacgagcuucauaacgaaauccuggaguuggaugaaaaggucgacgaccuaagagcagauacgauuucuucccaaaucgagcuggccgugcuccugucaaaugaaggcauuauaaacagugaggacgagcaccuucuggcuuuggaaaggaaacucaagaaaaugcugggaccaagcgcgguagagaucggcaauggguguuucgaaacaaagcauaagugcaaccagaccugcuuagaucggauugcagccggaacuuuugacgcuggugaguucucccugccuaccuuugauucucuaaauaucacagccgcaagccucaacgacgauggccuggacaaccacaccauccuuuuguauuacucaacugccgcuaguucccuggccguuacacucaugauugcaauauucguggucuauauggugagccgugauaaugucucuuguucaaucugccuguga

SEQ ID NO: 154842 - RNA, 1758 nt, Artificial Sequence; identical to SEQ ID NO: 154562
  derived and/or modified CDS sequence (opt3) from hemagglutinin__InfluenzaB__AFJ80836

SEQ ID NO: 154843 - RNA, 1758 nt, Artificial Sequence; identical to SEQ ID NO: 154630
  derived and/or modified CDS sequence (opt3) from hemagglutinin__InfluenzaB__AFJ80847

SEQ ID NO: 154844 - RNA, 1758 nt, Artificial Sequence; identical to SEQ ID NO: 154562
  derived and/or modified CDS sequence (opt3) from hemagglutinin__InfluenzaB__AFJ80858

SEQ ID NO: 154845 - RNA, 1758 nt, Artificial Sequence; identical to SEQ ID NO: 154562
  derived and/or modified CDS sequence (opt3) from hemagglutinin__InfluenzaB__AFJ80869

SEQ ID NO: 154846 - RNA, 1758 nt, Artificial Sequence; identical to SEQ ID NO: 154562
  derived and/or modified CDS sequence (opt3) from hemagglutinin__InfluenzaB__AFJ80880

SEQ ID NO: 154847 - RNA, 1758 nt, Artificial Sequence; identical to SEQ ID NO: 154613
  derived and/or modified CDS sequence (opt3) from hemagglutinin__InfluenzaB__AFJ80891

SEQ ID NO: 154848 - RNA, 1758 nt, Artificial Sequence; identical to SEQ ID NO: 154613
  derived and/or modified CDS sequence (opt3) from hemagglutinin__InfluenzaB__AFJ80902

SEQ ID NO: 154849 - RNA, 1758 nt, Artificial Sequence; identical to SEQ ID NO: 154562
  derived and/or modified CDS sequence (opt3) from hemagglutinin__InfluenzaB__AFJ80913

SEQ ID NO: 154850 - RNA, 1758 nt, Artificial Sequence
  derived and/or modified CDS sequence (opt3) from hemagglutinin__InfluenzaB__AFJ80924
augaaggccaucauugugcugcucauggucguuaccagcaacgcugacagaauaugcacaggcaucacuuccucuaauucaccccacgugguaaaaacggcaacccagggggaggugaacgucacaggagugauuccucuuacuaccacaccaaccaagagucauuucgccaaucugaaagguacugaaacaaggggcaaguuguguccgaaaugcuuaaacuguaccgaucuggacguugcgcuagggcggcccaagugcacgggaaauaucccuagcgcucgcguguccauucuccacgagguccgaccagugacuucuggcuguuuucccaucaugcaugaucguaccaagauaagacaacugccuaaccuucugagggguuacgaacacauccgguugucgacacauaauguaauuaacgccgagaaugcaccagggggacccuauaaaaucggcacuucaggcagcugcccuaacguuaccaaugggaacggauucuuugccacaauggcuugggcagugccaaagaaugacaacaauaaaaccgccacgaacagucucacuauugaagucccguacaucugugcugagggugaggaucagauaacaguguggggcuuccacuccgacaacgaaacccagauggccaagcuguauggggauucuaaaccccagaaguuuacuagcuccgcgaauggagugacaacccacuacgucucacaaauuggcgguuucccuaaccagacggaggacgggggacugccacagaguggccgcaucguuguggauuauaugguacaaaagagcggcaaaaccgggacaauuacuuaccagagaggaauccucuuaccccagaagguguggugcgcaucugguagguccaaagucaucaagggcucacugccucuuauuggggaagccgacuguuugcaugagaaauauggaggccugaauaagagcaaaccauacuacaccggugagcacgcuaaggccauagggaacugccccaucugggugaagacaccgcuaaaacucgcaaauggcacuaaguaucggccucccgcuaaacugcuuaaggaacgcggauuuuucggcgccauugcgggguuucuggagggagguugggaaggcaugaucgccggguggcauggauacaccagucacggcgcacacgguguugcuguggccgcugauuugaaaucuacacaggaggccauaaacaagauuaccaagaaucucaacucccugagcgaauuagaggucaaaaaucugcagcgacucucgggggcaauggacgagcuucauaacgaaauccuggaguuggaugaaaagguggacgaccuaagagccgauacuaucucuucccaaauugagcuggcuguacuccugucaaaugaaggcaucauuaacagugaggacgagcaccuucuggcguuggaaaggaaacucaagaaaaugcugggaccaagcgcaguugagauaggcaauggguguuucgaaacgaagcauaagugcaaccagacaugcuuagaucggaucgccgcuggaaccuuugacgccggugaguucucccugccuacuuuugauucucuaaauauuaccgcagccagccucaacgacgauggccuggacaaccacacaauccuuuuguauuacucaaccgcugccaguucccuggcagugacucucaugaucgcgauuuucgucguguauauggucagccgugauaaugugucuuguucaauaugccuguga

SEQ ID NO: 154851 - RNA, 1758 nt, Artificial Sequence; identical to SEQ ID NO: 154613
  derived and/or modified CDS sequence (opt3) from hemagglutinin__InfluenzaB__AFJ80935

SEQ ID NO: 154852 - RNA, 1755 nt, Artificial Sequence; identical to SEQ ID NO: 154474
  derived and/or modified CDS sequence (opt3) from hemagglutinin__InfluenzaB__AFJ80946

SEQ ID NO: 154853 - RNA, 1758 nt, Artificial Sequence
  derived and/or modified CDS sequence (opt3) from hemagglutinin__InfluenzaB__AFJ80957
augaaggccaucauugugcugcucauggucgcuaccagcaacgcagacagaauaugcacaggcaucacuuccucuaauucaccccacguugugaaaacggccacccagggggagguaaacgugacaggagucauuccucuuacuaccacaccaaccaagagucauuucgcgaaucugaaagguacugaaacaaggggcaaguuguguccgaaaugcuuaaacuguaccgaucuggacguggcucuagggcggcccaagugcacgggaaauaucccuagcgcccgcguuuccauucuccacgaggugcgaccagucacuucuggcuguuuucccaucaugcaugaucguaccaagauaagacaacugccuaaccuucugagggguuacgaacacauccgguugucgacacauaaugugauuaacgcagagaaugccccagggggacccuauaaaaucggcacuucaggcagcugcccuaacguaaccaaugggaacggauucuuugcuacaauggcaugggccguuccaaagaaugacaacaauaaaaccgcuacgaacagucucacuauugaagugccguacaucuguacagagggugaggaucagauaaccgucuggggcuuccacuccgacaacgaaacucagauggccaagcuguauggggauucuaaaccccagaaguuuacaagcuccgcgaauggagugaccacgcacuacgugucacaaauuggcgguuucccuaaccagaccgaggacgggggacugccacagaguggccgcaucgucguugauuauauggugcaaaagagcggcaaaacagggacuauuaccuaccagagaggaauccucuuaccccagaagguauggugcgcaucugguagguccaaagugaucaagggcucacugccucuuauuggggaagccgacuguuugcaugagaaauauggaggccugaauaagagcaaaccauacuacacaggugagcacgcuaaggccauagggaacugccccaucugggucaagacuccgcuaaaacucgcaaauggcaccaaguaucggccucccgcuaaacugcuuaaggaacgcggauuuuucggcgccauugcgggguuucuggagggagguugggaaggcaugaucgccggguggcauggauacacaagucacggcgcacacgguguggcuguugccgcugauuugaaaucuacccaggaggccauaaacaagauuacuaagaaucucaacucccugagcgaauuagaggugaaaaaucugcagcgacucucgggggcaauggacgagcuucauaacgaaauccuggaguuggaugaaaaggucgacgaccuaagagccgauacgaucucuucccaaauugagcuggcugugcuccugucaaaugaaggcaucauuaacagugaggacgagcaccuucuggcguuggaaaggaaacucaagaaaaugcugggaccaagcgcaguagagauaggcaauggguguuucgaaacaaagcauaagugcaaccagaccugcuuagaucggaucgccgcuggaacuuuuaaugccggugaguucucccugccuaccuuugacucucuaaacauuacagcagccagccucaacgaugacggccuggauaaucacaccauccuuuuguauuacucaacugcugccaguucccuggcaguuacacucaugaucgcgauuuucguggucuauauggugagccgugacaacgucucuuguucaauaugccuguga

SEQ ID NO: 154854 - RNA, 1755 nt, Artificial Sequence; identical to SEQ ID NO: 154474
  derived and/or modified CDS sequence (opt3) from hemagglutinin__InfluenzaB__AFJ80968

SEQ ID NO: 154855 - RNA, 1755 nt, Artificial Sequence; identical to SEQ ID NO: 154474
  derived and/or modified CDS sequence (opt3) from hemagglutinin__InfluenzaB__AFJ80979

SEQ ID NO: 154856 - RNA, 1755 nt, Artificial Sequence
  derived and/or modified CDS sequence (opt3) from hemagglutinin__InfluenzaB__AFJ80990
augaaggccaucauugugcugcucauggucguuaccagcaacgcugacagaauaugcacaggcaucacuuccucuaauucaccccacgugguaaaaacggcaacccagggggaggugaacgucacaggagugauuccucuuacuaccacaccaaccaagaguuacuucgccaaucugaaagguacuaggacacggggcaaguuguguccggauugcuuaaacuguaccgaccuggauguugcgcuagggcgccccaugugcgugggaacgacuccuagcgcugaagccuccauccuccaugagguccgaccagugaccucuggcuguuuucccauuaugcacgaccguacaaaaaucagacaacugccuaaucuucugagggguuaugaaaacauacgguugucgacucagaauguaaucgaugcagagaaggccccagggggacccuaccgccucggcaccucaggcagcugcccuaacgcuacaaauaagaguggguucuuugcaaccauggccugggcuguuccaaaagacaacaauaagaacgccacgaauccgcugacuguggaaguccccuauauuuguacagagggagaggaucagaucaccgugugggguuuccauuccgacaacaaaacucagaugaagaaucuguacggcgauucuaacccucaaaaauuuacaagcuccgcgaacggggugaccacgcacuaugucucacagauuggaggcuucccagaccagaccgaagauggugggcucccccagaguggaagaaucguuguggacuacaugaugcaaaagccuggcaagacaggcacuauaguauaucagaggggaguguuacugccacagaaagucuggugcgcaagcgggcggucuaaggugauuaaagguucccuucccuugaucggcgaggccgauugucugcaugaaaaguacgggggacuaaauaaaucaaagccguacuauaccggcgagcacgcuaaagccauugguaacugcccuaucuggguuaagacaccccucaagcuggcaaaugggacuaaauaccgcccuccagcuaaacuucugaaggagcgaggcuuuuucggagccaucgcgggcuuuuuggaagggggaugggaggguaugauugccggcuggcacggguauaccagccauggagcacacggcguggcugucgccgcugaccucaagaguacacaggaagccauaaacaaaaucaccaagaaucugaacucuuuauccgagcuggaagugaagaaucuccaaagacuuagcggugcaauggacgagcugcauaacgagauuuuggaacuagaugagaaaguagacgaucugagggccgacacuaucucgucucagauagaacucgcuguucugcuuuccaaugaggggauuaucaacucagaagaugagcaccuguuggcgcucgagcggaagcugaaaaagauguuaggccccagugcaguggacaucggaaauggcuguuucgaaacgaaacacaagugcaaccagacaugccuggaucguauugccgcugggaccuuuaaugccggagaguucagccuaccaacuuuugacucccucaacaucaccgcagccucucugaaugaugacggucuugauaaccauacaauuuugcuguacuauagcaccgcugccucaagucucgcagucacucugaugcuugcgauauucaucguguacauggucucccgcgacaacgugagcuguucuauuugccuguga

SEQ ID NO: 154857 - RNA, 1755 nt, Artificial Sequence; identical to SEQ ID NO: 154474
  derived and/or modified CDS sequence (opt3) from hemagglutinin__InfluenzaB__AFJ81001

SEQ ID NO: 154858 - RNA, 1755 nt, Artificial Sequence; identical to SEQ ID NO: 154474
  derived and/or modified CDS sequence (opt3) from hemagglutinin__InfluenzaB__AFJ84360

SEQ ID NO: 154859 - RNA, 1758 nt, Artificial Sequence; identical to SEQ ID NO: 154562
  derived and/or modified CDS sequence (opt3) from hemagglutinin__InfluenzaB__AFJ90395

SEQ ID NO: 154860 - RNA, 1755 nt, Artificial Sequence; identical to SEQ ID NO: 154474
  derived and/or modified CDS sequence (opt3) from hemagglutinin__InfluenzaB__AFJ90406

SEQ ID NO: 154861 - RNA, 1755 nt, Artificial Sequence; identical to SEQ ID NO: 154474
  derived and/or modified CDS sequence (opt3) from hemagglutinin__InfluenzaB__AFJ90417

SEQ ID NO: 154862 - RNA, 1755 nt, Artificial Sequence; identical to SEQ ID NO: 154474
  derived and/or modified CDS sequence (opt3) from hemagglutinin__InfluenzaB__AFJ90428

SEQ ID NO: 154863 - RNA, 1755 nt, Artificial Sequence; identical to SEQ ID NO: 154474
  derived and/or modified CDS sequence (opt3) from hemagglutinin__InfluenzaB__AFJ90450

SEQ ID NO: 154864 - RNA, 1755 nt, Artificial Sequence; identical to SEQ ID NO: 154474
  derived and/or modified CDS sequence (opt3) from hemagglutinin__InfluenzaB__AFJ91038

SEQ ID NO: 154865 - RNA, 1755 nt, Artificial Sequence
  derived and/or modified CDS sequence (opt3) from hemagglutinin__InfluenzaB__AFJ91049
augaaggccaucauugugcugcucauggucguuaccagcaacgcugacagaauaugcacaggcaucacuuccucuaauucaccccacgugguaaaaacggcaacccagggggaggugaacgucacaggagugauuccucuuacuaucaccccaacaaagaguuacuucgccaaucugaaagguaccaggacucggggcaaguuguguccggauugcuuaaacuguacagaccuggauguugcgcuagggcgccccaugugcgugggaaccacgccuagcgcuaaagccuccauucuccaugaaguccgaccagugacuucuggcuguuuucccaucaugcacgaccguaccaagauaagacaacuggcaaaucuucugagggguuaugagaacauccgguugucgacacagaauguaauugaugccgaaaaggcuccugggggaccauaccgccucggcacuucaggcagcugccccaacgcaaccaguaaauccggguucuuugccacaauggcuugggccguuccuaaggacaauaacaaaaaugcgaccaacccacugacgguggaggucccguauaucuguacugaaggagaggaucagauuacagugugggguuuccauucugacaauaagacccagaugaaaaaccuguacggcgauagcaauccccaaaaguuuacuuccucagcaaacggggugacaacccacuaugucagucagaucggaggcuucccugaccagacggaggauggugggcucccacagagcggaagaauaguuguggacuacaugaugcaaaagcccggcaaaaccggcacaauuguauaucagcgcgggguguuacugccucagaaggucuggugcgccucuggacgguccaaagugaucaaggguucacuuccauugauuggcgaagcugauugucugcaugagaaauacgggggacuaaacaagagcaaacccuacuauacuggcgaacacgccaaggcaaucgguaauugcccgaucuggguuaagaccccucucaaacuggcuaacgggacaaaguacaggcccccagccaaacuucugaaggagcgaggcuuuuucggagcgauugccggcuuuuuggaagggggaugggaagguaugauagcaggcuggcacggguauacuucccauggagcucacggcguggccgucgcugccgaccucaaaucuacccaggaggcaaucaauaagauuacaaagaaccugaauaguuuaagcgaacuggaggugaaaaaccuccaaagacuuucgggugccauggacgaacugcauaaugagaucuuggagcuagaugaaaagguagacgaucugagggcugacaccauaucuucccagauugagcucgcgguucugcuuucaaacgaagggaucaucaauagugaggaugaacaccuguuggcacucgagcggaaacugaagaaaauguuaggcccuagcgccguggacauuggaaacggcuguuucgagacuaagcacaagugcaaucagacgugccuggaucguaucgcugccgggacauuuaacgcaggagaguucucccuacccaccuuugacucucucaauauuacugccgcuagccugaacgaugacggucuugauaaucauaccauauugcuguacuauucaacagccgcaaguucccucgcggucacccugaugcuugcuaucuucauuguguacauggucagccgcgacaacgugucuuguucaaucugccuguga

SEQ ID NO: 154866 - RNA, 1758 nt, Artificial Sequence
  derived and/or modified CDS sequence (opt3) from hemagglutinin__InfluenzaB__AFJ91060
augaaggccaucauugugcugcucauggucguuaccagcaacgcugacagaauaugcacaggcaucacuuccucuaauucaccccacgugguaaaaacggcaacccagggggaggugaacgucacaggagugauuccucuuacuaccacaccaaccaagagucauuucgccaaucugaaagguacugaaacaaggggcaaguuguguccgcggugcuuaaacuguaccgaucuggacguugcgcuagggcgccccaaaugcacgggaaauaucccuagcgcucgaguguccauucuccacgagguccguccagugacuucuggcuguuuucccaucaugcaugauagaaccaagauaaggcaacugccuaaccuucugcgggguuacgaacacauccgcuugucgacacauaauguaauuaacgccgagaaugcaccagggggacccuauaagaucggcacuucaggcagcugcccuaacguuaccaaugggaacggauucuuugccacaauggcuugggcagugccaaagaaugacaacaauaagaccgccacgaacagucucacuauugaagucccguacaucuguacagagggugaggaucagauaaccguguggggcuuccacuccgacaacgaagcucagauggccaaacuguauggggauucuaagccccagaaauuuacuagcuccgcgaauggagugacaacccacuacgucucacaaauuggcgguuucccuaaccagacggaggacgggggacugccacagaguggcagaaucguuguggauuauaugguacagaaaagcggcaagaccgggacaauuacuuaccaaaggggaauccucuuaccccagaaaguguggugcgcaucuggucgguccaaggucaucaaaggcucacugccucuuauuggggaagccgacuguuugcaugagaaguauggaggccugaauaaaagcaagccauacuacaccggugagcacgcuaaagccauagggaacugccccaucugggugaagacaccgcuaaagcucgcaaauggcacuaaauaucgcccucccgcuaagcugcuuaaagaacgaggauuuuucggcgccauugcgggguuucuggagggagguugggaaggcaugaucgccggguggcauggauacaccagucacggcgcacacgguguugcuguggccgcugauuugaagucuacacaggaggccauaaacaaaauuaccaagaaucucaacucccugagcgaauuagaggucaagaaucugcagagacucucgggggcaauggacgagcuucauaacgaaauccuggaguuggaugaaaaaguggacgaccuaagggccgauacuaucucuucccaaauugagcuggcuguacuccugucaaaugaaggcaucauuaacagugaggacgagcaccuucuggcguuggaacggaagcucaaaaagaugcugggaccaagcgcaguugagauaggcaauggguguuucgaaacgaaacauaagugcaaccagacaugcuuagaucguaucgccgcuggaaccuuugacgccggugaguucucccugccuacuuuugauucucuaaauauuaccgcagccagccucaacgacgauggccuggacaaccacacaauccuuuuguauuacucaaccgcugccaguucccuggcagugacucucaugaucgcgauuuucgucguguauauggucagccgcgauaaugugucuuguucaauaugccuguga

SEQ ID NO: 154867 - RNA, 1755 nt, Artificial Sequence; identical to SEQ ID NO: 154474
  derived and/or modified CDS sequence (opt3) from hemagglutinin__InfluenzaB__AFJ91071

SEQ ID NO: 154868 - RNA, 1755 nt, Artificial Sequence
  derived and/or modified CDS sequence (opt3) from hemagglutinin__InfluenzaB__AFJ91082
augaaggccaucauugugcugcucauggucguuaccagcaacgcugacagaauaugcacaggcaucacuuccucuaauucaccccacgugguaaaaacggcaacccagggggaagugaacgucacaggagugauuccucuuacuaccacaccaaccaagaguuacuucgccaaucugaaagguacuaggacacggggcaaguuguguccggauugcuuaaacuguaccgaccuggauguugcgcuagggcgccccaugugcgugggaacgacuccuagcgcuaaagccuccauccuccaugaaguccgaccagugaccucuggcuguuuucccauuaugcacgaccguacaaagaucagacaacugccuaaucuucugagggguuaugagaacauacgguugucgacucagaauguaaucgaugcagaaaaggccccagggggacccuaccgccucggcaccucaggcagcugcccuaacgcuacaaguaaaauuggguucuuugcaaccauggccugggcuguuccaaaggacaauuauaaaaacgccacgaauccgcugacuguggagguccccuacaucuguacagaaggagaggaucagauuaccgugugggguuuccauuccgacaacaagacucagaugaaaaaucuguauggcgauucuaacccucaaaaguuuacaagcuccgcgaauggggugaccacgcacuacgucucacagaucggagacuucccagaucagaccgaggacggcggucucccccagagugggagaauaguuguggauuauaugaugcaaaagccuggaaaaacaggcacuauuguauaccagaggggcguguuacugccacagaaggucuggugcgcaagcgggcggucuaaagugaucaagggaucccuucccuugauuggugaagccgacugucugcaugagaaauacggcgggcuaaacaagucaaaaccguauuacaccggagaacacgcuaaggccaucggcaacugcccuaucuggguuaagacaccccucaaacuggcaaaugguacuaaguaucgcccuccagcuaaacuucugaaggagcgaggguuuuucggcgccauugcgggauuuuuggagggcgggugggaaggaaugauagccgguuggcacggcuacaccagccauggggcacacggaguggcugucgccgcugaccucaaaaguacacaggaggccaucaacaagauuaccaagaaucugaacucuuuauccgaacuggaggugaaaaaucuccaaagacuuagcggcgcaauggaugaacugcauaacgagaucuuggagcuagacgaaaagguagaugaccugagggccgauacuauaucgucucagauugagcucgcuguucugcuuuccaaugaagguaucaucaacucagaggacgaacaccuguuggcgcucgagcggaaacugaagaaaauguuagggcccagugcaguggauauuggcaauggauguuucgagacgaagcacaagugcaaccagacaugccuggaccguaucgccgcuggcaccuuuaaugccggggaguucagccuaccaacuuuugauucccucaacauuaccgcagccucucugaaugacgauggacuugacaaccauacaauauugcuguauuacagcaccgcugccucaagucucgcagucacucugaugcuugcgaucuucauuguguauauggucucccgcgacaaugugagcuguucuaucugccuguga

SEQ ID NO: 154869 - RNA, 1755 nt, Artificial Sequence; identical to SEQ ID NO: 154868
  derived and/or modified CDS sequence (opt3) from hemagglutinin__InfluenzaB__AFJ91093

SEQ ID NO: 154870 - RNA, 1755 nt, Artificial Sequence; identical to SEQ ID NO: 154868
  derived and/or modified CDS sequence (opt3) from hemagglutinin__InfluenzaB__AFJ91104

SEQ ID NO: 154871 - RNA, 1755 nt, Artificial Sequence; identical to SEQ ID NO: 154868
  derived and/or modified CDS sequence (opt3) from hemagglutinin__InfluenzaB__AFJ91115

SEQ ID NO: 154872 - RNA, 1758 nt, Artificial Sequence
  derived and/or modified CDS sequence (opt3) from hemagglutinin__InfluenzaB__AFJ91704
augaaggccaucauugugcugcucauggucguuaccagcaacgcugacagaauaugcacaggcaucacuuccucuaauucaccccacgugguaaaaacggcaacccagggggaggugaacgucacaggagugauuccucuuacuaccacaccaaccaagagucauuucgccaaucugaaagguacugaaacaaggggcaaguuguguccgaaaugcuuaaacuguaccgaucuggacguugcgcuagggcggcccaagugcacgggaaauaucccuagcgcucgcguguccauucuccacgagguccgaccagugacuucuggcuguuuucccaucaugcaugaucguaccaagauaagacaacugccuaaccuucugagggguuacgaacacauccgguugucgacacauaauguaauuaacgccgagaaugcaccagggggacccuauaaaaucggcacuucaggcagcugcccuaacguuaccaaugggaagggauucuuugccacaauggcuugggcagugccgaaaaacgacaauaacaagaccgccacgaauagucucacuauugaagucccauacaucuguacagagggugaggaucagauaaccguguggggcuuccacuccgacaacgaaacucagauggcuaaacuguauggggauucuaagccccagaaguuuacaagcuccgccaacggagugaccacgcacuacgucucacaaauuggcgguuucccuaaucagaccgaggacgggggacugccacagaguggccgcaucguuguggauuauaugguacagaaaagcggcaagacagggacuauuaccuaccaaagaggaauccucuuaccccagaaaguguggugcgcgucugguagguccaaggucaucaaaggcucacugccucuuauuggggaagcagacuguuugcaugagaaguauggaggccugaacaaaagcaagccauacuacacaggugagcacgccaaggcuauagggaauugccccaucugggugaaaacuccgcuaaagcucgccaacggcaccaaauaucggccucccgcaaagcugcuuaaagaacgcggauuuuucggcgcuauugccggguuucuggagggagguugggaaggcaugaucgcgggguggcauggauacacaagucacggcgcccacgguguugcaguggcugccgauuugaagucuacccaggaggcuauaaauaagauuacuaaaaaccucaauucccugagcgaauuagaggucaagaaccugcagcgacucucgggggccauggacgagcuucauaaugaaauccuggaguuggaugaaaaaguggacgaccuaagagcagauacgaucucuucccaaauugagcuggccguacuccugucaaacgaaggcaucauuaauagugaggacgagcaccuucuggcuuuggaaaggaagcucaaaaagaugcugggaccaagcgcgguugagauaggcaacggguguuucgaaacaaagcauaaaugcaaucagaccugcuuagaucggaucgcagccggaacuuuugacgcuggugaguucucccugccuaccuuugauucucuaaacauuacagccgcaagccucaaugacgauggccuggacaaccacaccauccuuuuguauuacucaacugccgcuaguucccuggccgugacacucaugaucgcaauuuucgucguguauauggucagccgugauaacgugucuuguucaauaugccuguga

SEQ ID NO: 154873 - RNA, 1755 nt, Artificial Sequence
  derived and/or modified CDS sequence (opt3) from hemagglutinin__InfluenzaB__AFK09797
augaaggccaucauugugcugcucauggucguuaccagcaacgcugacagaauaugcacaggcaucacuuccucuaauucaccccacgugguaaaaacggcaacccagggggaggugaacgucacaggagugauuccucuuacuaccacaccaaucaagaguuacuucgccaaucugaaagguaccaagacuaggggcaaauuguguccggauugcuuaaacuguacagaccuggauguugcgcuagggcggcccaugugcgugggaaccacgccuagcgcuaaggccuccauucuccaugaaguccgcccagugacuucuggcuguuuucccaucaugcacgaccgaaccaagauacgucaacugccuaaucuucugagagguuaugagaacaucagguugucgacacagaauguaauugaugcagaaaaagccccagggggacccuaccggcucggcacuucaggcagcugcccuaacgcuaccaguaaguccggguucuuugcaacaauggccugggcuguuccaaaagacaauaacaagaaugccaccaacccgcugacgguggagguccccuauguguguacugaaggagaggaucagaucacagugugggguuuccauucugacaauaaaaaccagaugaagaaucuguacggcgauagcaacccucaaaaguuuaccuccucagcgaacggggucacuacacacuauguuagucagauuggaggcuucccagaccagaccgaggauggugggcucccccagagcggacgcaucgugguagacuacauggugcaaaaaccuggcaagacgggcaccauagucuaucagagagggguguuacugccacagaaaguuuggugcgcaucuggaagguccaaggugauuaaagguucacuucccuugaucggcgaagccgauugucugcaugagaaguacgggggacuaaauaaaagcaagccguacuauacaggcgaacacgcuaaggccauugguaacugcccuaucugggucaaaacuccccucaagcuggcaaaugggaccaaauaccggccuccagcuaaacuucugaaggagcgcggcuuuuucggagccaucgcgggcuuuuuggaagggggaugggaagguaugauugccggcuggcacggguauacaagucauggagcacacggcguggcuguagccgcugaccucaagucuacucaggaggccauaaacaagaucaccaaaaaucugaacuccuuaagcgaacuggagguuaagaaucuccaacgacuuucgggugcaauggacgaacugcauaacgagauuuuggagcuagaugaaaaaguggacgaucugagagccgacacaaucucuucccagauagagcucgcuguccugcuuucaaaugaagggauuaucaacagugaggaugaacaccuguuggcgcucgagaggaagcugaaaaagauguuaggccccagcgcaguggacaucggaaauggcuguuucgagaccaagcacaaaugcaaccagacuugccuggaucggauugccgcugggacguuuaaugccggagaguucucccuaccaacauuugacucucucaacaucaccgcagccagccugaaugaugacggucuugauaaccauacuauuuugcuguacuauucaaccgcugccaguucccucgcagucacacugaugcuugcgauauucaucguguacaugguuagccgugacaacgugucuuguucaauuugccuguga

SEQ ID NO: 154874 - RNA, 1755 nt, Artificial Sequence; identical to SEQ ID NO: 154868
  derived and/or modified CDS sequence (opt3) from hemagglutinin__InfluenzaB__AFN54654

SEQ ID NO: 154875 - RNA, 1755 nt, Artificial Sequence; identical to SEQ ID NO: 154615
  derived and/or modified CDS sequence (opt3) from hemagglutinin__InfluenzaB__AFN54665

SEQ ID NO: 154876 - RNA, 1755 nt, Artificial Sequence; identical to SEQ ID NO: 154615
  derived and/or modified CDS sequence (opt3) from hemagglutinin__InfluenzaB__AFN54676

SEQ ID NO: 154877 - RNA, 1755 nt, Artificial Sequence; identical to SEQ ID NO: 154868
  derived and/or modified CDS sequence (opt3) from hemagglutinin__InfluenzaB__AFN54687

SEQ ID NO: 154878 - RNA, 1755 nt, Artificial Sequence
  derived and/or modified CDS sequence (opt3) from hemagglutinin__InfluenzaB__AFN54698
augaaggccaucauugugcugcucauggucguuaccagcaacgcugacagaauaugcacaggcaucacuuccucuaauucaccccacgugguaaaaacggcaacccagggggaggugaacgucacaggagugauuccucuuacuaccacaccaaccaagaguuacuucgccaaucugaaagguacuaggacacggggcaaguuguguccggauugcuuaaacuguaccgaccuggauguugcgcuagggcgccccaugugcgugggaacgacuccuagcgcuaaagccuccauccuccaugaaguccgaccagugaccucuggcuguuuucccauuaugcacgaccguacaaagaucagacaacugccuaaucuucugagggguuaugagaacauacgguugucgacucagaauguaaucgaugcagaaaaggccccagggggacccuaccgccucggcaccucaggcagcugcccuaacgcuacaaguaaaauuggguucuuugcaaccauggccugggcuguuccaaaggacaauuauaaaaacgccacgaauccgcugacuguggagguccccuacaucuguacagaaggagaggaucagauuaccgugugggguuuccauuccgacaacaagacucagaugaaaaaucuguauggcgauucuaacccucaaaaguuuaccagcuucgcgaauggggugacaacgcacuacgucucccagaucggagacuuuccagaucagaccgaggacggcggucucccccagucagggagaauaguuguggauuauaugaugcaaaagccuggaaaaacaggcacuauuguauaccagaggggcguguuacugccacagaaggucuggugcgcaagugggcggagcaaagugaucaagggaucucuucccuugauuggugaagccgacugucugcaugagaaauacggcgggcuaaacaaguccaaaccguauuacaccggagaacacgcuaaggccaucggcaacugcccuaucuggguuaagacaccccucaaacuggcaaaugguacuaaguaucgcccuccagcuaaacuucugaaggagcgaggguucuuuggcgccauugcgggauucuuggagggcgggugggaaggaaugauagccgguuggcacggcuacaccucacauggggcacacggaguggcugucgccgcugaccucaaaagcacacaggaggccaucaacaagauuaccaagaaucugaacaguuuaucugaacuggaggugaaaaaucuccaaagacuuuccggcgcaauggaugaacugcauaacgagaucuuggagcuagacgaaaagguagaugaccugagggccgauacuauaagcucgcagauugagcucgcuguucugcuuucuaaugaagguaucaucaacuccgaggacgaacaccuguuggcgcucgagcggaaacugaagaaaauguuagggcccucagcaguggauauuggcaauggauguuuugagacgaagcacaagugcaaccagacaugccuggaccguaucgccgcuggcaccuucaaugccggggaauuuagucuaccaacuuucgauagccucaacauuaccgcagccucccugaaugacgauggacuugacaaccauacaauauugcuguauuacucuaccgcugccagcucacucgcagucacucugaugcuugcgaucuucauuguguauauggucagucgcgacaauguguccuguagcaucugccuguga

SEQ ID NO: 154879 - RNA, 1755 nt, Artificial Sequence; identical to SEQ ID NO: 154868
  derived and/or modified CDS sequence (opt3) from hemagglutinin__InfluenzaB__AFN54709

SEQ ID NO: 154880 - RNA, 1755 nt, Artificial Sequence; identical to SEQ ID NO: 154868
  derived and/or modified CDS sequence (opt3) from hemagglutinin__InfluenzaB__AFN54720

SEQ ID NO: 154881 - RNA, 1755 nt, Artificial Sequence; identical to SEQ ID NO: 154868
  derived and/or modified CDS sequence (opt3) from hemagglutinin__InfluenzaB__AFN54731

SEQ ID NO: 154882 - RNA, 1755 nt, Artificial Sequence; identical to SEQ ID NO: 154868
  derived and/or modified CDS sequence (opt3) from hemagglutinin__InfluenzaB__AFN54742

SEQ ID NO: 154883 - RNA, 1755 nt, Artificial Sequence; identical to SEQ ID NO: 154868
  derived and/or modified CDS sequence (opt3) from hemagglutinin__InfluenzaB__AFN54753

SEQ ID NO: 154884 - RNA, 1755 nt, Artificial Sequence; identical to SEQ ID NO: 154868
  derived and/or modified CDS sequence (opt3) from hemagglutinin__InfluenzaB__AFN54764

SEQ ID NO: 154885 - RNA, 1755 nt, Artificial Sequence; identical to SEQ ID NO: 154868
  derived and/or modified CDS sequence (opt3) from hemagglutinin__InfluenzaB__AFN54775

SEQ ID NO: 154886 - RNA, 1755 nt, Artificial Sequence; identical to SEQ ID NO: 154868
  derived and/or modified CDS sequence (opt3) from hemagglutinin__InfluenzaB__AFN54786

SEQ ID NO: 154887 - RNA, 1755 nt, Artificial Sequence; identical to SEQ ID NO: 154868
  derived and/or modified CDS sequence (opt3) from hemagglutinin__InfluenzaB__AFN54797

SEQ ID NO: 154888 - RNA, 1755 nt, Artificial Sequence; identical to SEQ ID NO: 154868
  derived and/or modified CDS sequence (opt3) from hemagglutinin__InfluenzaB__AFN54808

SEQ ID NO: 154889 - RNA, 1755 nt, Artificial Sequence; identical to SEQ ID NO: 154615
  derived and/or modified CDS sequence (opt3) from hemagglutinin__InfluenzaB__AFN54819

SEQ ID NO: 154890 - RNA, 1755 nt, Artificial Sequence; identical to SEQ ID NO: 154868
  derived and/or modified CDS sequence (opt3) from hemagglutinin__InfluenzaB__AFN54830

SEQ ID NO: 154891 - RNA, 1755 nt, Artificial Sequence; identical to SEQ ID NO: 154868
  derived and/or modified CDS sequence (opt3) from hemagglutinin__InfluenzaB__AFN54841

SEQ ID NO: 154892 - RNA, 1755 nt, Artificial Sequence; identical to SEQ ID NO: 154868
  derived and/or modified CDS sequence (opt3) from hemagglutinin__InfluenzaB__AFN54852

SEQ ID NO: 154893 - RNA, 1755 nt, Artificial Sequence; identical to SEQ ID NO: 154868
  derived and/or modified CDS sequence (opt3) from hemagglutinin__InfluenzaB__AFN54863

SEQ ID NO: 154894 - RNA, 1758 nt, Artificial Sequence
  derived and/or modified CDS sequence (opt3) from hemagglutinin__InfluenzaB__AFU34595
augaaggccaucauugugcugcucauggucguuaccagcaacgcugacagaauaugcacaggcaucacuuccucuaauucaccccacgugguaaaaacggcaacccagggggaggugaacgucacaggagugauuccucuuacuaccacaccaaccaagagucauuucgccaaucugaaagguacugaaacaaggggcaaguuguguccgaaaugccccaacuguaccgauuuagacguugcgcuggggcggccuaagugcacgggaaagaucccaagcgcucgcguguccauucuacacgagguccgacccgugacuucuggcuguuuuccuaucaugcaugaucguaccaaaauaagacaacucccaaaucugcuuagggguuacgaacacauccggcugucgacacauaacguaauuaaugccgagaacgcacccgggggaccuuauaagaucggcacuucaggcagcugcccaaauguuaccaacgggaauggauucuuugccacaauggcuugggcagugccgaaaaacgacaagaauaaaaccgccacgaaccccuugacuauugaagucccuuacaucuguacagagggugaggaucagauaaccguguggggcuuccacagugacaaugaaacucagauggcuaagcucuaucgcgauuccaagccacagaaauuuacaucuagcgccaacggggugaccacgcacuacgucucccaaauuggaggcuuccccaaccagaccgaggacggugggcugccucagucaggaagaaucguuguggauuauaugguacagaagaguggcaaaacaggcacuauuaccuaccaaagggggauccugcucccacagaagguguggugcgcgagcggacggucuaaagucaucaaggguuccuuaccccugauuggcgaagcagacugucuucaugagaaauaugggggauugaauaagucaaagccguacuacacaggcgagcacgccaaagcuauagguaacugcccuaucugggugaagacuccccugaaacuagccaaugggaccaaguaucgcccaccuacaaaacuccugaaggaacgaggcuuuuucggagcaauugcuggcuuucuugaagggggaugggaggguaugaucgccggcuggcauggguacaccagccacggagcgcacggcguugccguggcagcugaucugaagaguacucaggaggccauaaacaaaauuacgaagaauuugaacucucucuccgaacuggaggucaaaaauuuacagagacugagcggugcuauggacgagcuccauaacgaaauccuugagcuggaugaaaagguggacgacuugagggccgauacaaucucgucucaaauugagcuagcaguacugcucuccaaugaagggaucauuaacucagaggacgagcaucugcuugcccuggaacggaaauugaagaagaugcucggccccagugcuguugagauaggaaauggcuguuucgaaaccaaacacaagugcaaccagacuugccuggaucguaucgcggcagggaccuuugacgccggagaguucagcuuaccaacauuugauucccugaauauuaccgcugccucucuaaacgacgauggucucgacaaucacacuauccugcuuuauuacagcacagcagccucaaguuuggcugugacgcugaugaucgccauuuucgucguguauauggucucccgcgauaacgugagcuguucuauaugccucuga

SEQ ID NO: 154895 - RNA, 1758 nt, Artificial Sequence
  derived and/or modified CDS sequence (opt3) from hemagglutinin__InfluenzaB__AFU34606
augaaggccaucauugugcugcucauggucguuaccagcaacgcugacagaauaugcacaggcaucacuuccucuaauucaccccacgugguaaaaacggcaacccagggggaggugaacgucacaggagugauuccucuuacuaccacaccaaccaagagucauuucgccaaucugaaagguacugaaacaaggggcaaguuguguccgaaaugccccaacuguaccgauuuagacguugcgcuggaucggccuaagugcacggggaagaucccaagcgcucgcguguccauucuacacgagguccgacucgugacuucuggauguuuucccaucaugcaugaccguaccaaaauaagacaacugccuaaucuucugaggggcuacgaacacauccgguugucgacacauaacguaauuaaugccgagaacgcaccaggugggcccuauaagaucggaacuucaggcagcugcccuaauguuaccaacggcaauggguucuuugccacaauggcuugggcagugccgaaaaacgauaagaauaaaaccgccacgaacccacucacuauugaaguccccuacaucuguacagagggagaggaccagauaaccgugugggguuuccacagugaugacgaaacucagauggcuaagcuguauggcgauuccaagccucagaaauuuacaucuagcgccaauggggugaccacgcacuacgucucccaaauuggaggcuucccaaaccagaccgaggacggugggcugccccagucaggacgcaucguuguggauuauaugguacagaagaguggcaaaacaggcacuauuaccuaccaaagagggauccucuuaccucagaagguguggugcgcgagcggaaggucuaaagucaucaaggguucccugccacuuauuggcgaagcagacuguuugcaugagaaauaugggggacugaacaagucaaagcccuacuacacaggcgagcacgccaaagcuauagguaauugcccgaucugggugaagacuccucuaaaacucgccaacgggaccaaguaucggcccccagcaaaacugcuuaaggaacgcggcuuuuucggagcuauugccggcuuucuggaagggggaugggaggguaugaucgcgggcuggcauggguacacaagccacggagcccacggcguugcaguggcugccgauuugaagaguacccaggaggcuauaaauaaaauuacuaagaaccucaauucucuguccgaauuagaggucaaaaaccugcagcgacucagcggugccauggacgagcuucauaaugaaauccuggaguuggacgaaaagguggaugaccuaagagcagauacgaucucgucucaaauugagcuggccguacuccuguccaacgaagggaucauuaauucagaggacgagcaccuucuggcuuuggaaaggaaacucaagaagaugcugggcccuagugcgguugagauaggaaacggcuguuucgaaacaaaacauaagugcaaucagaccugcuuagaucggaucgcagccgggacuuuugacgcuggagaguucagccugcccaccuuugauucccuaaacauuacagccgcaucucucaaugacgauggucuggacaaccacaccauccuuuuguauuacagcacugccgcuucaagucuggccgugacacucaugaucgcaauuuucgucguguauauggucucccgugauaaugugagcuguucuauaugccuguga

SEQ ID NO: 154896 - RNA, 1758 nt, Artificial Sequence; identical to SEQ ID NO: 154804
  derived and/or modified CDS sequence (opt3) from hemagglutinin__InfluenzaB__AFU34617

SEQ ID NO: 154897 - RNA, 1758 nt, Artificial Sequence
  derived and/or modified CDS sequence (opt3) from hemagglutinin__InfluenzaB__AFU34628
augaaggccaucauugugcugcucauggucguuaccagcaacgcugacagaauaugcacaggcaucacuuccucuaauucaccccacgugguaaaaacggcaacccagggggaggugaacgucacaggagugauuccucuuacuaccacaccaaccaagagucauuucgccaaucugaaagguacugaaacaaggggcaaguuguguccgaaaugccccaacuguaccgauuuagacguugcgcuggggcggccuaagugcacgggaaagaucccaagcgcucgcguguccauucuacacgagguccgacccgugacuucuggcuguuuuccuaucaugcaugaucguaccaaaauaagacaacucccaaaucugcuuagggguuacgaacacauccggcugucgacacauaacguaauuaaugccgagaacgcacccgggggaccuuauaagaucggcacuucaggcagcugcccaaauguuaccaacgggaauggauucuuugccacaauggcuugggcagugccgaaaaacgacaagaauaaaaccgccacgaaccccuugacuauugaagucccuuacaucuguacagagggugaggaucagauaaccguguggggcuuccacagugacgaugaaacucagauggcuaagcucuauggggacuccaagccacagaaauuuacaucuagcgccaauggagugaccacgcacuacgucucccaaauuggcgguuuccccaaccagaccgaggaugggggacugccucagucaggccgcaucguuguggacuauaugguacagaagaguggcaaaacagggacuauuaccuaccaaagaggaauccugcucccacagaagguguggugcgcgagcgguaggucuaaagucaucaagggcuccuuaccccugauuggggaagcagauugucuucaugagaaauauggaggcuugaacaagucaaagccguacuacacaggugagcacgccaaagcuauagggaauugcccuaucugggugaagacuccccugaaacuagccaacggcaccaaguaucggccuccagcaaaacuccugaaggaacgcggauuucuuggcgcuauugccggguuccuggagggagguuggaagggcaugaucgcgggguggcauggauacacaagccacggcgcccacgguguugcaguggcugccgacuugaaaaguacccaggaagcuauaaauaagauuacuaaaaaccucaauucucuguccgaguuagaagucaagaaccugcagcgacucagcggggccauggaugagcuucauaaugagauccuggaauuggacgagaaaguggacgaucuaagagcagacacgaucucgucucaaauugaacuggccguacuccuguccaacgagggcaucauuaauucagaagaugagcaccuucuggcuuuggagaggaagcucaagaaaaugcugggacccagugcgguugaaauaggcaacggguguuuugagacaaagcauaaaugcaaucagaccugcuuagaccggaucgcagccggaacuuucgaugcuggugaauuuagccugccaaccuucgacucccuaaacauuacagccgcaucucucaaugaugacggccuggauaaccacaccauccuuuuguauuacagcacugccgcuucaagucuggccgugacacucaugaucgcaauuuuugucguguauauggucucccgugacaaugugagcuguucuauaugccuguga

SEQ ID NO: 154898 - RNA, 1758 nt, Artificial Sequence; identical to SEQ ID NO: 154656
  derived and/or modified CDS sequence (opt3) from hemagglutinin__InfluenzaB__AFU34639

SEQ ID NO: 154899 - RNA, 1758 nt, Artificial Sequence; identical to SEQ ID NO: 154693
  derived and/or modified CDS sequence (opt3) from hemagglutinin__InfluenzaB__AGB08299

SEQ ID NO: 154900 - RNA, 1758 nt, Artificial Sequence; identical to SEQ ID NO: 154693
  derived and/or modified CDS sequence (opt3) from hemagglutinin__InfluenzaB__AGB08300

SEQ ID NO: 154901 - RNA, 1755 nt, Artificial Sequence
  derived and/or modified CDS sequence (opt3) from hemagglutinin__InfluenzaB__AGB97259
augaaggccaucauugugcugcucauggucguuaccagcaacgcugacagaauaugcacaggcaucacuuccucuaauucaccccacgugguaaaaacggcaacccagggggaagugaacgucacaggagugauuccucuuacuaccacaccaaccaagaguuacuucgccaaucugaaagguacuaggacacggggcaaguuguguccggauugcuuaaacuguaccgaccuggauguugcgcuagggcgccccaugugcgugggaacgacuccuagcgcuaaagccuccauccuccaugaaguccgaccagugaccucuggcuguuuucccauuaugcacgaccguacaaagaucagacaacugccuaaucuucugagggguuaugagaagauacgguugucgacucagaacguaaucgaugcagaaaaagccccagggggacccuaccgccucggcaccucaggcagcugcccuaaugcuacaaguaagauuggguucuuugcaaccauggccugggcuguuccaaaagacaacuauaagaaugccacgaacccgcugacuguggagguccccuacaucuguacagaaggagaggaucagauuaccgugugggguuuccauuccgacaauaaaacucagaugaagucucuguauggcgauagcaacccucaaaaguuuacauccucagcgaauggggugaccacgcacuacgucagucagaucggagacuucccagaucagaccgaggacggcggucucccccagagcgggagaauaguuguggauuauaugaugcaaaaaccuggaaagacaggcacuauuguauaccagaggggcguguuacugccacagaaagucuggugcgcaucugggcgguccaaggugaucaaaggaucacuucccuugauuggugaagccgacugucugcaugaggaauacggcgggcuaaacaagagcaaaccguauuacaccggaaagcacgcuaaggccaucggcaauugcccuaucuggguuaaaacaccccucaagcuggcaaacgguacuaaauaucgcccuccagcuaaacuucugaaggagcgaggguuuuucggcgccauugcgggauuuuuggagggcgggugggaaggaaugauagccgguuggcacggcuacaccagucauggggcacacggaguggcugucgccgcugaccucaagucuacacaggaggccaucaacaagauuaccaaaaaucugaacuccuuaagcgaacuggaggugaagaaucuccaaagacuuucgggcgcaauggaugaacugcauaacgagaucuuggagcuagacgaaaaaguagaugaccugagggccgauacuauaucuucccagauugagcucgcuguucugcuuucaaaugaagguaucaucaacagugaggacgaacaccuguuggcgcucgagcggaagcugaaaaagauguuagggcccagcgcaguggauauuggcaauggauguuucgagacgaagcacaaaugcaaccagacaugccuggaccguaucgccgcuggcaccuuuaaugccggggaguucucccuaccaacuuuugauucucucaacauuaccgcagccagccugaaugacgauggacuugacaaccauacaauauugcuguauuacucaaccgcugccaguucccucgcagucacucugaugcuugcgaucuucauuguguauaucgucagccgcgacaaugugucuuguucaaucugccuguga

SEQ ID NO: 154902 - RNA, 1755 nt, Artificial Sequence
  derived and/or modified CDS sequence (opt3) from hemagglutinin__InfluenzaB__AGB97265
augaaggccaucauugugcugcucauggucguuaccagcaacgcugacagaauaugcacaggcaucacuuccucuaauucaccccacgugguaaaaacggcaacccagggggaggugaacgucacaggagugauuccucuuacuaccacaccaaccaagaguuacuucgccaaucugaaagguacuaagacaaggggcaaauuguguccggauugcuuaaacuguaccgaccuggauguugcgcuagggcggcccaugugcgugggaacgacuccuagcgcuaaggccuccauccuccaugaaguccgcccagugaccucuggcuguuuucccauuaugcacgaccgaacaaagauccgucaacuggcaaaucuucugagagguuaugagaacauaagguugucgacucagaauguaaucgaugccgaaaaagcuccugggggaccauaccggcucggcaccucaggcagcugccccaacgcaacaaguaaguccggguucuuugccaccauggcuugggccguuccuaaagacaauaacaagaaugcgacgaacccacugacuguggaggucccguauauuugugcagaaggagaggaucagaucacagugugggguuuccauucugacaauaaaacccagaugaagaaccuguacggcgauagcaauccccaaaaguuuacuuccucagccaacggggugacaacccacuaugucagucagauuggaggcuucccugaccagacggaggauggugggcucccacagagcggacgcaucguuguggacuacaugaugcaaaaacccggcaagaccggcacaauaguauaucagagagggguguuacugccucagaaagucuggugcgcuucuggaagguccaaggugauuaaagguucacuuccauugaucggcgaagccgauugucugcaugagaaguacgggggacuaaacaaaagcaagcccuacuauacuggcgaacacgcaaaggcuauugguaauugcccgaucuggguuaaaaccccucucaagcuggccaacgggacaaaauaccggcccccagcgaagcugcugaaagagcgcggcuuuuucggagccaucgcaggcuuuuuggaagggggaugggaagguaugauugcuggcuggcacggguauacaagucauggagcccacggcguggcugucgccgcagaccucaagucuacccaggaggccauaaauaagaucacuaaaaaccuuaauuccuuaagcgaacuggaggugaagaaccuccaacgacuuucgggugcuauggacgaacugcauaaugagauuuuggagcuagaugaaaaaguagacgaucugagagcggacaccaucucuucccagauagagcucgcaguucugcuuucaaacgaagggauuaucaauagugaggaugaacaccuguuggcccucgagaggaagcugaaaaagauguuaggcccuagcgcuguggacaucggaaacggcuguuucgagacuaagcacaaaugcaaucagacgugccuggaucggauugccgcagggacauuuaacgccggagaguucucccuacccaccuuugacucucucaauaucacugcugccagccugaacgaugacggucuugauaaucauaccauuuugcuguacuauucaacagcagcgaguucccucgcugucacccugaugcuugccauauucaucguguacauggucagccgugacaacgugucuuguucaauuugccuguga

SEQ ID NO: 154903 - RNA, 1755 nt, Artificial Sequence; identical to SEQ ID NO: 154902
  derived and/or modified CDS sequence (opt3) from hemagglutinin__InfluenzaB__AGF44878

SEQ ID NO: 154904 - RNA, 1755 nt, Artificial Sequence; identical to SEQ ID NO: 154902
  derived and/or modified CDS sequence (opt3) from hemagglutinin__InfluenzaB__AGF44879

SEQ ID NO: 154905 - RNA, 1755 nt, Artificial Sequence
  derived and/or modified CDS sequence (opt3) from hemagglutinin__InfluenzaB__AGF44881
augaaggccaucauugugcugcucauggucguuaccagcaacgcugacagaauaugcacaggcaucacuuccucuaauucaccccacgugguaaaaacggcaacccagggggaggugaacgucacaggagugauuccucuuacuaccacaccaaccaagaguuacuucgccaaucugaaagguacuaagacaaggggcaaauuguguccggauugcuuaaacuguaccgaccuggauguugcgcuagggcggcccaugugcgugggaacgacuccuagcgcuaaggccuccauccuccaugaaguccgcccagugaccucuggcuguuuucccauuaugcacgaccgaacaaagauccgucaacuggcaaaucuucugagagguuaugagaacauaagguugucgacucagaauguaaucgaugccgaaaaagcuccugggggaccauaccggcucggcaccucaggcagcugccccaacgcaacaaguaaguccggguucuuugccaccauggcuugggccguuccuaaagacaauaacaagaaugcgacgaacccacugacuguggaggucccguauauuugugcagaaggagaggaucagaucgccgugugggguuuccauucugacaauaaaacacagaugaagaaccuguacggcgauagcaauccccaaaaguuuaccuccucagcuaacggggugacuacacacuaugucagucagauuggaggcuucccugaccagaccgaggauggugggcucccacagagcggacgcaucguuguggacuacaugaugcaaaaacccggcaagacgggcaccauaguauaucagagagggguguuacugccucagaaagucuggugcgccucuggaagguccaaggugauuaaagguucacuuccauugaucggcgaagcagauugucugcaugagaaguacgggggacuaaacaaaagcaagcccuacuauacaggcgaacacgcuaaggccauugguaauugcccgaucuggguuaaaacuccucucaagcuggcgaacgggaccaaauaccggcccccagccaagcugcugaaagagcgcggcuuuuucggagcaaucgcuggcuuuuuggaagggggaugggaagguaugauugccggcuggcacggguauacaagucauggagcucacggcguggccgucgcagccgaccucaagucuacucaggaggcuauaaauaagaucaccaaaaaccuuaauuccuuaagcgaacuggaggugaagaaccuccaacgacuuucgggugcgauggacgaacugcauaaugagauuuuggagcuagaugaaaaaguagacgaucugagagcagacacaaucucuucccagauagagcucgccguucugcuuucaaacgaagggauuaucaauagugaggaugaacaccuguuggcucucgagaggaagcugaaaaagauguuaggcccuagcgccguggacaucggaaacggcuguuucgagaccaagcacaaaugcaaucagacuugccuggaucggauugcagccgggacguuuaacgcuggagaguucucccuacccacauuugacucucucaauaucaccgccgcaagccugaacgaugacggucuugauaaucauacuauuuugcuguacuauucaaccgcggcuaguucccucgccgucauacugaugcuugcaaucuucauuguguacauggucagccgugacaacgugucuuguucaaucugccuguga

SEQ ID NO: 154906 - RNA, 1755 nt, Artificial Sequence
  derived and/or modified CDS sequence (opt3) from hemagglutinin__InfluenzaB__AGF44882
augaaggccaucauugugcugcucauggucguuaccagcaacgcugacagaauaugcacaggcaucacuuccucuaauucaccccacgugguaaaaacggcaacccagggggaggugaacgucacaggagugauuccucuuacuaccacaccaaccaagaguuacuucgccaaucugaaagguacuaagacaaggggcaaauuguguccggauugcuuaaacuguaccgaccuggauguugcgcuagggcggcccaugugcgugggaacgacuccuagcgcuaaggccuccauccuccaugaaguccgcccagugaccucuggcuguuuucccauuaugcacgaccgaacaaagauccgucaacuggcaaaucuucugagagguuaugagaacauaagguugucgacucagaauguaaucgaugccgaaaaagcuccugggggaccauaccggcucggcaccucaggcagcugccccaacgcaacaaguaaguccggguucuuugccaccauggcuugggccguuccuaaagacaauaacaagaaugcgacgaacccacugacuguggaggucccguauauuugugcagaaggagaggaucagaucacagugugggguuuccauucugacaauaaaacccagaugaagaaccuguacggcgauagcaauccccaaaaguuuacuuccucagccaacggggugacaacccacuaugucagucagauuggaggcuucccugaccagacggaggauggugggcucccacagagcggacgcaucguuguggacuacaugaugcaaaaacccggcaagaccggcacaauaguauaucagagagggguguuacugccucagaaagucuggugcgcuucuggaaaguccaaagugauuaaggguucacuuccauugaucggcgaagccgauugucugcaugagaaauacgggggacuaaacaagagcaagcccuacuauacuggcgaacacgcaaaagcuauugguaauugcccgaucuggguuaagaccccucucaaacuggccaacgggacaaaguacaggcccccagcgaaacuucugaaggagcggggcuuuuucggagccaucgcaggcuuuuuggaagggggaugggaagguaugauugcuggcuggcacggguauacuucccauggagcccacggcguggcugucgccgcagaccucaagucuacccaggaggccauaaauaaaaucacaaagaaccugaauaguuuaagcgaacuggaggugaaaaaccuccaacgccuuucgggugcuauggacgaacugcauaaugagauuuuggagcuagaugaaaagguagacgaucugcgagcggacaccaucucuucccagauagagcucgcaguucugcuuucaaacgaagggauuaucaauagugaggaugaacaccuguuggcccucgagagaaaacugaagaagauguuaggcccuagcgcuguggacaucggaaacggcuguuucgagacuaaacacaagugcaaucagacgugccuggauaggauugccgcagggacauuuaacgccggagaguucucccuacccaccuuugacucucucaauaucacugcugccagccugaacgaugacggucuugauaaucauaccauuuugcuguacuauucaacagcagcgaguucccucgcugucacccugaugcuugccauauucaucguguacauggucagccgggacaacgugucuuguucaauuugccuguga

SEQ ID NO: 154907 - RNA, 1755 nt, Artificial Sequence; identical to SEQ ID NO: 154902
  derived and/or modified CDS sequence (opt3) from hemagglutinin__InfluenzaB__AGF44883

SEQ ID NO: 154908 - RNA, 1755 nt, Artificial Sequence; identical to SEQ ID NO: 154902
  derived and/or modified CDS sequence (opt3) from hemagglutinin__InfluenzaB__AGF44884

SEQ ID NO: 154909 - RNA, 1755 nt, Artificial Sequence; identical to SEQ ID NO: 154902
  derived and/or modified CDS sequence (opt3) from hemagglutinin__InfluenzaB__AGF44886

SEQ ID NO: 154910 - RNA, 1755 nt, Artificial Sequence; identical to SEQ ID NO: 154902
  derived and/or modified CDS sequence (opt3) from hemagglutinin__InfluenzaB__AGF44887

SEQ ID NO: 154911 - RNA, 1755 nt, Artificial Sequence; identical to SEQ ID NO: 154902
  derived and/or modified CDS sequence (opt3) from hemagglutinin__InfluenzaB__AGF44888

SEQ ID NO: 154912 - RNA, 1755 nt, Artificial Sequence
  derived and/or modified CDS sequence (opt3) from hemagglutinin__InfluenzaB__AGL09834
augaaggccaucauugugcugcucauggucguuaccagcaacgcugacagaauaugcacaggcaucacuuccucuaauucaccccacgugguaaaaacggcaacccagggggaggugaacgucacaggagugauuccucuuacuaccacaccaaccaagaguuacuucgccaaucugaaagguacuaagacaaggggcaaauuguguccggauugcuuaaacuguaccgaccuggauguugcgcuagggcggcccaugugcgugggaacgacuccuagcgcuaaggccuccauccuccaugaaguccgcccagugaccucuggcuguuuucccauuaugcacgaccgaacaaagauccgucaacuggcaaaucuucugagagguuaugagaacauaagguugucgacucagaauguaaucgaugccgaaaaagcuccugggggaccauaccggcucggcaccucaggcagcugccccaacgcaacaaguaaguccggguucuuugccaccauggcuugggccguuccuaaagacaauaacaagaaugcgacgaacccacugacuguggaggucccguauauuugugcagaaggagaggaucagaucgccgugugggguuuccauucugacaauaaaacacagaugaagaaccuguacggcgauagcaauccccaaaaguuuaccuccucagcuaacggggugacuacacacuaugucagucagauuggaggcuucccugaccagaccgaggauggugggcucccacagagcggacgcaucguuguggacuacaugaugcaaaaacccggcaagacgggcaccauaguauaucagagagggguguuacugccucagaaagucuggugcgccucuggaagguccaaggugauuaaagguucacuuccauugaucggcgaagcagauugucugcaugagaaguacgggggacuaaacaaaagcaagcccuacuauacaggcgaacacgcuaaggccauugguaauugcccgaucuggguuaaaacuccucucaagcuggcgaacgggaccaaauaccggcccccagccaagcugcugaaagagcgcggcuuuuucggagcaaucgcuggcuuuuuggaagggggaugggaggguaugauugccggcuggcacggguauacaagucauggagcucacggcguggccgucgcagccgaccucaagucuacucaggaggcuauaaauaagaucaccaaaaaccuuaauuccuuaagcgaacuggaggugaagaaccuccaacgacuuucgggugcgauggacgaacugcauaaugagauuuuggagcuagaugaaaaaguagacgaucugagagcagacacaaucucuucccagauagagcucgccguucugcuuucaaacgaagggauuaucaauagugaggaugaacaccuguuggcucucgagaggaagcugaaaaagauguuaggcccuagcgccguggacaucggaaacggcuguuucgagaccaagcacaaaugcaaucagacuugccuggaucggauugcagccgggacguuuaacgcuggagacuucucccuacccacauuugauucucucaauaucaccgccgcaagccugaacgacgauggucuugacaaucauacuauuuugcuguacuauucaaccgcggcuaguucccucgccgucacacugaugcuugcaauauucaucguguacauggucagccgugacaacgugucuuguucaauuugccuguga

SEQ ID NO: 154913 - RNA, 1755 nt, Artificial Sequence; identical to SEQ ID NO: 154902
  derived and/or modified CDS sequence (opt3) from hemagglutinin__InfluenzaB__AGL09835

SEQ ID NO: 154914 - RNA, 1755 nt, Artificial Sequence
  derived and/or modified CDS sequence (opt3) from hemagglutinin__InfluenzaB__AGL09836
augaaggccaucauugugcugcucauggucguuaccagcaacgcugacagaauaugcacaggcaucacuuccucuaauucaccccacgugguaaaaacggcaacccagggggaggugaacgucacaggagugauuccucuuacuaccacaccaaccaagaguuacuucgccaaucugaaagguacuaagacaaggggcaaauuguguccggauugcuuaaacuguaccgaccuggauguugcgcuagggcggcccaugugcgugggaacgacuccuagcgcuaaggccuccauccuccaugaaguccgcccagugaccucuggcuguuuucccauuaugcacgaccgaacaaagauccgucaacuggcaaaucuucugagagguuaugagaacauaagguugucgacucagaauguaaucgaugccaaaaaggcuccugggggaccauaccggcucggcaccucaggcagcugccccaacgcaacaaguaaauccggguucuuugccaccauggcuugggccguuccugaagacaauaacaagaaugcgacgaacccacugacuguggaggucccguauauuugugcagaaggagaggaucagaucacagugugggguuuccauucugacaauaaaacccagaugaagaaccuguacggcgauagcaauccccaaaaguuuacuuccucagccaacggggugacaacccacuaugucagucagauuggaggcuucccugaccagacggaggauggugggcucccacagagcggacgcaucguuguggacuacaugaugcaaaaacccggcaagaccggcacaauaguauaucagagagggguguuacugccucagaaagucuggugcgcuucuggaagguccaaggugauuaaagguucacuuccauugaucggcgaagccgauugucugcaugagaaguacgggggacuaaacaaaagcaagcccuacuauacuggcgaacacgcaaaggcuauugguaauugcccgaucuggguuaaaaccccucucaagcuggccaacgggacaaaauaccggcccccagcgaagcugcugaaagagcgcggcuuuuucggagccaucgcaggcuuuuuggaagggggaugggaagguaugauugcuggcuggcacggguauacaagucauggagcccacggcguggcugucgccgcagaccucaagucuacccaggaggccauaaauaagaucacuaaaaaccuuaauuccuuaagcgaacuggaggugaagaaccuccaacgacuuucgggugcuauggacgaacugcauaaugagauuuuggagcuagaugaaaaaguagacgaucugagagcggacaccaucucuucccagauagagcucgcaguucugcuuucaaacgaagggauuaucaauagugaggaugaacaccuguuggcccucgagaggaagcugaaaaagauguuaggcccuagcgcuguggacaucggaaacggcuguuucgagacuaagcacaaaugcaaucagacgugccuggaucggauugccgcagggacauuuaacgccggagaguucucccuacccaccuuugacucucucaauaucacugcugccagccugaacgaugacggucuugauaaucauaccauuuugcuguacuauucaacagcagcgaguucccucgcugucacccugaugcuugccauauucaucguguacauggucagccgugacaacgugucuuguucaauuugccuguga

SEQ ID NO: 154915 - RNA, 1755 nt, Artificial Sequence; identical to SEQ ID NO: 154902
  derived and/or modified CDS sequence (opt3) from hemagglutinin__InfluenzaB__AGL09837

SEQ ID NO: 154916 - RNA, 1755 nt, Artificial Sequence; identical to SEQ ID NO: 154902
  derived and/or modified CDS sequence (opt3) from hemagglutinin__InfluenzaB__AGL09838

SEQ ID NO: 154917 - RNA, 1755 nt, Artificial Sequence; identical to SEQ ID NO: 154902
  derived and/or modified CDS sequence (opt3) from hemagglutinin__InfluenzaB__AGL09839

SEQ ID NO: 154918 - RNA, 1755 nt, Artificial Sequence; identical to SEQ ID NO: 154902
  derived and/or modified CDS sequence (opt3) from hemagglutinin__InfluenzaB__AGL09840

SEQ ID NO: 154919 - RNA, 1755 nt, Artificial Sequence; identical to SEQ ID NO: 154902
  derived and/or modified CDS sequence (opt3) from hemagglutinin__InfluenzaB__AGL09841

SEQ ID NO: 154920 - RNA, 1758 nt, Artificial Sequence
  derived and/or modified CDS sequence (opt3) from hemagglutinin__InfluenzaB__AGL09842
augaaggccaucauugugcugcucauggucguuaccagcaacgcugacagaauaugcacaggcaucacuuccucuaauucaccccacgugguaaaaacggcaacccagggggaagugaacgucacaggagugauuccucuuacuaccacaccaaccaagagucauuucgccaaucugaaagguacugaaacaaggggcaaguuguguccgaaaugcuuaaacuguaccgaucuggacguugcgcuagggcggcccaagugcacgggaaagaucccuagcgcucgcguguccauucuccacgagguccgaccagugacuucuggcuguuuucccaucaugcaugaucguaccaaaauaagacaacugccuaaucuucugagggguuacgaacacauccgguugucgacacauaacguaauuaaugccgagaacgcaccagggggacccuauaagaucggcacuucaggcagcugcccuaauguuaccaacgggaauggauucuuugccacaauggcuugggcagugccgaaaaacgacaagaauaaaaccgaaacgaacccacucacuauugagguccccuacaucuguacagagggugaagaucagauaaccguguggggcuuccacagugacaaugagacucagauggccaagcuguauggggauuccaagccucagaaauuuacaucuagcgcuaacggagugaccacgcacuacgucucccaaauuggcgguuucccaaaccagaccgaagacgggggacugccccagucaggccgcaucguuguggauuauaugguacagaagaguggcaaaacagggacuauuaccuaccaaagaggaauccucuuaccucagaagguguggugcgccagcgguaggucuaaagucaucaagggcucccugccacuuauuggggaggcggacuguuugcaugagaaauauggaggccugaauaagucaaagcccuacuacacaggugaacacgcaaaagccauagggaacugcccgaucugggugaagacuccucuaaaacucgcuaauggcaccaaguaucggcccccagccaaacugcuuaaggagcgcggauuuuucggcgcaauugcuggguuucuggaaggagguugggagggcaugaucgccggguggcauggauacacaagccacggcgcgcacgguguugccguggcagcugauuugaagaguacccaggaagccauaaacaaaauuacuaagaaucucaacucucuguccgaguuagaggucaaaaaucugcagcgacucagcggggcuauggacgaacuucauaacgagauccuggaauuggaugagaagguggacgaccuaagagccgauacgaucucgucucaaauugaacuggcaguacuccuguccaaugagggcaucauuaacucagaggacgaacaccuucuggccuuggagaggaaacucaagaagaugcugggaccuagugcuguugaaauaggcaauggguguuucgagacaaaacauaagugcaaccagaccugcuuagaucggaucgcggcaggaacuuuugacgccggugaguucagccugcccaccuuugauucccuaaauauuacagcugccucucucaacgacgauggccuggacaaucacaccauccuuuuguauuacagcacugcagccucaagucuggcugugacacucaugaucgccauuuucgucguguauauggucucccgugauaacgugagcuguucuauaugccuguga

SEQ ID NO: 154921 - RNA, 1755 nt, Artificial Sequence; identical to SEQ ID NO: 154902
  derived and/or modified CDS sequence (opt3) from hemagglutinin__InfluenzaB__AGL09843

SEQ ID NO: 154922 - RNA, 1755 nt, Artificial Sequence
  derived and/or modified CDS sequence (opt3) from hemagglutinin__InfluenzaB__AGL09844
augaaggccaucauugugcugcucauggucguuaccagcaacgcugacagaauaugcacaggcaucacuuccucuaauucaccccacgugguaaaaacggcaacccagggggaggugaacgucacaggagugauuccucuuacuaccacaccaaccaagaguuacuucgccaaucugaaagguacuaagacaaggggcaaauuguguccggauugcuuaaacuguaccgaccuggauguugcgcuagggcggcccaugugcgugggaacgacuccuagcgcuaaggccuccauccuccaugaaguccgcccagugaccucuggcuguuuucccauuaugcacgaccgaacaaagauccgucaacuggcaaaucuucugagagguuaugagaacauaagguugucgacucagaauguaaucgaugccgaaaaagcuccugggggaccauaccggcucggcaccucaggcagcugccccaacgcaacaaguaaguccggguucuuugccaccauggcuugggccguuccuaaagacaauaacaagaaugcgacgaacccacugacuguggaggucccguauauuugugcagaaggagaggaucagaucacagugugggguuuccauucugacaauaaaacccagaugaagaaccuguacggcgauagcaauccccaaaaguuuacuuccucagccaacggggugacaacccacuaugucagucagauuggaggcuucccugaccagaaagaggauggugggcucccacagagcggacgcaucguuguggacuacaugaugcaaaagcccggcaaaacgggcaccauaguauaucagagagggguguuacugccucagaaggucuggugcgcuucuggaagguccaaagugauuaaggguucacuuccauugaucggcgaagccgauugucugcaugagaaauacgggggacuaaacaagagcaagcccuacuauacaggcgaacacgcaaaagcuauugguaauugcccgaucuggguuaagacuccucucaaacuggccaacgggaccaaguaccggcccccagcgaaacuucugaaggagcgcggcuuuuucggagccaucgcaggcuuuuuggaagggggaugggaagguaugauugcuggcuggcacggguauacaagucauggagcccacggcguggcugucgccgcagaccucaagucuacucaggaggccauaaauaaaaucaccaagaacuuaaauucccugagcgaacuggaggugaaaaaccuccaacgacuuucgggugcuauggacgaacugcauaaugagauuuuggagcuagaugaaaagguagacgaucugagagcggacacaaucucuucccagauagagcucgcaguucugcuuucaaacgaagggauuaucaauagugaggaugaacaccuguuggcccucgagaggaaacugaagaagauguuaggcccuagcgcuguggacaucggaaacggcuguuucgagaccaaacacaagugcaaucagacuugccuggaucggauugccgcagggacguuuaacgccggagaguucucccuacccacauuugacucucucaauaucaccgcugccagccugaacgaugacggucuugauaaucauacuauuuugcuguacuauucaaccgcagcgaguucccucgcugucacacugaugcuugccauauucaucguguacauggucagccgugacaacgugucuuguucaauuugccuguga

SEQ ID NO: 154923 - RNA, 1755 nt, Artificial Sequence; identical to SEQ ID NO: 154902
  derived and/or modified CDS sequence (opt3) from hemagglutinin__InfluenzaB__AGL09845

SEQ ID NO: 154924 - RNA, 1755 nt, Artificial Sequence; identical to SEQ ID NO: 154902
  derived and/or modified CDS sequence (opt3) from hemagglutinin__InfluenzaB__AGL09846

SEQ ID NO: 154925 - RNA, 1755 nt, Artificial Sequence
  derived and/or modified CDS sequence (opt3) from hemagglutinin__InfluenzaB__AGL09847
augaaggccaucauugugcugcucauggucguuaccagcaacgcugacagaauaugcacaggcaucacuuccucuaauucaccccacgugguaaaaacggcaacccagggggaggugaacgucacaggagugauuccucuuacuaccacaccaaccaagaguuacuucgccaaucugaaagguacuaagacaaggggcaaauuguguccggauugcuuaaacuguaccgaccuggauguugcgcuagggcggcccaugugcgugggaacgacuccuagcgcuaaggccuccauccuccaugaaguccgcccagugaccucuggcuguuuucccauuaugcacgaccgaacaaagauccgucaacuggcaaaucuucugagagguuaugagaacauaagguugucgacucagaauguaaucgaugccgaaaaagcuccugggggaccauaccggcucggcaccucaggcagcugccccaacgcaacaaguaaguccggguucuuugccaccauggcuugggccguuccuaaagacaauaacaagaaugcgacgaacccacugacuguggaggucccguauauuugugcagaaggagaggaucagaucgccauuugggguuuccauucugacaauaaaacacagaugaagaaccuguacggcgauagcaauccccaaaaguuuaccuccucagcuaacggggugacuacacacuaugugagucagaucggaggcuucccugaccagaccgaggauggugggcucccacagagcggacgcauagucguugacuacaugaugcaaaaacccggcaagacgggcaccauuguguaucagagagggguauuacugccucagaaaguguggugcgccucuggaagguccaaggucaucaaagguucacuuccauugauuggcgaagcagauugucugcaugagaaguacgggggacuaaacaaaagcaagcccuacuauacaggcgaacacgcuaaggccaucgguaauugcccgaucugggugaaaacuccucucaagcuggcgaacgggaccaaauaccggcccccagccaagcugcugaaagagcgcggcuuuuucggagcaauugcuggcuuuuuggaagggggaugggaagguaugauagccggcuggcacggguauacaagucauggagcucacggcguugccguggcagccgaccucaagucuacucaggaggcuaucaauaagauuaccaaaaaccuuaauuccuuaagcgaacuggaggucaagaaccuccaacgacuuucgggugcgauggacgaacugcauaaugagaucuuggagcuagaugaaaaaguggacgaucugagagcagacacaauaucuucccagauugagcucgccguacugcuuucaaacgaagggaucaucaauagugaggaugaacaccuguuggcucucgagaggaagcugaaaaagauguuaggcccuagcgccguugacauuggaaacggcuguuucgagaccaagcacaaaugcaaucagacuugccuggaucggaucgcagccgggacguuuaacgcuggagaguucucccuacccacauuugacucucucaauauuaccgccgcaagccugaacgaugacggucuugauaaucauacuauauugcuguacuauucaaccgcggcuaguucccucgccgugacacugaugcuugcaaucuucauugucuacauggugagccgugacaacgucucuuguucaaucugccuguga

SEQ ID NO: 154926 - RNA, 1755 nt, Artificial Sequence
  derived and/or modified CDS sequence (opt3) from hemagglutinin__InfluenzaB__AGL09849
augaaggccaucauugugcugcucauggucguuaccagcaacgcugacagaauaugcacaggcaucacuuccucuaauucaccccacgugguaaaaacggcaacccagggggaggugaacgucacaggagugauuccucuuacuaccacaccaaccaagaguuacuucgccaaucugaaagguacuaagacaaggggcaaauuguguccggauugcuuaaacuguaccgaccuggauguugcgcuagggcggcccaugugcgugggaacgacuccuagcgcuaaggccuccauccuccaugaaguccgcccagugaccucuggcuguuuucccauuaugcacgaccgaacaaagauccgucaacuggcaaaucuucugagagguuaugagaacauaagguugucgacucagaauguaaucaacgccgaaaaagcuccugggggaccauaccggcucggcaccucaggcagcugccccaaugcaacaaguaaguccggguucuuugccaccauggcuugggccguuccuaaagauaacaauaagaacgcgacgaauccacugacuguggaggucccguauauuugugcagaaggagaggaccagaucacagugugggguuuccauucugauaacaaaacccagaugaagaaucuguacggcgacagcaacccccaaaaguuuacuuccucagccaacggggugacaacccacuaugucagucagauuggaggcuucccugaucagacggaggacggugggcucccacagagcggacgcaucguuguggauuacaugaugcaaaaacccggcaagaccggcacaauaguauaucagagagggguguuacugccucagaaagucuggugcgcuucuggaagguccaaggugauuaaagguucacuuccauugaucggcgaagccgacugucugcaugagaaguacgggggacuaaauaaaagcaagcccuacuauacuggcgaacacgcaaaggcuauugguaacugcccgaucuggguuaaaaccccucucaagcuggccaaugggacaaaauaccggcccccagcgaaacuucugaaggagcgcggcuuuuucggagccaucgcaggcuuuuuggaagggggaugggaagguaugauugcuggcuggcacggguauacaagucauggagcccacggcguggcugucgccgcagaucucaagucuacccaggaggccauaaacaagaucacuaaaaaucugaacuccuuaagcgaacuggaggugaagaaucuccaacgacuuucgggugcuauggacgaacugcauaacgagauuuuggagcuagacgaaaaaguagaugaccugagagcggauaccaucucuucccagauagagcucgcaguucugcuuucaaaugaagggauuaucaacagugaggacgaacaccuguuggcccucgagaggaagcugaaaaagauguuaggcccuagcgcuguggauaucggaaauggcuguuucgagacuaagcacaaaugcaaccagacgugccuggaccggauugccgcagggacauuuaaugccggagaguucucccuacccaccuuugauucucucaacaucacugcugccagccugaaugacgauggucuugacaaccauaccauuuugcuguacuauucaacagcagcgaguucccucgcugucacccugaugcuugccauauucaucguguacauggucagccgugauaacgugucuuguucaauuugccuguga

SEQ ID NO: 154927 - RNA, 1755 nt, Artificial Sequence; identical to SEQ ID NO: 154902
  derived and/or modified CDS sequence (opt3) from hemagglutinin__InfluenzaB__AGL09850

SEQ ID NO: 154928 - RNA, 1755 nt, Artificial Sequence; identical to SEQ ID NO: 154902
  derived and/or modified CDS sequence (opt3) from hemagglutinin__InfluenzaB__AGL09851

SEQ ID NO: 154929 - RNA, 1758 nt, Artificial Sequence; identical to SEQ ID NO: 154693
  derived and/or modified CDS sequence (opt3) from hemagglutinin__InfluenzaB__AGL09852

SEQ ID NO: 154930 - RNA, 1755 nt, Artificial Sequence; identical to SEQ ID NO: 154902
  derived and/or modified CDS sequence (opt3) from hemagglutinin__InfluenzaB__AGL09853

SEQ ID NO: 154931 - RNA, 1755 nt, Artificial Sequence; identical to SEQ ID NO: 154902
  derived and/or modified CDS sequence (opt3) from hemagglutinin__InfluenzaB__AGL09854

SEQ ID NO: 154932 - RNA, 1758 nt, Artificial Sequence
  derived and/or modified CDS sequence (opt3) from hemagglutinin__InfluenzaB__AGL09855
augaaggccaucauugugcugcucauggucguuaccagcaacgcugacagaauaugcacaggcaucacuuccucuaauucaccccacgugguaaaaacggcaacccagggggaggugaacgucacaggagugauuccucuuacuaccacaccaaccaagagucauuucgccaaucugaaagguacugaaacaaggggcaaguuguguccgaaaugcuuaaacuguaccgaucuggacguugcgcuagggcggcccaagugcacgggaaagaucccuagcgcucgcguguccauucuccacgagguccgaccagugacuucuggcuguuuucccaucaugcaugaucguaccaaaauaagacaacugccuaaucuucugagggguuacgaacacauccgguugucgacacauaacguaauuaaugccgagaacgcaccagggggacccuauaagaucggcacuucaggcagcugcccuaauguuaccaacgggaauggauucuuugccacaauggcuugggcagugccgaaaaacgacaagaauaaaaccgaaacgaacccacucacuauugagguccccuacaucuguacagaggaagaggaucagauaaccgugugggguuuccacagugacaaugaaacucagauggccaagcuguauggcgauuccaagccucagaaauuuacaucuagcgcuaacggggugaccacgcacuacgucucccaaauuggagacuucccaaaccagaccgaggauggcggucugccccagucagggcgcaucguuguggacuauaugguacagaagaguggaaaaacaggcacuauuaccuaccaaagaggcauccucuuaccucagaagguguggugcgccagcgggaggucuaaagucaucaagggaucccugccacuuauuggugaggcggauuguuugcaugaaaaauauggcgggcugaauaagucaaagcccuacuacacaggagagcacgcaaaagccauaggcaacugcccgaucugggugaagacuccucuaaaacucgcuaaugguaccaaguaucggcccccagccaaacugcuuaaggaacgcggguuuuucggcgcaauugcuggauuucuggagggcgggugggaaggaaugaucgccgguuggcauggcuacacaagccacggggcgcacggaguugccguggcagcugacuugaagaguacccaggaggccauaaacaaaauuacuaagaaucucaacucucuguccgaguuagaagucaaaaaucugcagcgacucagcggcgcuauggaugagcuucauaacgaaauccuggaguuggacgaaaagguggacgaucuaagagccgacacgaucucgucucaaauugagcuggcaguacuccuguccaaugaggguaucauuaacucagaagaugagcaccuucuggccuuggaaaggaaacucaagaagaugcuggggccuagugcuguugagauaggcaauggauguuucgaaacaaaacauaagugcaaccagaccugcuuagaccggaucgcggcaggcacuuuugaugccggggaguucagccugcccaccuuugacucccuaaauauuacagcugccucucucaacgaugacggacuggauaaucacaccauccuuuuguauuacagcacugcagccucaagucuggcugugacacucaugaucgccauuuucgucguguauauggucucccgugacaacgugagcuguucuauaugccuguga

SEQ ID NO: 154933 - RNA, 1755 nt, Artificial Sequence; identical to SEQ ID NO: 154902
  derived and/or modified CDS sequence (opt3) from hemagglutinin__InfluenzaB__AGL09856

SEQ ID NO: 154934 - RNA, 1755 nt, Artificial Sequence
  derived and/or modified CDS sequence (opt3) from hemagglutinin__InfluenzaB__AGL09857
augaaggccaucauugugcugcucauggucguuaccagcaacgcugacagaauaugcacaggcaucacuuccucuaauucaccccacgugguaaaaacggcaacccagggggaggugaacgucacaggagugauuccucuuacuaccacaccaaccaagaguuacuucgccaaucugaaagguacuaagacaaggggcaaauuguguccggauugcuuaaacuguaccgaccuggauguugcgcuagggcggcccaugugcgugggaacgacuccuagcgcuaaggccuccauccuccaugaaguccgcccagugaccucuggcuguuuucccauuaugcacgaccgaacaaagauccgucaacuggcaaaucuucugagagguuaugagaacauaagguugucgacucagaaaguaaucgaugccgaaaaggcuccugggggaccauaccggcucggcaccucaggcagcugccccaaugcaacaaguaaauccggguucuuugccaccauggcuugggccguuccuaaggacaacaauaaaaacgcgacgaauccacugacuguggaggucccguauauuugugcagaaggagaggaucagaucacagugugggguuuccauucugacaacaagacccagaugaagaaucuguacggcgauagcaacccccaaaaauuuacuuccucagccaauggggugacaacccacuaugucagucagauuggaggcuucccugaccagacggaggauggugggcucccacagagcggacgcaucguuguggacuacaugauacaaaagcccggcaaaaccggcacaauuguauaucagagagggguguuacugccucagaaggucuggugcgcuucuggaagguccaaagugaucaaggguucacuuccauugauuggcgaagccgauugucugcaugagaaauacgggggacuaaacaagagcaagcccuacuauacuggcgaacacgcaaaagcuaucgguaacugcccgaucuggguuaagaccccucucaaacuggccaaugggacaaaguaccggcccccagcgaaacuucugaaggagcgcggcuuuuucggagccauugcaggcuuuuuggaagggggaugggaagguaugauagcuggcuggcacggguauaccagucauggagcccacggcguggcugucgccgcagaccucaagucuacucaggaggccaucaacaaaauuacaaagaaucugaacuccuuaagcgaacuggaggugaaaaaucuccaacgacuuucgggugcuauggacgaacugcauaacgagaucuuggagcuagaugaaaagguagacgaucugagagcggacaccauaucuucccagauugagcucgcaguucugcuuucaaaugaagggaucaucaacagugaggaugaacaccuguuggcccucgagaggaaacugaagaagauguuaggcccuagcgcuguggacauuggaaauggcuguuucgagacuaaacacaagugcaaccagacgugccuggaucggaucgccgcagggacauuuaaugccggagaguucucccuacccaccuuugacucucucaacauuacugcugccagccugaaugaugacggucuugauaaccauaccauauugcuguacuauucaacagcagcgaguucccucgcugucacccugaugcuugccaucuucauuguguacauggucagccgugacaaugugucuuguucaaucugccuguga

SEQ ID NO: 154935 - RNA, 1758 nt, Artificial Sequence
  derived and/or modified CDS sequence (opt3) from hemagglutinin__InfluenzaB__AGL09859
augaaggccaucauugugcugcucauggucguuaccagcaacgcugacagaauaugcacaggcaucacuuccucuaauucaccccacgugguaaaaacggcaacccagggggaggugaacgucacaggagugauuccucuuacuaccacaccaaccaagagucauuucgccaaucugaaagguacugaaacaaggggcaaguuguguccgaaaugcuuaaacuguaccgaucuggacguugcgcuagggcggcccaagugcacgggaaagaucccuagcgcucgcguguccauucuccacgagguccgaccagugacuucuggcuguuuucccaucaugcaugaucguaccaaaauaagacaacugccuaaucuucugagggguuacgaacacauccgguugucgacacauaacguaauuaaugccgaggacgcaccagggggacccuauaagaucggcacuucaggcagcugcccuaacguuaccaaugggaacggauucuuugccacaauggcuugggcagugccgaaaaaugauaagaacaaaaccgccacgaauccacucacuauugaaguccccuacaucuguacagagggugaggaccagauaaccguguggggcuuccacagugauaacgaaacucagauggcuaagcuguauggggacuccaagccucagaaauuuacaucuagcgccaauggagugaccacgcacuacgucucccaaauuggcgguuucccaaaccagaccgaggaugggggacugccccagucaggccgcaucguuguggacuauaugguacagaagaguggcaaaacagggacuauuaccuaccaaagaggaauccucuuaccucagaagguguggugcgcgagcgguaggucuaaagucaucaagggcucccugccacuuauuggggaagcagauuguuugcaugagaaauauggaggccugaacaagucaaagcccuacuacacaggugagcacgccaaagcuauagggaauugcccgaucugggugaagacuccucuaaaacucgccaacggcaccaaguaucggcccccagcaaaacugcuuaaggaacgcggauuuuucggcgcuauugccggguuucuggagggagguugggaaggcaugaucgcgggguggcauggauacacaagccacggcgcccacgguguugcaguggcugccgacuugaagaguacccaggaggcuauaaauaaaauuacuaagaaccucaauucucuguccgaauuagaggucaaaaaccugcagcgacucagcggggccauggaugagcuucauaaugaaauccuggaguuggacgaaaagguggacgaucuaagagcagacacgaucucgucucaaauugagcuggccguacuccuguccaacgaaggcaucauuaauucagaggaugagcaccuucuggcuuuggaaaggaaacucaagaagaugcugggaccuagugcgguugagauaggcaacggguguuucgaaacaaaacauaagugcaaucagaccugcuuagaccggaucgcagccggaacuuuugaugcuggugaguucagccugcccaccuuugacucccuaaacauuacagccgcaucucucaaugaugacggccuggauaaccacaccauccuuuuguauuacagcacugccgcuucaagucuggccgugacacucaugaucgcaauuuucgucguguauauggucucccgugacaaugugagcuguucuauaugccuguga

SEQ ID NO: 154936 - RNA, 1758 nt, Artificial Sequence; identical to SEQ ID NO: 154935
  derived and/or modified CDS sequence (opt3) from hemagglutinin__InfluenzaB__AGL09860

SEQ ID NO: 154937 - RNA, 1758 nt, Artificial Sequence; identical to SEQ ID NO: 154935
  derived and/or modified CDS sequence (opt3) from hemagglutinin__InfluenzaB__AGL09861

SEQ ID NO: 154938 - RNA, 1758 nt, Artificial Sequence; identical to SEQ ID NO: 154935
  derived and/or modified CDS sequence (opt3) from hemagglutinin__InfluenzaB__AGL09862

SEQ ID NO: 154939 - RNA, 1758 nt, Artificial Sequence; identical to SEQ ID NO: 154935
  derived and/or modified CDS sequence (opt3) from hemagglutinin__InfluenzaB__AGL09863

SEQ ID NO: 154940 - RNA, 1755 nt, Artificial Sequence; identical to SEQ ID NO: 154902
  derived and/or modified CDS sequence (opt3) from hemagglutinin__InfluenzaB__AGL09864

SEQ ID NO: 154941 - RNA, 1755 nt, Artificial Sequence; identical to SEQ ID NO: 154902
  derived and/or modified CDS sequence (opt3) from hemagglutinin__InfluenzaB__AGL09866

SEQ ID NO: 154942 - RNA, 1755 nt, Artificial Sequence; identical to SEQ ID NO: 154902
  derived and/or modified CDS sequence (opt3) from hemagglutinin__InfluenzaB__AGL09867

SEQ ID NO: 154943 - RNA, 1755 nt, Artificial Sequence; identical to SEQ ID NO: 154902
  derived and/or modified CDS sequence (opt3) from hemagglutinin__InfluenzaB__AGL09868

SEQ ID NO: 154944 - RNA, 1755 nt, Artificial Sequence
  derived and/or modified CDS sequence (opt3) from hemagglutinin__InfluenzaB__AGL09869
augaaggccaucauugugcugcucauggucguuaccagcaacgcugacagaauaugcacaggcaucacuuccucuaauucaccccacgugguaaaaacggcaacccagggggaggugaacgucacaggagugauuccucuuacuaccacaccaaccaagaguuacuucgccaaucugaaagguacuaagacaaggggcaaauuguguccggauugcuuaaacuguaccgaccuggauguugcgcuagggcggcccaugugcgugggaacgacuccuagcgcuaaggccuccauccuccaugaaguccgcccagugaccucuggcuguuuucccauuaugcacgaccgaacaaagauccgucaacuggcaaaucuucugagagguuaugagaacauaagguugucgacucagaauguaaucgaugccgaaaaagcuccugggggaccauaccggcucggcaccucaggcagcugccccaacacaaccaguaaguccggguucuuugcaacgauggccugggcuguuccuaaagacaauaacaagaaugccacuaacccacugacaguggaggucccguauauuugugcggaaggagaggaucagaucaccgugugggguuuccauucugacaauaaaacucagaugaagaaccuguacggcgauagcaauccccaaaaguuuacauccucagcaaacggggugaccacgcacuaugucagucagauuggaggcuucccugaccagaccgaggauggugggcucccacagagcggacgcaucguuguggacuacaugaugcaaaaacccggcaagacaggcacuauaguauaucagagagggguguuacugccucagaaagucuggugcgccucuggaagguccaaggugauuaaagguucacuuccauugaucggcgaagcugauugucugcaugagaaguacgggggacuaaacaaaagcaagcccuacuauaccggcgaacacgccaaggcaauugguaauugcccgaucuggguuaaaacaccucucaagcuggcuaacgggacuaaauaccggcccccagccaagcugcugaaagagcgcggcuuuuucggagcgaucgccggcuuuuuggaagggggaugggaagguaugauugcaggcuggcacggguauaccagucauggagcucacggcguggccgucgcugccgaccucaagucuacacaggaggcaauaaauaagaucaccaaaaaccuuaauuccuuaagcgaacuggaggugaagaaccuccaacgacuuucgggugccauggacgaacugcauaaugagauuuuggagcuagaugaaaaaguagacgaucugagagcugacacuaucucuucccagauagagcucgcgguucugcuuucaaacgaagggauuaucaauagugaggaugaacaccuguuggcacucgagaggaagcugaaaaagauguuaggcccuagcgccguggacaucggaaacggcuguuucgagacgaagcacaaaugcaaucagacaugccuggaucggauugcugccgggaccuuuaacgcaggagaguucucccuacccacuuuugacucucucaauaucaccgccgcuagccugaacgaugacggucuugauaaucauacaauuuugcuguacuauucaaccgccgcaaguucccucgcggucacucugaugcuugcuauauucaucguguacauggucagccgugacaacgugucuuguucaauuugccuguga

SEQ ID NO: 154945 - RNA, 1755 nt, Artificial Sequence
  derived and/or modified CDS sequence (opt3) from hemagglutinin__InfluenzaB__AGL09870
augaaggccaucauugugcugcucauggucguuaccagcaacgcugacagaauaugcacaggcaucacuuccucuaauucaccccacgugguaaaaacggcaacccagggggaggugaacgucacaggagugauuccucuuacuaccacaccaaccaagaguuacuucgccaaucugaaagguacuaagacaaggggcaaauuguguccggauugcuuaaacuguaccgaccuggauguugcgcuagggcggcccaugugcgugggaacgacuccuagcgcuaaggccuccauccuccaugaaguccgcccagugaccucuggcuguuuucccauuaugcacgaccgaacaaagauccgucaacuggcaaaucuucugagagguuaugagaacauaagguugucgacucagaauguaaucgaugccgaaaaagcuccugggggaccauaccggcucggcaccucaggcagcugccccaacgcaacaaguaaguccggguucuuugccaccauggcuugggccguuccuaaagacaauaacaagaaugcgacgaacccacugacuguggaggucccguauauuugugcagaaggagaggaucagaucacagugugggguuuccauucugacaauaaaacccagaugaagaaccuguacggcgauagcaauccccaacgcuuuacuuccucagccaacggggugacaacccacuaugucagucagauuggaggcuucccugaccagacggaggauggugggcucccacagagcggaagaaucguuguggacuacaugaugcaaaagcccggcaaaaccggcacaauaguauaucagcgcgggguguuacugccucagaaggucuggugcgcuucuggacgguccaaagugauuaaggguucacuuccauugaucggcgaagccgauugucugcaugagaaauacgggggacuaaacaagagcaaacccuacuauacuggcgaacacgcaaaggcuauugguaauugcccgaucuggguuaagaccccucucaaacuggccaacgggacaaaguacaggcccccagcgaaacuucugaaggagcgaggcuuuuucggagccaucgcaggcuuuuuggaagggggaugggaagguaugauugcuggcuggcacggguauacuucccauggagcccacggcguggcugucgccgcagaccucaaaucuacccaggaggccauaaauaagaucacaaagaaccugaauaguuuaagcgaacuggaggugaaaaaccuccaaagacuuucgggugcuauggacgaacugcauaaugagauuuuggagcuagaugaaaagguagacgaucugagggcggacaccaucucuucccagauagagcucgcaguucugcuuucaaacgaagggauuaucaauagugaggaugaacaccuguuggcccucgagcggaaacugaagaaaauguuaggcccuagcgcuguggacaucggaaacggcuguuucgagacuaagcacaagugcaaucagacgugccuggaucguauugccgcagggacauuuaacgccggagaguucucccuacccaccuuugacucucucaauaucacugcugccagccugaacgaugacggucuugauaaucauaccauuuugcuguacuauucaacagcagcgaguucccucgcugucacccugaugcuugccauauucaucguguacauggucagccgcgacaacgugucuuguucaauuugccuguga

SEQ ID NO: 154946 - RNA, 1755 nt, Artificial Sequence; identical to SEQ ID NO: 154902
  derived and/or modified CDS sequence (opt3) from hemagglutinin__InfluenzaB__AGL09871

SEQ ID NO: 154947 - RNA, 1755 nt, Artificial Sequence
  derived and/or modified CDS sequence (opt3) from hemagglutinin__InfluenzaB__AGL09872
augaaggccaucauugugcugcucauggucguuaccagcaacgcugacagaauaugcacaggcaucacuuccucuaauucaccccacgugguaaaaacggcaacccagggggaggugaacgucacaggagugauuccucuuacuaccacaccaaccaagaguuacuucgccaaucugaaagguacuaagacaaggggcaaauuguguccggauugcuuaaacuguaccgaccuggauguugcgcuagggcggcccaugugcgugggaacgacuccuagcgcuaaggccuccauccuccaugaaguccgcccagugaccucuggcuguuuucccauuaugcacgaccgaacaaagauccgucaacuggcaaaucuucugagagguuaugagaacauaagguugucgacucagaauguaaucgaugccgaaaaagcuccugggggaccauaccggcucggcaccucaggcagcugccccaacgcaacaaguaaguccggguucuuugccaccauggcuugggccguuccuaaagacaauaacaagaaugcgacgaacccacugacuguggaggucccguauauuugugcagaaggagaggaucagaucgccgugugggguuuccauucugacaauaaaacacagaugaagaaccuguacggcgauagcaauccccaaaaguuuaccuccucagcuaacggggugacuacacacuaugucagucagauuggaggcuucccugaccagaccgaggauggugggcucccacagagcggacgcaucguuguggacuacaugaugcaaaaacccggcaagacgggcaccauaguauaucagagagggguguuacugccucagaaagucuggugcgccucuggaagguccaaggugauuaaagguucacuuccauugaucggcgaagcagauugucugcaugagaaguacgggggacuaaacaaaagcaagcccuacuauacaggcgaacacgcuaaggccauugguaauugcccgaucuggguuaaaacuccucucaagcuggcgaacgggaccaaauaccggcccccagccaagcugcugaaagagcgcggcuuuuucggagcaaucgcuggcuuuuuggaagggggaugggaagguaugauugccggcuggcacggguauacaagucauggagcucacggcguggccgucgcagccgaccucaagucuacucaggaggcuauaaauaagaucaccaaaaaccuuaauuccuuaagcgaacuggaggugaagaaccuccaacgacuuucgggugcgauggacgaacugcauaaugagauuuuggagcuagaugaaaaaguagacgaucugagagcagacacaaucucuucccagauagagcucgccguucugcuuucaaacgaagggauuaucaauagugaggaugaacaccuguuggcucucgagaggaagcugaaaaagauguuaggcccuagcgccguggacaucggaaacggcuguuucgagaccaagcacaaaugcaaucagacuugccuggaucggauugcagccgggacguuuaacgcuggagaguucucccuacccacauuugacucucucaauaucaccgccgcaagccugaacgaugacggucuugauaaucauacuauuuugcuguacuauucaaccgcggcuaguucccucgccgucacacugaugcuugcaauauucaucguguacauggucagccgugacaacgugucuuguucaauuugccuguga

SEQ ID NO: 154948 - RNA, 1755 nt, Artificial Sequence; identical to SEQ ID NO: 154902
  derived and/or modified CDS sequence (opt3) from hemagglutinin__InfluenzaB__AGL09873

SEQ ID NO: 154949 - RNA, 1758 nt, Artificial Sequence; identical to SEQ ID NO: 154935
  derived and/or modified CDS sequence (opt3) from hemagglutinin__InfluenzaB__AGL09874

SEQ ID NO: 154950 - RNA, 1758 nt, Artificial Sequence; identical to SEQ ID NO: 154920
  derived and/or modified CDS sequence (opt3) from hemagglutinin__InfluenzaB__AGO02695

SEQ ID NO: 154951 - RNA, 1755 nt, Artificial Sequence; identical to SEQ ID NO: 154902
  derived and/or modified CDS sequence (opt3) from hemagglutinin__InfluenzaB__AGQ16249

SEQ ID NO: 154952 - RNA, 1758 nt, Artificial Sequence; identical to SEQ ID NO: 154935
  derived and/or modified CDS sequence (opt3) from hemagglutinin__InfluenzaB__AGQ16250

SEQ ID NO: 154953 - RNA, 1758 nt, Artificial Sequence; identical to SEQ ID NO: 154935
  derived and/or modified CDS sequence (opt3) from hemagglutinin__InfluenzaB__AGQ16251

SEQ ID NO: 154954 - RNA, 1755 nt, Artificial Sequence
  derived and/or modified CDS sequence (opt3) from hemagglutinin__InfluenzaB__AGQ16252
augaaggccaucauugugcugcucauggucguuaccagcaacgcugacagaauaugcacaggcaucacuuccucuaauucaccccacgugguaaaaacggcaacccagggggaagugaacgucacaggagugauuccucuuacuaccacaccagccaagaguuacuucgcgaaucugaaagguaccaggacucggggcaaguuguguccggauugcuuaaacuguacagaccuggauguugcucuagggcgccccaugugcgugggaaccacgccuagcgccaaagcauccauccuccaugaaguccgaccagugacuucuggcuguuuucccauuaugcacgaccguaccaagaucagacaacugccuaaucuucugagggguuaugagaacauacgguugucgacacagaauguaaucgaugccgaaaaggcuccagggggacccuaccgccucggcacuucaggcagcugcccuaacgcaaccaguaaaauuggguucuuugccacaauggcuugggccguuccaaaggacaauuauaaaaacgcgaccaauccgcugacgguggagguccccuacaucuguaaggaaggagaggaucagauuacugugugggguuuccauuccgacaacaaaacacagaugaagaaucuguauggcgauucuaacccucaaaaguuuaccagcuccgcaaauggggugacuacacacuacgucucacagaucggagacuucccagaucagaccgaggacggcggucucccccagagugggagaauaguuguggauuauaugaugcaaaaaccuggaaagacgggcaccauuguauaccagaggggcguguuacugccacagaaagucuggugcgccagcgggcggucuaaggugaucaaaggaucccuucccuugauuggugaagcugacugucugcaugaggaauacggcgggcuaaacaagucaaaaccguauuacacaggaaagcacgccaaggcaaucggcaacugcccuaucuggguuaaaacuccccucaagcuggcuaaugguaccaaauaucgcccuccagccaaacuucugaaggagcgaggguuuuucggcgcgauugccggauuuuuggagggcgggugggaaggaaugauagcagguuggcacggcuacacaagccauggggcucacggaguggccgucgcugccgaccucaagaguacucaggaggcaaucaacaagauuaccaaaaaucugaacucuuuauccgaacuggaggugaagaaucuccaaagacuuagcggcgccauggaugaacugcauaacgagaucuuggagcuagacgaaaaaguagaugaccugagggcugauacaauaucgucucagauugagcucgcgguucugcuuuccaaugaagguaucaucaacucagaggacgaacaccuguuggcacucgagcggaagcugaaaaagauguuagggcccagugccguggauauuggcaauggauguuucgagaccaagcacaaaugcaaccagacuugccuggaccguaucgcugccggcacguuuaaugcaggggaguucagccuaccaacauuugauucccucaacauuaccgccgcuucucugaaugacgauggacuugacaaccauacuauauugcuguauuacagcaccgccgcaucaagucucgcggucacacugaugcuugcuaucuucauuguguauauggucucccgcgacaaugugagcuguucuaucugccuguga

SEQ ID NO: 154955 - RNA, 1755 nt, Artificial Sequence; identical to SEQ ID NO: 154902
  derived and/or modified CDS sequence (opt3) from hemagglutinin__InfluenzaB__AGQ16253

SEQ ID NO: 154956 - RNA, 1755 nt, Artificial Sequence
  derived and/or modified CDS sequence (opt3) from hemagglutinin__InfluenzaB__AGQ16255
augaaggccaucauugugcugcucauggucguuaccagcaacgcugacagaauaugcacaggcaucacuuccucuaauucaccccacgugguaaaaacggcaacccagggggaggugaacgucacaggagugauuccucuuacuaccacaccaaccaagaguuacuucgccaaucugaaagguacuaagacaaggggcaaauuguguccggauugcuuaaacuguaccgaccuggauguugcgcuagggcggcccaugugcgugggaacgacuccuagcgcuaaggccuccauccuccaugaaguccgcccagugaccucuggcuguuuucccauuaugcacgaccgaacaaagauccgucaacuggcaaaucuucugagagguuaugagaacauaagguugucgacucagaauguaaucgaugccgaaaaagcuccugggggaccauaccggcucggcaccucaggcagcugccccaacgcaacaaguaaguccggguucuuugccaccauggcuugggccguuccuaaagacaauaacaagaaugcgacgaacccacugacuguggaggucccguauauuugugcagaaggagaggaucagaucacagugugggguuuccauucugacaauaaaacccagaugaagaaccuguacggcgauagcaauccccaaaaguuuacuuccucagccaacgggauuacaacccacuaugugagucagaucggaggcuucccugaccagacggaggauggugggcucccacagagcggacgcauagucguugacuacaugaugcaaaaacccggcaagaccggcacaauuguguaucagagagggguauuacugccucagaaaguguggugcgcuucuggaagguccaaggucaucaaagguucacuuccauugauuggcgaagccgauugucugcaugagaaguacgggggacuaaacaaaagcaagcccuacuauacuggcgaacacgcaaaggcuaucgguaauugcccgaucugggugaaaaccccucucaagcuggccaacgggacaaaauaccggcccccagcgaagcugcugaaagagcgcggcuuuuucggagccauugcaggcuuuuuggaagggggaugggaagguaugauagcuggcuggcacggguauacaagucauggagcccacggcguugcuguggccgcagaccucaagucuacccaggaggccaucaauaagauuacuaaaaaccuuaauuccuuaagcgaacuggaggucaagaaccuccaacgacuuucgggugcuauggacgaacugcauaaugagaucuuggagcuagaugaaaaaguggacgaucugagagcggacaccauaucuucccagauugagcucgcaguacugcuuucaaacgaagggaucaucaauagugaggaugaacaccuguuggcccucgagaggaagcugaaaaagauguuaggcccuagcgcuguugacauuggaaacggcuguuucgagacuaagcacaaaugcaaucagacgugccuggaucggaucgccgcagggacauuuaacgccggagaguucucccuacccaccuuugacucucucaauauuacugcugccagccugaacgaugacggucuugauaaucauauaaucuugcuguacuauucaaccgcagcgaguucccucgcugugacacugaugcuugccauuuucaucgucuacauggugagccgugacaacgucucuuguucaaucugccuguga

SEQ ID NO: 154957 - RNA, 1755 nt, Artificial Sequence
  derived and/or modified CDS sequence (opt3) from hemagglutinin__InfluenzaB__AGQ16256
augaaggccaucauugugcugcucauggucguuaccagcaacgcugacagaauaugcacaggcaucacuuccucuaauucaccccacgugguaaaaacggugacccagggggaggucaacgugacaggaguuauuccucuuacuaccacaccaaccaagaguuacuucgcaaaucugaaagguacuaagacaaggggcaaauuguguccggauugcuuaaacuguaccgaccuggauguggcccuagggcggcccaugugcgucggaacgacuccuagcgcgaaggcuuccauccuccaugaagugcgcccaguaaccucuggcuguuuucccauuaugcacgaccgaacaaagauccgucaacuggccaaucuucugagagguuaugagaacauaagguugucgacucagaauguuaucgaugcagaaaaagccccugggggaccauaccggcucggcaccucaggcagcugccccaacgcuacaaguaaguccggguucuuugcaaccauggccugggcugugccuaaagacucuaauaagaacgccacgaauccacugacugucgaggugccguauauuugugcggaaggagaggaucagaucacagugugggguuuccauagcgacaacaaaacccagaugaagaaucuguacggcgauuccaacccccaaaaguuuacuucaagugcaaauggggucacaacccacuauguuagccagauuggaggcuucccugaccagacggaggauggugggcucccacagucuggacgcaucgugguagacuacaugaugcaaaaacccggcaagaccggcacaauaguguaucagagaggggucuuacugccucagaaaguguggugcgccuccggaaggucaaagguuauuaaagguagccuuccauugaucggcgaagcugauugucugcaugagaaguacgggggacuaaacaaaaguaagcccuacuauacuggcgaacacgccaaggcaauugguaacugcccgaucugggugaaaaccccucucaagcuggcuaaugggacaaaauaccggcccccagccaaacuucugaaagagcgcggcuuuuucggagcgaucgccggcuuuuuggaagggggaugggaagguaugauugcaggcuggcacggguauacuucucauggagcucacggcgucgccguggcugccgaccucaaguccacccaggaggcaauaaacaagaucacaaagaaucugaacagcuuaucggaacuggagguaaagaaucuccaacgacuuucuggugccauggacgaacugcauaacgagauuuuggagcuagaugaaaaaguugacgaucugagagcugacaccaucuccucacagauagagcucgcggugcugcuuaguaaugaagggauuaucaacagcgaggaugaacaccuguuggcacucgagaggaagcugaaaaagauguuaggcccuuccgccgucgacaucggaaauggcuguuucgagacuaagcacaaaugcaaccagacgugccuggaucggauugcugccgggacauuuaaugcaggagaguucucucuacccaccuuugacagccucaacaucacugccgcuucacugaaugaugacggucuugauaaccauaccauuuugcuguacuauaguacagccgcauccagccucgcggugacccugaugcuugcuauauucaucgucuacauggugucucgugacaauguuucauguaguauuugccuguga

SEQ ID NO: 154958 - RNA, 1755 nt, Artificial Sequence; identical to SEQ ID NO: 154902
  derived and/or modified CDS sequence (opt3) from hemagglutinin__InfluenzaB__AGQ16257

SEQ ID NO: 154959 - RNA, 1755 nt, Artificial Sequence; identical to SEQ ID NO: 154902
  derived and/or modified CDS sequence (opt3) from hemagglutinin__InfluenzaB__AGQ16258

SEQ ID NO: 154960 - RNA, 1755 nt, Artificial Sequence; identical to SEQ ID NO: 154902
  derived and/or modified CDS sequence (opt3) from hemagglutinin__InfluenzaB__AGQ16259

SEQ ID NO: 154961 - RNA, 1755 nt, Artificial Sequence
  derived and/or modified CDS sequence (opt3) from hemagglutinin__InfluenzaB__AGQ16260
augaagaccaucauugugcugcucauggucguuacaagcaacgccgacagaauaugcacuggcaucacguccucuaauucaccccacgugguaaaaaccgcuacacagggggaggugaacgucacuggagugauuccucuuaccacaaccccaacuaagaguuacuucgcaaaucugaaagguacaaagaccaggggcaaauuguguccggauugcuuaaacuguacggaccuggauguugcccuagggcggcccaugugcgugggaacuaccccuagcgcgaaggcuuccauccuccaugaaguccgcccagugacaucuggcuguuuucccauuaugcacgaccgaacuaagauccgucaacuggccaaucuucugagagguuaugagaacauaagguugucgucacagaauguaaucgaugcagaaaaagccccugggggaccauaccggcucggcaccagcggcaguugccccaacgcuacauccaagucuggguucuuugcaaccauggccugggcuguuccuaaagacaauaacaagaaugccacgaacccacugacuguggaggucccguauauuugugcggaaggagaggaucagaucacagugugggguuuccauagcgacaauaaaacccagaugaagaaccuguacggcgauuccaauccccaaaaguuuacuucaagugcaaacggggugacaacccacuaugucagccagauuggaggcuucccugaccagacggaggauggugggcucccacagucuggacgcaucguuguggacuacaugaugcaaaaacccggcaagaccggcacaauaguauaucagagagggguguuacugccucagaaagucuggugcgccuccggaaggucaaaggugauuaaagguagccuuccauugaucggcgaagcugauugucugcaugagaaguacgggggacuaaacaaaaguaagcccuacuauacuggcgaacacgccaaggcaauugguaauugcccgaucuggguuaaaaccccucucaagcuggcuaacgggacaaaauaccggcccccagccaaacuucugaaagagcgcggcuuuuucggagcgaucgccggcuuuuuggaagggggaugggaagguaugauugcaggcuggcacggguauacuucucauggagcucacggcguggccgucgcugccgaccucaaguccacccaggaggcaauaaauaagaucacaaagaaccugaauagcuuaucggaacuggaggugaagaaccuccaacgacuuucuggugccauggacgaacugcauaaugagauuuuggagcuagaugaaaaaguagacgaucugagagcugacaccaucuccucacagauagagcucgcgguucugcuuaguaacgaagggauuaucaauagcgaggaugaacaccuguuggcacucgagaggaagcugaaaaagauguuaggcccuuccgccguggacaucggaaacggcuguuucgagacuaagcacaaaugcaaucagacgugccuggaucggauugcugccgggacauuuaacgcaggagaguucucucuacccaccuuugacagccucaauaucacugccgcuucacugaacgaugacggucuugauaaucauaccauuuugcuguacuauaguacagccgcauccagccucgcggucacccugaugcuugcuauauucaucguguacauggucucucgugacaacgugucauguaguauuugccuguga

SEQ ID NO: 154962 - RNA, 1755 nt, Artificial Sequence; identical to SEQ ID NO: 154902
  derived and/or modified CDS sequence (opt3) from hemagglutinin__InfluenzaB__AGQ16261

SEQ ID NO: 154963 - RNA, 1755 nt, Artificial Sequence; identical to SEQ ID NO: 154902
  derived and/or modified CDS sequence (opt3) from hemagglutinin__InfluenzaB__AGQ16262

SEQ ID NO: 154964 - RNA, 1758 nt, Artificial Sequence; identical to SEQ ID NO: 154935
  derived and/or modified CDS sequence (opt3) from hemagglutinin__InfluenzaB__AGQ16263

SEQ ID NO: 154965 - RNA, 1758 nt, Artificial Sequence; identical to SEQ ID NO: 154935
  derived and/or modified CDS sequence (opt3) from hemagglutinin__InfluenzaB__AGQ16264

SEQ ID NO: 154966 - RNA, 1755 nt, Artificial Sequence; identical to SEQ ID NO: 154947
  derived and/or modified CDS sequence (opt3) from hemagglutinin__InfluenzaB__AGQ16265

SEQ ID NO: 154967 - RNA, 1755 nt, Artificial Sequence
  derived and/or modified CDS sequence (opt3) from hemagglutinin__InfluenzaB__AGQ16266
augaaggccaucauugugcugcucauggucguuaccagcaacgcugacagaauaugcacaggcaucacuuccucuaauucaccccacgugguaaaaacggcaacccagggggaggugaacgucacaggagugauuccucuuacuaccacaccaaccaagaguuacuucgccaaucugaaagguacuaagacaaggggcaaauuguguccggauugcuuaaacuguaccgaccuggauguugcgcuagggcggcccaugugcgugggaacgacuccuagcgcuaaggccuccauccuccaugaaguccgcccagugaccucuggcuguuuucccauuaugcacgaccgaacaaagauccgucaacuggcaaaucuucugagagguuaugagaacauaagguugucgacucagaauguaaucgaugccgaaaaagcuccugggggaccauaccggcucggcaccucaggcagcugccccaacgcaacaaguaaguccggguucuuugccaccauggcuugggccguuccuaaagacaauaacaagaaugcgacgaacccacugacuguggaggucccguauauuugugcagaaggagaggaucagaucacagugugggguuuccauucugacaauaaaacccagaugaagaaccuguacggcgauagcaauccccaaaaguuuacuuccucagccaacggggugacaacccacuaugucagucagguuggaggcuucccugaccagacggaggauggugggcucccacagagcggacgcauugugguagacuacaugaugcaaaaacccggcaagaccggcacaaucguguaucagagaggggucuuacugccucagaaaguguggugcgcuucuggaagguccaagguuauaaaagguucacuuccauugauuggcgaagccgauugucugcaugagaaguacgggggacuaaacaaaagcaagcccuacuauacuggcgaacacgcaaaggcuaucgguaauugcccgauuugggugaaaaccccucucaagcuggccaacgggacaaaauaccggcccccagcgaagcugcugaaagagcgcggcuuuuucggagccaucgcaggcuuuuuggaagggggaugggaagguaugaucgcuggcuggcacggguauacaagucauggagcccacggcgucgcuguggccgcagaccucaagucuacccaggaggccauuaauaagauaacuaaaaaccuuaauuccuuaagcgaacuggagguaaagaaccuccaacgacuuucgggugcuauggacgaacugcauaaugagaucuuggagcuagaugaaaaaguugacgaucugagagcggacaccauuucuucccagaucgagcucgcagugcugcuuucaaacgaagggauaauuaauagugaggaugaacaccuguuggcccucgagaggaagcugaaaaagauguuaggcccuagcgcugucgacaucggaaacggcuguuucgagacuaagcacaaaugcaaucagacgugccuggaucggaucgccgcagggacauuuaacgccggagaguucucccuacccaccuuugacucucucaauauuacugcugccagccugaacgaugacggucuugauaaucauaccaucuugcuguacuauucaacagcagcgaguucccucgcugugacccugaugcuugccauuuucauagucuacauggugagccgugacaacguuucuuguucaaucugccuguga

SEQ ID NO: 154968 - RNA, 1755 nt, Artificial Sequence; identical to SEQ ID NO: 154947
  derived and/or modified CDS sequence (opt3) from hemagglutinin__InfluenzaB__AGQ16267

SEQ ID NO: 154969 - RNA, 1755 nt, Artificial Sequence; identical to SEQ ID NO: 154947
  derived and/or modified CDS sequence (opt3) from hemagglutinin__InfluenzaB__AGQ16268

SEQ ID NO: 154970 - RNA, 1758 nt, Artificial Sequence; identical to SEQ ID NO: 154920
  derived and/or modified CDS sequence (opt3) from hemagglutinin__InfluenzaB__AGQ16269

SEQ ID NO: 154971 - RNA, 1755 nt, Artificial Sequence; identical to SEQ ID NO: 154947
  derived and/or modified CDS sequence (opt3) from hemagglutinin__InfluenzaB__AGQ16270

SEQ ID NO: 154972 - RNA, 1755 nt, Artificial Sequence
  derived and/or modified CDS sequence (opt3) from hemagglutinin__InfluenzaB__AGQ16272
augaaggccaucauugugcugcucauggucguuaccagcaacgcugacagaauaugcacaggcaucacuuccucuaauucaccccacgugguaaaaacggcaacccagggggaggugaacgucacaggagugauuccucuuacuaccacaccaaccaagaguuacuucgccaaucugaaagguacuaagacaaggggcaaauuguguccggauugcuuaaacuguaccgaccuggauguugcgcuagggcggcccaugugcgugggaacgacuccuagcgcuaaggccuccauccuccaugaaguccgcccagugaccucuggcuguuuucccauuaugcacgaccgaacaaagauccgucaacuggcaaaucuucugagagguuaugagaacauaagguugucgacucagaauguaaucgaugccgaaaaagcuccugggggaccauaccggcucggcaccucaggcagcugccccaacgcaacaaguaaguccggguucuuugccaccauggcuugggccguuccucgcgacaauaacaaaaaugcgacgaacccacugacuguggaggucccguauauuugugaagagggagaggaucagaucacagugugggguuuccauucugacaauaagacccagaugaaaaaccuguacggcgauagcaauccccaaaaguuuacuuccucagcaaacggggugacaacccacuaugucagucagauuggaggcuucccugaccagacggaagauggugggcucccacagagcggaagaaucguuguggacuacaugaugcaaaagcccggcaaaaccggcacaauaguauaucagcgcgggguguuacugccucagaaggucuggugcgccucuggacgguccaaagugauuaaggguucacuuccauugaucggcgaggcugauugucugcaugaaaaauacgggggacuaaacaagagcaaacccuacuauacuggcgagcacgccaaggcaauugguaauugcccgaucuggguuaagaccccucucaaacuggcuaacgggacaaaguacaggcccccagccaaacuucugaaggagcgaggcuuuuucggagcgaucgccggcuuuuuggaagggggaugggaggguaugauugcaggcuggcacggguauacuucccauggagcucacggcguggccgucgcugccgaccucaaaucuacccaggaagcaauaaauaagaucacaaagaaccugaauaguuuaagcgagcuggaagugaaaaaccuccaaagacuuucgggugccauggacgagcugcauaaugagauuuuggaacuagaugagaagguagacgaucugagggcugacaccaucucuucccagauagaacucgcgguucugcuuucaaacgaggggauuaucaauagugaagaugagcaccuguuggcacucgagcggaaacugaagaaaauguuaggcccuagcgccguggacaucggaaacggcuguuucgaaacuaagcacaagugcaaucagacgugccuggaucguauugcugccgggacauuuaacgcaggagaguucucccuacccaccuuugacucucucaauaucacugccgcuagccugaacgaugacggucuugauaaucauaccauuuugcuguacuauucaacagccgcaaguucccucgcggucacccugaugcuugcuauauucaucguguacauggucagccgcgacaacgugucuuguucaauuugccuguga

SEQ ID NO: 154973 - RNA, 1755 nt, Artificial Sequence; identical to SEQ ID NO: 154902
  derived and/or modified CDS sequence (opt3) from hemagglutinin__InfluenzaB__AGQ16273

SEQ ID NO: 154974 - RNA, 1755 nt, Artificial Sequence; identical to SEQ ID NO: 154902
  derived and/or modified CDS sequence (opt3) from hemagglutinin__InfluenzaB__AGQ16274

SEQ ID NO: 154975 - RNA, 1755 nt, Artificial Sequence; identical to SEQ ID NO: 154902
  derived and/or modified CDS sequence (opt3) from hemagglutinin__InfluenzaB__AGQ16275

SEQ ID NO: 154976 - RNA, 1755 nt, Artificial Sequence; identical to SEQ ID NO: 154902
  derived and/or modified CDS sequence (opt3) from hemagglutinin__InfluenzaB__AGQ16276

SEQ ID NO: 154977 - RNA, 1755 nt, Artificial Sequence; identical to SEQ ID NO: 154947
  derived and/or modified CDS sequence (opt3) from hemagglutinin__InfluenzaB__AGQ16277

SEQ ID NO: 154978 - RNA, 1755 nt, Artificial Sequence; identical to SEQ ID NO: 154947
  derived and/or modified CDS sequence (opt3) from hemagglutinin__InfluenzaB__AGQ16278

SEQ ID NO: 154979 - RNA, 1755 nt, Artificial Sequence; identical to SEQ ID NO: 154947
  derived and/or modified CDS sequence (opt3) from hemagglutinin__InfluenzaB__AGQ16279

SEQ ID NO: 154980 - RNA, 1755 nt, Artificial Sequence; identical to SEQ ID NO: 154947
  derived and/or modified CDS sequence (opt3) from hemagglutinin__InfluenzaB__AGQ16280

SEQ ID NO: 154981 - RNA, 1755 nt, Artificial Sequence
  derived and/or modified CDS sequence (opt3) from hemagglutinin__InfluenzaB__AGQ16281
augaaggccaucauugugcugcucauggucguuaccagcaacgcugacagaauaugcacaggcaucacuuccucuaauucaccccacgugguaaaaacggcaacccagggggaagugaacgucacaggagugauuccucuuacuaccacaccaaccaagaguuacuucgccaaucugaaagguacuaagacaaggggcaaauuguguccggauugcuuaaacuguaccgaccuggauguugcgcuagggcggcccaugugcgugggaacgacuccuagcgcuaaggccuccauccuccaugaaguccgcccagugaccucuggcuguuuucccauuaugcacgaccgaacaaagauccgucaacuggcaaaucuucugagagguuaugagaacauaagguugucgacucagaauguaaucgaugccgaaaaagcuccugggggaccauaccggcucggcaccucaggcagcugccccaacgcaacaaguaaguccggguucuuugccaccauggcuugggccguuccuaaagacaauaacaagaaugcgacgaacccacugacuguggaggucccguauauuugugcagaaggagaggaucagaucacagugugggguuuccauucugacaauaaaacccagaugaagaaccuguacggcgauagcaauccccaaaaguuuacuuccucagccaacggggugacaacccacuaugucagucagauuggcagcuucccugaccagacggaggauggaggucucccacagucugggcgcaucguuguggacuacaugaugcaaaaacccggaaagaccggcacaauaguauaucagagaggcguguuacugccucagaaagucuggugcgcuuccgggaggucaaaggugauuaaaggaagccuuccauugaucggugaagccgauugucugcaugagaaguacggcgggcuaaacaaaaguaagcccuacuauacuggagaacacgcaaaggcuauuggcaauugcccgaucuggguuaaaaccccucucaagcuggccaacgguacaaaauaccggcccccagcgaaacuucugaaagagcgcggguuuuucggcgccaucgcaggauuuuuggagggcgggugggaaggaaugauugcugguuggcacggcuauacuucucauggggcccacggaguggcugucgccgcagaccucaaguccacccaggaggccauaaauaagaucacaaagaaccugaauagcuuaucggaacuggaggugaagaaccuccaacgacuuucuggcgcuauggacgaacugcauaaugagauuuuggagcuagaugaaaaaguagacgaucugagagcggacaccaucuccucacagauagagcucgcaguucugcuuaguaacgaagguauuaucaauagcgaggaugaacaccuguuggcccucgagaggaagcugaaaaagauguuagggccuuccgcuguggacaucggcaacggauguuucgagacuaagcacaaaugcaaucagacgugccuggaucggauugccgcaggcacauuuaacgccggggaguucucucuacccaccuuugacagccucaauaucacugcugccucacugaacgaugacggacuugauaaucauaccauuuugcuguacuauaguacagcagcguccagccucgcugucacccugaugcuugccauauucaucguguacauggucucucgugacaacgugucauguaguauuugccuguga

SEQ ID NO: 154982 - RNA, 1755 nt, Artificial Sequence
  derived and/or modified CDS sequence (opt3) from hemagglutinin__InfluenzaB__AGQ16282
augaaggccaucauugugcugcucauggucguuaccagcaacgcugacagaauaugcacaggcaucacuuccucuaauucaccccacgugguaaaaacggcaacccagggggaagugaacgucacaggagugauuccucuuacuaccacaccaaccaagaguuacuucgccaaucugaaagguacuaagacaaggggcaaauuguguccggauugcuuaaacuguaccgaccuggauguugcgcuagggcggcccaugugcgugggaacgacuccuagcgcuaaggccuccauccuccaugaaguccgcccagugaccucuggcuguuuucccauuaugcacgaccgaacaaagauccgucaacuggcaaaucuucugagagguuaugagaacauaagguugucgacucagaauguaaucgaugccgaaaaagcuccugggggaccauaccggcucggcaccucaggcagcugccccaacgcaacaaguaaguccggguucuuugccaccauggcuugggccguuccuaaaggaaauaacaagaaugcgacgaacccacugacuguggaggucccguauauuugugcagaaggugaggaccagaucacaguguggggcuuccauucugauaauaaaacccagaugaagaaccuguacggggacagcaauccccaacgcuuuacuuccucagccaacggagugacaacccacuaugucagucagauuggcgguuucccugaucagacggaggacgggggacucccacagagcggcagaaucguuguggauuacaugaugcaaaagcccggcaaaaccgggacaauaguauaucagaggggaguguuacugccucagaaggucuggugcgcuucuggucgguccaaagugauuaagggcucacuuccauugaucggggaagccgacugucugcaugagaaauacggaggccuaaacaagagcaaacccuacuauacuggugaacacgcaaaggcuauugggaauugcccgaucuggguuaagaccccucucaaacuggccaacggcacaaaguaccgacccccagcgaaacuucugaaggagcgcggauuuuucggcgccaucgcaggguuuuuggagggagguugggaaggcaugauugcuggguggcacggauauacuucccauggcgcccacgguguggcugucgccgcagaucucaaaucuacccaggaggccauaaauaagaucacaaagaaccugaauaguuuaagcgaacuggaggugaaaaaccuccaaagacuuucgggggcuauggacgaacugcauaaugagauuuuggagcuagacgaaaagguagaugaccugagggcggauaccaucucuucccagauagagcucgcaguucugcuuucaaacgaaggcauuaucaauagugaggacgaacaccuguuggcccucgagcggaaacugaagaaaauguuaggaccuagcgcuguggauaucggcaacggguguuucgagacuaagcacaagugcaaucagacgugccuggaccguauugccgcaggaacauuuaacgccggugaguucucccuacccaccuuugauucucucaauaucacugcugccagccugaacgacgauggccuugacaaucauaccauuuugcuguacuauucaacagcagcgaguucccucgcugucacccugaugcuugccauauucaucguguacauggucagccgcgauaacgugucuuguucaauuugccuguga

SEQ ID NO: 154983 - RNA, 1755 nt, Artificial Sequence
  derived and/or modified CDS sequence (opt3) from hemagglutinin__InfluenzaB__AGQ16283
augaaggccaucauugugcugcucauggucguuaccagcaacgcugacagaauaugcacaggcaucacuuccucuaauucaccccacgugguaaaaacggcaacccauggggaggugaacgucacaggagugauuccucuuacuaccacaccaaccaagaguuacuucgccaaucugaaagguacuaagacaaggggcaaauuguguccggauugcuuaaacuguaccgaccuggauguugcgcuagggcggcccaugugcgugggaacgacuccuagcgcuaaggccuccauccuccacgaaguccgcccagugaccucuggcuguuuucccauuaugcaugaccgaacaaagauccgucagcuggcaaaucuucugagagguuaugagaacauaagguugucgacucaaaauguaaucgaugccgaaaaagcuccugggggaccauaccggcucggcaccucaggcagcugccccaacgcaacaaguaaguccggguucuuugccaccauggcuugggccguuccuaaagacaauaacaagaaugcgacgaacccacugacuguggaggucccguauauuugugcagaaggagaggaucagaucgccgugugggguuuccacucugacaauaaaacacagaugaagaaccuguacggcgauagcaauccccagaaguuuaccuccucagcuaacggggugacuacacauuaugucagucaaauuggaggcuucccugaccagaccgaggauggugggcucccacagagcggacgcaucguuguggacuacaugaugcagaaacccggcaagacgggcaccauaguauaucaaagagggguguuacugccucagaaagucuggugcgccucuggaagguccaaggugauuaaagguucacuuccauugaucggcgaagcagauugucugcacgagaaguacgggggacuaaacaaaagcaagcccuacuauacaggcgaacacgcuaaggccauugguaauugcccgaucuggguuaaaacuccucucaagcuggcgaacgggaccaaauaccggcccccagccaagcugcugaaagagcgcggcuuuuucggagcaaucgcuggcuuuuuggaagggggaugggaagguaugauugccggcuggcauggguauacaagucacggagcucauggcguggccgucgcagccgaccucaagucuacucaggaggcuauaaauaagaucaccaaaaaccuuaauuccuuaagcgaacuggaggugaagaaccuccagcgacuuucgggugcgauggacgaacugcacaaugagauuuuggagcuagaugaaaaaguagacgaucugagagcagacacaaucucuucccaaauagagcucgccguucugcuuucaaacgaagggauuaucaauagugaggaugaacaccuguuggcucucgagaggaagcugaaaaagauguuaggcccuagcgccguggacaucggaaacggcuguuucgagaccaagcauaaaugcaaucagacuugccuggaucggauugcagccgggacguuuaacgcuggagaguucucccuacccacauuugacucucucaauaucaccgccgcaagccugaacgaugacggucuugauaaucacacuauuuugcuguacuauucaaccgcggcuaguucccucgccgucacacugaugcuugcaauauucaucguguacauggucagccgugacaacgugucuuguucaauuugccuguga

SEQ ID NO: 154984 - RNA, 1758 nt, Artificial Sequence
  derived and/or modified CDS sequence (opt3) from hemagglutinin__InfluenzaB__AGQ16284
augaaggccaucauugugcugcucauggucguuaccagcaacgcugacagaauaugcacaggcaucacuuccucuaauucaccccacgugguaaaaacggcaacccagggggaggugaacgucacaggagugauuccucuuacuaccacaccaaccaagagucauuucgccaaucugaaagguacugaaacaaggggcaaguuguguccgaaaugcuuaaacuguaccgaucuggacguugcgcuagggcggcccaagugcacgggaaagaucccuagcgcucgcguguccauucuccacgaggcccgaccagucacuucuggcuguuuucccaucaugcaugaucguaccaaaauaagacaacugccuaaucuucugagggguuacgaacacaucaaguugucgacacauaacgugauuaaugcagagaacgccccagggggacccuauaaaaucggcacuucaggcagcugcccuaauguaaccaacgggaauggauucuuugcuacaauggcaugggccguuccaaagaacgacaaaaauaagaccgcuacgaacccgcucacuauugaagugcccuacaucuguacagagggugaggaucagauaaccgucuggggcuuccacagugacaaugaaacucagauggccaagcuguauggggauuccaaaccucagaaguuuacaucuagcgcgaacggagugaccacgcacuacgugucccaaauuggcgguuucccaaaccagaccgaggacgggggacugccccagucaggccggaucgucguugauuauauggugcagaaaaguggcaagacagggacuauuaccuaccaacgcggaauccucuuaccucagaaaguauggugcgcaagcgguagaucuaaggugaucaaaggcucccugccacuuauuggggaagccgacuguuugcaugagaaguauggaggccugaauaagucaaaacccuacuacacaggugagcacgcuaaggccauagggaacugcccgaucugggucaaaacuccucuaaagcucgcaaauggcaccaaauauaggcccccagcuaagcugcuuaaggaacggggauuuuucggcgccauugcgggguuucuggagggagguugggaaggcaugaucgccggguggcauggauacacaagccacggcgcacacgguguggcuguugccgcugauuugaaaaguacccaggaggccauaaacaagauuacuaaaaaucucaacucucuguccgaauuagaggugaagaaucugcagcgccucagcggggcaauggacgagcuucauaacgaaauccuggaguuggaugaaaaagucgacgaccuacgagccgauacgaucucgucucaaauugagcuggcugugcuccuguccaaugaaggcaucauuaacucagaggacgagcaccuucuggcguuggaaagaaagcucaagaaaaugcugggaccuagugcaguagagauaggcaauggguguuucgaaacaaagcauaaaugcaaccagaccugcuuagauaggaucgccgcuggaacuuuugacgccggugaguucagccugcccaccuuugauucccuaaauauuacagcagccucucucaacgacgauggccuggacaaucacaccauccuuuuguauuacagcacugcugccucaagucuggcaguuacacucaugaucgcgauuuucguggucuauauggugucccgggauaacgucagcuguucuauaugccuguga

SEQ ID NO: 154985 - RNA, 1755 nt, Artificial Sequence; identical to SEQ ID NO: 154947
  derived and/or modified CDS sequence (opt3) from hemagglutinin__InfluenzaB__AGQ16285

SEQ ID NO: 154986 - RNA, 1755 nt, Artificial Sequence; identical to SEQ ID NO: 154947
  derived and/or modified CDS sequence (opt3) from hemagglutinin__InfluenzaB__AGQ16286

SEQ ID NO: 154987 - RNA, 1755 nt, Artificial Sequence
  derived and/or modified CDS sequence (opt3) from hemagglutinin__InfluenzaB__AGQ16287
augaaggccaucauugugcugcucauggucguuaccagcaacgcugacagaauaugcacaggcaucacuuccucuaauucaccccacgugguaaaaacggcaacccagggggaggugaacgucacaggagugauuccucuuacuaccacaccaaccaagaguuacuucgccaaucugaaagguacuaagacaaggggcaaauuguguccggauugcuuaaacuguaccgaccuggauguugcgcuagggcggcccaugugcgugggaacgacuccuagcgcuaaggccuccauccuccaugaaguccgcccagugaccucuggcuguuuucccauuaugcacgaccgaacaaagauccgucaacuggcaaaucuucugagagguuaugagaacauaagguugucgacucagaauguaaucgaugccgaaaaagcuccugggggaccauaccggcucggcaccucaggcagcugccccaacgcaacaaguaaguccggguucuuugccaccauggcuugggccguuccuaaagacaauaacaagaaugcgacgaacccacugacuguggaggucccguauauuugugaagagggagaggaucagaucacagugugggguuuccauucugacaauaaaacccagaugaagaaccuguacggcgauagcaauccccaaaaguuuacuuccucagcaaacggggugacaacccacuaugucagucagauuggaggcuucccugaccagacggaagauggugggcucccacagagcggacgcaucguuguggacuacaugaugcaaaaacccggcaagaccggcacaauaguauaucagagagggguguuacugccucagaaagucuggugcgccucuggaagguccaaggugauuaaagguucacuuccauugaucggcgaggcugauugucugcaugaaaaguacgggggacuaaacaaaagcaagcccuacuauacuggcgagcacgccaaggcaauugguaauugcccgaucuggguuaaaaccccucucaagcuggcuaacgggacaaaauaccggcccccagccaagcugcugaaagagcgcggcuuuuucggagcgaucgccggcuuuuuggaagggggaugggaggguaugauugcaggcuggcacggguauacaagucauggagcucacggcguggccgucgcugccgaccucaagucuacccaggaagcaauaaauaagaucacuaaaaaccuuaauuccuuaagcgagcuggaagugaagaaccuccaacgacuuucgggugccauggacgagcugcauaaugagauuuuggaacuagaugagaaaguagacgaucugagagcugacaccaucucuucccagauagaacucgcgguucugcuuucaaacgaggggauuaucaauagugaagaugagcaccuguuggcacucgagaggaagcugaaaaagauguuaggcccuagcgccguggacaucggaaacggcuguuucgaaacuaagcacaaaugcaaucagacgugccuggaucggauugcugccgggacauuuaacgcaggagaguucucccuacccaccuuugacucucucaauaucacugccgcuagccugaacgaugacggucuugauaaucauaccauuuugcuguacuauucaacagccgcaaguucccucgcggucacccugaugcuugcuauauucaucguguacauggucagccgugacaacgugucuuguucaauuugccuguga

SEQ ID NO: 154988 - RNA, 1755 nt, Artificial Sequence; identical to SEQ ID NO: 154902
  derived and/or modified CDS sequence (opt3) from hemagglutinin__InfluenzaB__AGQ16289

SEQ ID NO: 154989 - RNA, 1755 nt, Artificial Sequence; identical to SEQ ID NO: 154902
  derived and/or modified CDS sequence (opt3) from hemagglutinin__InfluenzaB__AGQ16290

SEQ ID NO: 154990 - RNA, 1755 nt, Artificial Sequence
  derived and/or modified CDS sequence (opt3) from hemagglutinin__InfluenzaB__AGQ16291
augaaggccaucauugugcugcucauggucguuaccagcaacgcugacagaauaugcacaggcaucacuuccucuaauucaccccacgugguaaaaacggcaacccagggggaggugaacgucacaggagugauuccucuuacuaccacaccaaccaagaguuacuucgccaaucugaaagguacuaagacaaggggcaaauuguguccggauugcuuaaacuguaccgaccuggauguugcgcuagggcggcccaugugcgugggaacgacuccuagcgcuaaggccuccauccuccaugaaguccgcccagugaccucuggcuguuuucccauuaugcacgaccgaacaaagauccgucaacuggcaaaucuucugagagguuaugagaacauaagguugucgacucagaauguaaucgaugccgaaaaagcuccugggggaccauaccggcucggcaccucaggcagcugccccaacacaaccaguaaguccggguucuuugcaacgauggccugggcuguuccuaaagacaauaacaagaaugccacuaacccacugacaguggaggucccguauauuugugcggaaggagaggaucagaucgcagugugggguuuccauucugacaauaaaacccagaugaagaaccuguacggcgauagcaauccccaaaaguuuacuuccucagccaacggggugacaacccacuaugucagucagauuggaggcuucccugaccagacggaggauggugggcucccacagagcggacgcaucguuguggacuacaugaugcaaaaacccggcaagaccggcacaauaguauaucagagagggguguuacugccucagaaagucuggugcgcuucuggaagguccaaggugauuaaagguucacuuccauugaucggcgaagccgauugucugcaugagaaguacgggggacuaaacaaaagcaagcccuacuauacuggcgaacacgcaaaggcuauugguaauugcccgaucuggguuaaaaccccucucaagcuggccaacgggacaaaauaccggcccccagcgaagcugcugaaagagcgcggcuuuuucggagccaucgcaggcuuuuuggaagggggaugggaagguaugauugcuggcuggcacggguauacaagucauggagcccacggcguggcugucgccgcagaccucaagucuacccaggaggccauaaauaagaucacuaaaaaccuuaauuccuuaagcgaacuggaggugaagaaccuccaacgacuuucgggugcuauggacgaacugcauaaugagauuuuggagcuagaugaaaaaguagacgaucugagagcggacaccaucucuucccagauagagcucgcaguucugcuuucaaacgaagggauuaucaauagugaggaugaacaccuguuggcccucgagaggaagcugaaaaagauguuaggcccuagcgcuguggacaucggaaacggcuguuucgagacuaagcacaaaugcaaucagacgugccuggaucggauugccgcagggacauuuaacgccggagaguucucccuacccaccuuugacucucucaauaucacugcugccagccugaacgaugacggucuugauaaucauaccauuuugcuguacuauucaacagcagcgaguucccucgcugucacccugaugcuugccauauucaucguguacauggucagccgugacaacgugucuuguucaauuugccuguga

SEQ ID NO: 154991 - RNA, 1755 nt, Artificial Sequence
  derived and/or modified CDS sequence (opt3) from hemagglutinin__InfluenzaB__AGQ16292
augaaggccaucauugugcugcucauggucguuaccagcaacgcugacagaauaugcacaggcaucacuuccucuaauucaccccacgugguaaaaacggcaacccagggggaggugaacgucacaggagugauuccucuuacuaccacaccaaccaagaguuacuucgccaaucugaaagguacuaagacaaggggcaaauuguguccggauugcuuaaacuguaccgaccuggauguugcgcuagggcggcccaugugcgugggaacgacuccuagcgcuaaggccuccauccuccaugaaguccgcccagugaccucuggcuguuuucccauuaugcacgaccgaacaaagauccgucaacuggcaaaucuucugagagguuaugagaacauaagguugucgacucagaauguaaucgaugccgaaaaagcuccugggggaccauaccggcucggcaccucaggcagcugccccaacgcaacaaguaaguccggguucuuugccaccauggcuugggccguuccuaaagacaauaacaagaaugcgacgaacccacugacuguggaggucccguauauuugugcagaaggagaggaucagaucgccgugugggguuuccauucugacaauaaaacacagaugaagaaccuguacggcgauagcaauccccaaaaguuuaccuccucagcuaacggggugacuacacacuaugucagucagauuggaggcuucccugaccagaccgaggauggugggcucccacagagcggacgcaucguuguggacuacaugaugcaaaaacccggcaagacgggcaccauaguauaucagagagggguguuacugccucagaaagucuggugcgccucuggaagguccaaggugauuaaagguucacuuccauugaucggcgaagcagauugucugcaugagaaguacgggggacuaaacaaaagcaagcccuacuauacaggcgaacacgcuaaggccauugguaauugcccgaucuggguuaaaacuccucucaagcuggcgaacgggaccaaauaccggcccccagccaagcugcugaaagagcgcggcuuuuucggagcaaucgcuggcuuuuuggaagggggaugggaagguaugauugccggcuggcacggguauacaagucauggagcucacggcguggccgucgcagccgaccucaagucuacucaggaggcuauaaauaagaucaccaaaaaccuuaauuccuuaagcgaacuggagauuaagaaccuccaacgacuuucgggugcgauggacgaacugcauaaugagaucuuggagcuagaugaaaaaguggacgaucugagagcagacacaauaucuucccagauugagcucgccguacugcuuucaaacgaagggaucaucaauagugaggaugaacaccuguuggcucucgagaggaagcugaaaaagauguuaggcccuagcgccguugacauuggaaacggcuguuucgagaccaagcacaaaugcaaucagacuugccuggaucggaucgcagccgggacguuuaacgcuggagaguucucccuacccacauuugacucucucaauauuaccgccgcaagccugaacgaugacggucuugauaaucauacuauauugcuguacuauucaaccgcggcuaguucccucgccgugacacugaugcuugcaaucuucauugucuacauggugagccgugacaacgucucuuguucaaucugccuguga

SEQ ID NO: 154992 - RNA, 1755 nt, Artificial Sequence; identical to SEQ ID NO: 154991
  derived and/or modified CDS sequence (opt3) from hemagglutinin__InfluenzaB__AGQ16293

SEQ ID NO: 154993 - RNA, 1755 nt, Artificial Sequence; identical to SEQ ID NO: 154991
  derived and/or modified CDS sequence (opt3) from hemagglutinin__InfluenzaB__AGQ16294

SEQ ID NO: 154994 - RNA, 1758 nt, Artificial Sequence
  derived and/or modified CDS sequence (opt3) from hemagglutinin__InfluenzaB__AGQ16295
augaaggccaucauugugcugcucauggucguuaccagcaacgcugacagaauaugcacaggcaucacuuccucuaauucaccccacgugguaaaaacggcaacccagggggaggugaacgucacaggagccauuccucuuacuaccacaccaaccaagagucauuucgcgaaucugaaagguacugaaacaaggggcaaguuguguccgaaaugcuuaaacuguaccgaucuggacguggcucuagggcggcccaagugcacgggaaagaucccuagcgcccgcguuuccauucuccacgaggugcgaccagucacuucuggcuguuuucccaucaugcaugaucguaccaaaauaagacaacugccuaaucuucugagggguuacgaacacauccgguugucgacacauaacgugauuaaugcagagaacgccccagggggacccuauaagaucggcacuucaggcagcugcccuaauguaaccaacgggaauggauucuuugcuacaauggcaugggccguuccgaaaaacgacaagaauaaaaccgaaacgaacccacucacuauugaggugcccuacaucuguacagaggaagaggaucagauaaccgucugggguuuccacagugacaaugaaacucagauggcuaagcuguauggcgauuccaagccucagaaauuuacaucuagcgccaacggggugaccacgcacuacgugucccaaauuggaggcuucccaaaccagaccgaggacggugggcugccccagucaggacgcaucgucguugauuauauggugcagaagaguggcaaaacaggcacuauuaccuaccaaagagggauccucuuaccucagaagguauggugcgcgagcggaaggucuaaagugaucaaggguucccugccacuuauuggcgaggcagacuguuugcaugaaaaauaugggggacugaauaagucaaagcccuacuacacaggcgagcacgccaaagcuauagguaacugcccgaucugggucaagacuccucuaaaacucgccaaugggaccaaguaucggcccccagcaaaacugcuuaaggaacgcggcuuuuucggagcuauugccggcuuucuggaagggggaugggaggguaugaucgcgggcuggcauggguacacaagccacggagcccacggcguggcaguugcugccgauuugaagaguacccaggaggcuauaaacaaaauuacuaagaaucucaacucucuguccgaguuagaagugaaaaaucugcagcgacucagcggugccauggacgagcuucauaacgaaauccuggaguuggaugaaaaggucgacgaccuaagagcagauacgaucucgucucaaauugagcuggccgugcuccuguccaaugaggggaucauuaacucagaagacgagcaccuucuggcuuuggaaaggaaacucaagaagaugcugggcccuagugcgguagagauaggaaauggcuguuucgaaacaaaacauaagugcaaccagaccugcuuagaucggaucgcagccgggacuuuugacgcuggagaguucagccugcccaccuuugauucccuaaauauuacagccgcaucucucaacgacgauggucuggacaaucacaccauccuuuuguauuacagcacugccgcuucaagucuggccguuacacucaugaucgcaauuuucguggucuauauggugucccgugauaacgucagcuguucuauaugccuguga

SEQ ID NO: 154995 - RNA, 1758 nt, Artificial Sequence; identical to SEQ ID NO: 154935
  derived and/or modified CDS sequence (opt3) from hemagglutinin__InfluenzaB__AGQ16296

SEQ ID NO: 154996 - RNA, 1755 nt, Artificial Sequence; identical to SEQ ID NO: 154902
  derived and/or modified CDS sequence (opt3) from hemagglutinin__InfluenzaB__AGQ16297

SEQ ID NO: 154997 - RNA, 1755 nt, Artificial Sequence
  derived and/or modified CDS sequence (opt3) from hemagglutinin__InfluenzaB__AGQ16298
augaaggccaucauugugcugcucauggucguuaccagcaacgcugacagaauaugcacaggcaucacuuccucuaauucaccccacgugguaaaaacggcaacccagggggaggugaacgucacaggagugauuccucuuacuaccacaccaaccaagaguuacuucgccaaucugaaagguacuaagacaaggggcaaauuguguccggauugcuuaaacuguaccgaccuggauguugcgcuagggcggcccaugugcgugggaacgacuccuagcgcuaaggccuccauccuccaugaaguccgcccagugaccucuggcuguuuucccauuaugcacgaccgaacaaagauccgucaacuggcaaaucuucugagagguuaugagaacauaagguugucgacucagaauguaaucgaugccgaaaaagcuccugggggaccauaccggcucggcaccucaggcagcugccccaacgcaacaaguaaguccggguucuuugccaccauggcuugggccguuccuaaagacaauaacaagaaugcgacgaacccacugacuguggaggucccguauauuugugcagaaggagaggaucagaucacagugugggguuuccauucugacaauaaaacccagaugaagaaccuguacggcgauagcaauccccaaaaguuuacuuccucagccaacggggugacaacccacuaugucagucagauuggaggcuucccugaccagacggaggauggugggcucccacagagcggacgcaucguuguggacuacaugaugcaaaaacccggcaagaccggcacaauaguauaucagagagggguguuacugccucagaaagucuggugcgcuucuggaagguccaaggugauuaaagguucacuuccauugaucggcgaagccgauugucugcaugagaaguacgggggacuaaacaaaagcaagcccuacuauacuggcgaacacgcaaaggcuauugguaauugcccgaucuggguuaaaaccccucucaagcuggccaacgggacaaaauaccggcccccagcgaagcugcugaaagagcgcggcuuuuucggagccaucgcaggcuuuuuggaagggggaugggaagguaugauugcuggcuggcacggguauacaagucauggagcccacggcguggcuauagccgcagaccucaagucuacccaggaggccaucaauaagauuacuaaaaaccuuaauuccuuaagcgaacuggaggucaagaaccuccaacgacuuucgggugcuauggacgaacugcauaaugagaucuuggagcuagaugaaaaaguggacgaucugagagcggacaccauaucuucccagauugagcucgcaguacugcuuucaaacgaagggaucaucaauagugaggaugaacaccuguuggcccucgagaggaagcugaaaaagauguuaggcccuagcgcuguugacauuggaaacggcuguuucgagacuaagcacaaaugcaaucagacgugccuggaucggaucgccgcagggacauuuaacgccggagaguucucccuacccaccuuugacucucucaauauuacugcugccagccugaacgaugacggucuugauaaucauaccauauugcuguacuauucaacagcagcgaguucccucgcugugacccugaugcuugccaucuucauugucuacauggugagccgugacaacgucucuuguucaaucugccuguga

SEQ ID NO: 154998 - RNA, 1755 nt, Artificial Sequence; identical to SEQ ID NO: 154947
  derived and/or modified CDS sequence (opt3) from hemagglutinin__InfluenzaB__AGQ16299

SEQ ID NO: 154999 - RNA, 1755 nt, Artificial Sequence; identical to SEQ ID NO: 154947
  derived and/or modified CDS sequence (opt3) from hemagglutinin__InfluenzaB__AGQ16300

SEQ ID NO: 155000 - RNA, 1755 nt, Artificial Sequence; identical to SEQ ID NO: 154902
  derived and/or modified CDS sequence (opt3) from hemagglutinin__InfluenzaB__AGQ16301

SEQ ID NO: 155001 - RNA, 1755 nt, Artificial Sequence; identical to SEQ ID NO: 154902
  derived and/or modified CDS sequence (opt3) from hemagglutinin__InfluenzaB__AGQ16302

SEQ ID NO: 155002 - RNA, 1755 nt, Artificial Sequence; identical to SEQ ID NO: 154902
  derived and/or modified CDS sequence (opt3) from hemagglutinin__InfluenzaB__AGQ16303

SEQ ID NO: 155003 - RNA, 1755 nt, Artificial Sequence; identical to SEQ ID NO: 154902
  derived and/or modified CDS sequence (opt3) from hemagglutinin__InfluenzaB__AGQ16305

SEQ ID NO: 155004 - RNA, 1758 nt, Artificial Sequence
  derived and/or modified CDS sequence (opt3) from hemagglutinin__InfluenzaB__AGQ16306
augaaggccaucauugugcugcucauggucguuaccagcaacgcugacagaauaugcacaggcaucacuuccucuaauucaccccacgugguaaaaacggcaacccagggggaagugaacgucacaggagugauuccucuuacuaccacaccaaccaagagucauuucgccaaucugaaagguacugaaacaaggggcaaguuguguccgaaaugcuuaaacuguaccgaucuggacguugcgcuagggcggcccaagugcacgggaaagaucccuagcgcucgcguguccauucuccacgagguccgaccagugacuucuggcuguuuucccaucaugcaugaucguaccaaaauaagacaacugccuaaucuucugagggguuacgaacacauccgguugucgacacauaacguaauuaaugccgagaacgcaccagggggacccuauaagaucggcacuucaggcagcugcccuaauguuaccaacgggaauggauucuuugccacaauggcuugggcagugccgaaaaacgacaagaauaaaaccgaaacgaacccacucacuauugagguccccuacaucuguaaggagggugaagaucagauaacaguguggggcuuccacagugacaaugagacccagauggccaagcuguauggggauuccaaaccucagaaguuuacuucuagcgcuaacggagugacaacccacuacgucucccaaauuggcgguuucccaaaccagacggaagacgggggacugccccagucaggccgcaucguuguggauuauaugguacagaaaaguggcaagaccgggacaauuacuuaccaaagaggaauccucuuaccucagaaaguguggugcgccagcgguaggucuaaggucaucaaaggcucccugccacuuauuggggaggcggacuguuugcaugagaaguauggaggccugaauaagucaaaacccuacuacaccggugaacacgcaaaggccauagggaacugcccgaucugggugaaaacaccucuaaagcucgcuaauggcacuaaauaucggcccccagccaagcugcuuaaggagcgcggauuuuucggcgcaauugcuggguuucuggaaggagguugggagggcaugaucgccggguggcauggauacaccagccacggcgcgcacgguguugccguggcagcugauuugaaaaguacacaggaagccauaaacaagauuaccaaaaaucucaacucucuguccgaguuagaggucaagaaucugcagcgacucagcggggcuauggacgaacuucauaacgagauccuggaauuggaugagaaaguggacgaccuaagagccgauacuaucucgucucaaauugaacuggcaguacuccuguccaaugagggcaucauuaacucagaggacgaacaccuucuggccuuggagaggaagcucaagaaaaugcugggaccuagugcuguugaaauaggcaauggguguuucgagacgaagcauaaaugcaaccagacaugcuuagaucggaucgcggcaggaaccuuugacgccggugaguucagccugcccacuuuugauucccuaaauauuaccgcugccucucucaacgacgauggccuggacaaucacacaauccuuuuguauuacagcaccgcagccucaagucuggcugugacucucaugaucgccauuuucgucguguauauggucucccgugauaacgugagcuguucuauaugccuguga

SEQ ID NO: 155005 - RNA, 1755 nt, Artificial Sequence; identical to SEQ ID NO: 154902
  derived and/or modified CDS sequence (opt3) from hemagglutinin__InfluenzaB__AGQ16307

SEQ ID NO: 155006 - RNA, 1758 nt, Artificial Sequence; identical to SEQ ID NO: 154935
  derived and/or modified CDS sequence (opt3) from hemagglutinin__InfluenzaB__AGQ16308

SEQ ID NO: 155007 - RNA, 1755 nt, Artificial Sequence
  derived and/or modified CDS sequence (opt3) from hemagglutinin__InfluenzaB__AGQ16309
augaaggccaucauugugcugcucauggucguuaccagcaacgcugacagaauaugcacaggcaucacuuccucuaauucaccccacgugguaaaaacggcaacccagggggaggugaacgucacaggagugauuccucuuacuaccacaccaaccaagaguuacuucgccaaucugaaagguacuaagacaaggggcaaauuguguccggauugcuuaaacuguaccgaccuggauguugcgcuagggcggcccaugugcgugggaacgacuccuagcgcuaaggccuccauccuccaugaaguccgcccagugaccucuggcuguuuucccauuaugcacgaccgaacaaagauccgucaacuggcaaaucuucugagagguuaugagaacauaagguugucgacucagaauguaaucgaugccgaaaaagcuccugggggaccauaccggcucggcaccucaggcagcugccccaacgcaacaaguaaguccggguucuuugccaccauggcuugggccguuccuaaagacaauaacaagaaugcgacgaacccacugacuguggaggucccguauauuugugcagaaggagaggaucagaucacagugugggguuuccauucugacaauaaaacccagaugaagaaccuguacggcgauagcaauccccaaaaguuuacuuccucagccaacggggugacaacccacuaugucagucagauuggaggcuucccugaccagacggaggauggugggcucccacagagcggacgcaucguugcugacuacaugaugcaaaaacccggcaagaccggcacaauaguguaucagagagggguauuacugccucagaaaguguggugcgccucuggaagguccaaggucauuaaagguucacuuccauugaucggcgaagcagauugucugcaugagaaguacgggggacuaaacaaaagcaagcccuacuauacuggcgaacacgcuaaggccauugguaauugcccgaucugggugaaaaccccucucaagcuggcgaacgggacaaaauaccggcccccagccaagcugcugaaagagcgcggcuuuuucggagcaaucgcuggcuuuuuggaagggggaugggaagguaugauugccggcuggcacggguauacaagucauggagcucacggcguugccguggcagccgaccucaagucuacccaggaggcuauaaauaagaucacuaaaaaccuuaauuccuuaagcgaacuggaggucaagaaccuccaacgacuuucgggugcgauggacgaacugcauaaugagauuuuggagcuagaugaaaaaguggacgaucugagagcagacaccaucucuucccagauagagcucgccguacugcuuucaaacgaagggauuaucaauagugaggaugaacaccuguuggcucucgagaggaagcugaaaaagauguuaggcccuagcgccguugacaucggaaacggcuguuucgagacuaagcacaaaugcaaucagacgugccuggaucggauugcagccgggacauuuaacgcuggagaguucucccuacccaccuuugacucucucaauaucacugccgcaagccugaacgaugacggucuugauaaucauaccauuuugcuguacuauucaacagcggcuaguucccucgccgugacccugaugcuugcaauauucaucgucuacauggugagccgugacaacgucucuuguucaauuugccuguga

SEQ ID NO: 155008 - RNA, 1755 nt, Artificial Sequence
  derived and/or modified CDS sequence (opt3) from hemagglutinin__InfluenzaB__AGQ16310
augaaggccaucauugugcugcucauggucguuaccagcaacgcugacagaauaugcacaggcaucacuuccucuaauucaccccacgugguaaaaacggcaacccagggggaggugaacgucacaggagugauuccucuuacuaccacaccaaccaagaguuacuucgccaaucugaaagguacuaagacaaggggcaaauuguguccggauugcuuaaacuguaccgaccuggauguugcgcuagggcggcccaugugcgugggaacgacuccuagcgcuaaggccuccauccuccaugaaguccgcccagugaccucuggcuguuuucccauuaugcacgaccgaacaaagauccgucaacuggcaaaucuucugagagguuaugagaacauaagguugucgacucagaauguaaucgaugccgaaaaagcuccugggggaccauaccggcucggcaccucaggcagcugccccaacgcaacaaguaaguccggguucuuugccaccauggcuugggccguuccuaaagacaauaacaagaaugcgacgaacccacugacuguggaggucccguauauuugugcagaaggagaggaucagaucacagugugggguuuccauucugacaauaaaacccagaugaagaaccuguacggcgauagcaauccccaaaaguuuacuuccucagccaacggggugacaacccacuaugucagucagauuggaggcuucccugaccagacggaggauggugggcucccacagagcggacgcaucguuguggacuacaugaugcaaaaacccggcaagaccggcacaauaguauaucagagagggguguuacugccucagaaagucuggugcgcuucuggaagguccaaggugauuaaagguucacuuccauugaucggcgaagccgauugucugcaugagaaguacgggggacuaaacaaaagcaagcccuacuauacuggcgaacacgcaaaggcuauugguaauugcccgaucuggguuaaaaccccucucaagcuggccaacgggacaaaauaccggcccccagcgaagcugcugaaagagcgcggcuuuuucggagccaucgcaggcuuuuuggaagggggaugggaagguaugguggcuggcuggcacggguauacaagucauggagcccacggcgucgcuguggccgcagaccucaagucuacccaggaggccauuaauaagauaacuaaaaaccuuaauuccuuaagcgaacuggagguaaagaaccuccaacgacuuucgggugcuauggacgaacugcauaaugagaucuuggagcuagaugaaaaaguugacgaucugagagcggacaccauuucuucccagaucgagcucgcagugcugcuuucaaacgaagggauaauuaauagugaggaugaacaccuguuggcccucgagaggaagcugaaaaagauguuaggcccuagcgcugucgacaucggaaacggcuguuucgagacuaagcacaaaugcaaucagacgugccuggaucggaucgccgcagggacauuuaacgccggagaguucucccuacccaccuuugacucucucaauauuacugcugccagccugaacgaugacggucuugauaaucauaccaucuugcuguacuauucaacagcagcgaguucccucgcugugacccugaugcuugccauuuucauagucuacauggugagccgugacaacguuucuuguucaaucugccuguga

SEQ ID NO: 155009 - RNA, 1758 nt, Artificial Sequence; identical to SEQ ID NO: 154935
  derived and/or modified CDS sequence (opt3) from hemagglutinin__InfluenzaB__AGQ16311

SEQ ID NO: 155010 - RNA, 1755 nt, Artificial Sequence; identical to SEQ ID NO: 154902
  derived and/or modified CDS sequence (opt3) from hemagglutinin__InfluenzaB__AGQ16312

SEQ ID NO: 155011 - RNA, 1755 nt, Artificial Sequence
  derived and/or modified CDS sequence (opt3) from hemagglutinin__InfluenzaB__AGQ16313
augaaggccaucauugugcugcucauggucguuaccagcaacgcugacagaauaugcacaggcaucacuuccucuaauucaccccacgugguaaaaacggcaacccagggggaggugaacgucacaggagugauuccucuuacuaccacaccaaccaagaguuacuucgccaaucugaaagguacuaagacaaggggcaaauuguguccggauugcuuaaacuguaccgaccuggauguugcgcuagggcggcccaugugcgugggaacgacuccuagcgcuaaggccuccauccuccaugaaguccgcccagugaccucuggcuguuuucccauuaugcacgaccgaacaaagauccgucaacuggcaaaucuucugagagguuaugagaacauaagguugucgacucagaauguaaucgaugccgaaaaagcuccugggggaccauaccggcucggcaccucaggcagcugccccaacgcaacaaguaaguccggguucuuugccaccauggcuugggccguuccuaaagacaauaacaagaaugcgacgaacccacugacuguggaggucccguauauuugugcagaaggagaggaucagaucgccgugugggguuuccauucugacaauaaaacacagaugaagaaccuguacggcgauagcaauccccaaaaguuuaccuccucagcuaacggggugacuacacacuaugucagucagauuggaggcuucccugaccagaccgaggauggugggcucccacagagcggacgcaucguuguggacuacaugaugcaaaaacccggcaagacgggcaccauaguauaucagagagggguguuacugccucagaaagucuggugcgccucuggaagguccaaggugauuaaagguucacuuccauugaucggcgaagcagauugucugcaugagaaguacgggggacuaaacaaaagcaagcccuacuauacaggcgaacacgcuaaggccauugguaauugcccgaucuggguuaaaacuccucucaagcuggcgaacgggaccaaauaccggcccccagccaagcugcugaaagagaagggcuuuuucggagcaaucgcuggcuuuuuggaagggggaugggaagguaugauugccggcuggcacggguauacaagucauggagcucacggcguggccgucgcagccgaccucaagucuacucaggaggcuauaaauaaaaucaccaagaaccuuaauuccuuaagcgaacuggaggugaaaaaccuccaacgccuuucgggugcgauggacgaacugcauaaugagauuuuggagcuagaugaaaagguagacgaucugcgagcagacacaaucucuucccagauagagcucgccguucugcuuucaaacgaagggauuaucaauagugaggaugaacaccuguuggcucucgagagaaaacugaagaagauguuaggcccuagcgccguggacaucggaaacggcuguuucgagaccaaacacaagugcaaucagacuugccuggauaggauugcagccgggacguuuaacgcuggagaguucucccuacccacauuugacucucucaauaucaccgccgcaagccugaacgaugacggucuugauaaucauacuauuuugcuguacuauucaaccgcggcuaguucccucgccgucacacugaugcuugcaauauucaucguguacauggucagccgggacaacgugucuuguucaauuugccuguga

SEQ ID NO: 155012 - RNA, 1758 nt, Artificial Sequence
  derived and/or modified CDS sequence (opt3) from hemagglutinin__InfluenzaB__AGQ16314
augaaggccaucauugugcugcucauggucguuaccagcaacgcugacagaauaugcacaggcaucacuuccucuaauucaccccacgugguaaaaacggcaacccagggggaggugaacgucacaggagugauuccucuuacuaccacaccaaccaagagucauuucgccaaucugaaagguacugaaacaaggggcaaguuguguccgaaaugcuuaaacuguaccgaucuggacguugcgcuagggcggcccaagugcacgggaaagaucccuagcgcucgcguguccauucuccacgagguccgaccagugacuucuggcuguuuucccaucaugcaugaucguaccaaaauaagacaacugccuaaucuucugagggguuacgaacacauccgguugucgacacauaacguaauuaaugccgagaacgcaccagggggacccuauaagaucggcacuucaggcagcugcccuaauguuaccaacgggaauggauucuuugccacaauggcuugggcagugccgaaaaacgacaagaauaaaaccgaaacgaacccacucacuauugagguccccuacaucuguacagaggaagaggaucagauaaccgugugggguuuccacagugacaaugaaacucagauggccaagcuguauggcgauuccaagccucagaaauuuacaucuagcgcuaacggggugaccacgcacuacgucucccaaauuggaggcuucccaaaccagaccgaggacggugggcugccccagucaggacgcaucguuguggauuauaugguacagaagaguggcaaaacaggcacuauuaccuaccaaagagggauccucuuaccucagaagguguggugcgccagcggaaggucuaaagucaucaaggguucccugccacuuauuggcgaggcggacuguuugcaugaaaaauaugggggacugaauaagucaaagcccuacuacacaggcgagcacgcaaaagccauagguaacugcccgaucugggugaagacuccucuaaaacucgcuaaugggaccaaguaucggcccccagccaaacugcuuaaggaacgcggcuuuuucggagcaauugcuggcuuucuggaagggggaugggaggguaugaucgccggcuggcauggguacacaagccacggagcgcacggcguugccguggcagcugauuugaagaguacccaggaggccauaaacaaaauuacuaagaaucucaacucucuguccgaguuagaagucaaaaaucugcagcgacucagcggugcuauggacgagcuucauaacgaaauccuggaguuggaugaaaagguggacgaccuaagagccgauacgaucucgucucaaauugagcuggcaguacuccuguccaaugaggggaucauuaacucagaagacgagcaccuucuggccuuggaaaggaaacucaagaagaugcugggcccuagugcuguugagauaggaaauggcuguuucgaaacaaaacauaagugcaaccagaccugcuuagaucggaucgcggcagggacuuuugacgccggagaguucagccugcccaccuuugauucccuaaauauuacagcugccucucucaacgacgauggucuggacaaucacaccauccuuuuguauuacagcacugcagccucaagucuggcugugacacucaugaucgccauuuucgucguguauauggucucccgugauaacgugagcuguucuauaugccuguga

SEQ ID NO: 155013 - RNA, 1755 nt, Artificial Sequence
  derived and/or modified CDS sequence (opt3) from hemagglutinin__InfluenzaB__AGQ16315
augaaggccaucauugugcugcucauggucguuaccagcaacgcugacagaauaugcacaggcaucacuuccucuaauucaccccacgugguaaaaacggcaacccagggggaggugaacgucacaggagugauuccucuuacuaccacaccaaccaagaguuacuucgccaaucugaaagguacuaagacaaggggcaaauuguguccggauugcuuaaacuguaccgaccuggauguugcgcuagggcggcccaugugcgugggaacgacuccuagcgcuaaggccuccauccuccaugaaguccgcccagugaccucuggcuguuuucccauuaugcacgaccgaacaaagauccgucaacuggcaaaucuucugagagguuaugagaacauaagguugucgacucagaccguaaucgaugccgaaaaagcuccugggggaccauaccggcucggcacaucaggcagcugccccaaugcaaccaguaaguccggguucuuugccacgauggcuugggccguuccuaaagacaacaauaagaacgcgacuaauccacugacaguggaggucccguauauuugugcagaaggagaggaucagaucaccgugugggguuuccauucugacaacaaaacucagaugaagaaucuguacggcgauagcaacccccaaaaguuuacauccucagccaaugggauuaccacgcacuaugugagucagaucggaggcuucccugaccagaccgaggauggugggcucccacagagcggacgcauagucguugacuacaugaugcaaaaacccggcaagacaggcacuauuguguaucagagagggguauuacugccucagaaaguguggugcgcuucuggaagguccaaggucaucaaagguucacuuccauugauuggcgaagccgauugucugcaugagaaguacgggggacuaaacaaaagcaagcccuacuauaccggcgaacacgcaaaggcuaucgguaacugcccgaucugggugaaaacaccucucaagcuggccaaugggacuaaauaccggcccccagcgaaacuucugaaggagcgcggcuuuuucggagccauugcaggcuuuuuggaagggggaugggaagguaugauagcuggcuggcacggguauaccagucauggagcccacggcguugcuguggccgcagaccucaagucuacacaggaggccaucaacaagauuaccaaaaaucugaacuccuuaagcgaacuggaggucaagaaucuccaacgacuuucgggugcuauggacgaacugcauaacgagaucuuggagcuagaugaaaaaguggacgaucugagagcggacacuauaucuucccagauugagcucgcaguacugcuuucaaaugaagggaucaucaacagugaggaugaacaccuguuggcccucgagaggaagcugaaaaagauguuaggcccuagcgcuguugacauuggaaauggcuguuucgagacgaagcacaaaugcaaccagacaugccuggaucggaucgccgcagggaccuuuaaugccggagaguucucccuacccacuuuugacucucucaacauuaccgcugccagccugaaugaugacggucuugauaaccauauaaucuugcuguacuauucaacagcagcgaguucccucgcugugacccugaugcuugccauuuucaucgucuacauggugagccgugacaaugucucuuguucaaucugccuguga

SEQ ID NO: 155014 - RNA, 1755 nt, Artificial Sequence; identical to SEQ ID NO: 154902
  derived and/or modified CDS sequence (opt3) from hemagglutinin__InfluenzaB__AGQ16316

SEQ ID NO: 155015 - RNA, 1755 nt, Artificial Sequence; identical to SEQ ID NO: 154902
  derived and/or modified CDS sequence (opt3) from hemagglutinin__InfluenzaB__AGQ16317

SEQ ID NO: 155016 - RNA, 1758 nt, Artificial Sequence; identical to SEQ ID NO: 154693
  derived and/or modified CDS sequence (opt3) from hemagglutinin__InfluenzaB__AGQ16318

SEQ ID NO: 155017 - RNA, 1755 nt, Artificial Sequence
  derived and/or modified CDS sequence (opt3) from hemagglutinin__InfluenzaB__AGQ16319
augaaggccaucauugugcugcucauggucguuaccagcaacgcugacagaauaugcacaggcaucacuuccucuaauucaccccacgugguaaaaacggcaacccagggggaagugaacgucacaggagugauuccucuuacuaccacaccaaccaagaguuacuucgccaaucugaaagguacuaagacaaggggcaaauuguguccggggugcuuaaacuguaccgaucuggacguugcgcuaggacggcccaugugcgugggcacgacuccuagcgcuaaggccuccauccuccaugaaguccgcccagugaccucugguuguuuucccauuaugcacgaucgaacaaagauccgucaacuggcaaaucuucugagaggguaugagaacauaagguugucgacucagaauguaaucgacgccgaaaaagcuccuggaggcccauaccggcucggcaccucagggagcugccccaacgcaacaaguaaguccggauucuuugccaccauggcuugggccguuccuaaagauaauaacaagaaugcgacgaacccacugacuguggaggucccguauauuugugcagaaggugaggaccagaucgccguguggggcuuccauucugauaauaaaacacagaugaagaaccuguacggggacagcaauccccaaaaguuuaccuccucagcuaacggagugacuacacacuaugucagucagauuggcgguuucccugaucagaccgaggacgggggacucccacagagcggccgcaucguuguggauuacaugaugcaaaaacccggcaagacggggaccauaguauaucagagaggaguguuacugccucagaaagucuggugcgccucugguagguccaaggugauuaaaggcucacuuccauugaucggggaagcagacugucugcaugagaaguacggaggccuaaacaaaagcaagcccuacuauacaggugaacacgcuaaggccauugggaauugcccgaucuggguuaaaacuccucucaagcuggcgaacggcaccaaauaccggcccccagccaagcugcugaaagagcgcggauuuuucggcgcaaucgcuggguuuuuggagggagguugggaaggcaugauugccggguggcacggauauacaagucauggcgcucacgguguggccgucgcagccgaucucaagucuacucaggaggcuauaaauaagaucaccaaaaaccuuaauuccuuaagcgaacuggaggugaagaaccuccaacgacuuucgggggcgauggacgaacugcauaaugagauuuuggagcuagacgaaaaaguagaugaccugagagcagauacaaucucuucccagauagagcucgccguucugcuuucaaacgaaggcauuaucaauagugaggacgaacaccuguuggcucucgagaggaagcugaaaaagauguuaggaccuagcgccguggauaucggcaacggguguuucgagaccaagcacaaaugcaaucagacuugccuggaccggauugcagccggaacguuuaacgcuggugaguucucccuacccacauuugauucucucaauaucaccgccgcaagccugaacgacgauggccuugacaaucauacuauuuugcuguacuauucaaccgcggcuaguucccucgccgucacacugaugcuugcaauauucaucguguacauggucagccgugauaacgugucuuguucaauuugccuguga

SEQ ID NO: 155018 - RNA, 1755 nt, Artificial Sequence; identical to SEQ ID NO: 154947
  derived and/or modified CDS sequence (opt3) from hemagglutinin__InfluenzaB__AGQ16320

SEQ ID NO: 155019 - RNA, 1755 nt, Artificial Sequence; identical to SEQ ID NO: 154902
  derived and/or modified CDS sequence (opt3) from hemagglutinin__InfluenzaB__AGQ16321

SEQ ID NO: 155020 - RNA, 1755 nt, Artificial Sequence; identical to SEQ ID NO: 154902
  derived and/or modified CDS sequence (opt3) from hemagglutinin__InfluenzaB__AGQ16322

SEQ ID NO: 155021 - RNA, 1758 nt, Artificial Sequence
  derived and/or modified CDS sequence (opt3) from hemagglutinin__InfluenzaB__AGQ16323
augaaggccaucauugugcugcucauggucguuaccagcaacgcugacagaauaugcacaggcaucacuuccucuaauucaccccacgugguaaaaacggcaacccagggggaggugaacgucacaggagugauuccucuuacuaccacaccaaccaagagucauuucgccagccugaaagguacugaaacaaggggcaaguuguguccgaaaugcuuaaauuguaccgaucuggacguugcgcuagggcggcccaagugcacgggaaagaucccuuccgcucgcgugucuauucuccacgagguccgaccagugacuucgggcuguuuucccaucaugcaugaucguaccaaaauaagacaacugccuaaccuucugagggguuacgaacacauccgguugucaacacauaauguaauuaacgccgaggacgcaccagggggacccuauaagaucggcacuagcggcaguugcccuaauguuaccaacgggaauggauucuuugccacaauggcuugggcagugccaaagaacgauaagaauaaaaccgccacgaacccgcucacuauugaaguccccuacaucuguacagagggugaggaccagauaaccguguggggcuuccacuccgauaaugaaacucagauggcuaagcuguauggggacucuaagccucagaaauuuacaagcuccgccaacggagugaccacgcacuacgucucacaaauuggcgguuucccaaaucagaccgaggaugggggacugccccagaguggccgcaucguuguggacuauaugguacagaaaagcggcaaaacagggacuauuaccuaccaaagaggaauccucuuaccucagaagguguggugcgcgucugguagguccaaagucaucaagggcucacugccacuuauuggggaagcagauuguuugcaugagaaauauggaggccugaacaagagcaagcccuacuacacaggugagcacgccaaagcuauagggaacugcccgaucugggugaagacuccucuaaaacucgccaauggcaccaaguaucggcccccagcaaaacugcuuaaggaacgcggauuuuucggcgcuauugccggguuucuggagggagguugggaaggcaugaucgcgggguggcauggauacacaagucacggcgcccacgguguugcaguggcugccgacuugaagucuacccaggaggcuauaaacaaaauuacuaagaaucucaacucccugagcgaauuagaggucaaaaaucugcagcgacucucgggggccauggaugagcuucauaacgaaauccuggaguuggacgaaaagguggacgaucuaagagcagacacgaucucuucccaaauugagcuggccguacuccugucaaaugaaggcaucauuaacagugaggaugagcaccuucuggcuuuggaaaggaaacucaagaagaugcugggaccuagcgcgguugagauaggcaauggguguuucgaaacaaaacauaagugcaaccagaccugcuuagaccggaucgcagccggaacuuuugaugcuggugaguucucccugcccaccuuugacucucuaaauauuacagccgcaagccucaacgaugacggccuggauaaucacaccauccuuuuguauuacucaacugccgcuaguucccuggccgugacacucaugaucgcaauuuucgucguguauauggucagccgugacaacgugucuuguucaauaugccuguga

SEQ ID NO: 155022 - RNA, 1755 nt, Artificial Sequence; identical to SEQ ID NO: 154902
  derived and/or modified CDS sequence (opt3) from hemagglutinin__InfluenzaB__AGQ16324

SEQ ID NO: 155023 - RNA, 1755 nt, Artificial Sequence; identical to SEQ ID NO: 154902
  derived and/or modified CDS sequence (opt3) from hemagglutinin__InfluenzaB__AGQ16325

SEQ ID NO: 155024 - RNA, 1755 nt, Artificial Sequence; identical to SEQ ID NO: 154902
  derived and/or modified CDS sequence (opt3) from hemagglutinin__InfluenzaB__AGQ16326

SEQ ID NO: 155025 - RNA, 1755 nt, Artificial Sequence; identical to SEQ ID NO: 154902
  derived and/or modified CDS sequence (opt3) from hemagglutinin__InfluenzaB__AGQ16327

SEQ ID NO: 155026 - RNA, 1758 nt, Artificial Sequence
  derived and/or modified CDS sequence (opt3) from hemagglutinin__InfluenzaB__AGQ16328
augaaggccaucauugugcugcucauggucguuaccagcaacgcugacagaauaugcacaggcaucacuuccucuaauucaccccacgugguaaaaacggcaacccagggggaggugaacgucacaggagugauuccucuuacuaccacaccaaccaagagucauuucgccaaucugaaagguacugaaacaaggggcaaguuguguccgaaaugcuuaaacuguaccgaucuggacguugcgcuagggcggcccaagugcacgggaaagacuccuagcgcucgcguguccauccuccacgagguccgaccagugaccucuggcuguuuucccauuaugcaugaucguacaaaaaucagacaacugccuaaucuucugagggguuacgaacacauacgguugucgacucauaacguaaucaaugccgagaacgcaccagggggacccuauaagauuggcaccucaggcagcugcccuaauguuacaaacgggaauggauucuuugccaccauggcuugggcagugccgaaaaacgacaagaauaaaacggccacuaacccacucacaaucgaaguccccuacauuuguaccgagggugaggaucagaucacuguguggggcuuccacagugacaaugaaacacagauggcuaagcuguauggggauuccaacccucagaaguuuaccucuagcgccaacggagugacgacccacuacgucucccaaauaggcgguuucccaaaucagacagaggacgggggacugccccagucaggccgcauuguuguggauuauaugguacagaaaaguggcaagacugggaccaucacauaccaaagagguauucucuuaccucagaaaguguggugcgcgagcggaaggucuaaggucaucaaaggcucccugccacuuaucggggaagcagacuguuugcaugagaaguauggaggccugaacaaaucaaagcccuacuacacuggugagcacgccaaggcuauugggaauugcccgauaugggugaaaaccccucuaaagcucgccaacggcacaaaauaucggcccccagcaaagcugcuuaaagaacgcggauuuuucggcgcuaucgccggguuucuggagggagguugggaaggcaugauugcgggguggcauggauacaccagccacggcgcccacgguguugcaguggcugccgauuugaagaguacucaggaggcuaucaauaagauaacgaaaaaccucaauucucuguccgaauuagaggucaagaaccugcagcgacucagcggggccauggacgagcuucauaaugaaauucuggaguuggaugaaaaaguggacgaccuaagagcagauacaaucucgucucaaaucgagcuggccguacuccuguccaacgaaggcauuaucaauucagaggacgagcaccuucuggcuuuggaaaggaagcucaaaaagaugcugggaccuagugcgguugagauuggcaacggguguuucgaaaccaagcauaaaugcaaucagacuugcuuagaucggauagcagccggaaccuuugacgcuggugaguucagccugcccacauuugauucccuaaacaucaccgccgcaucucucaaugacgauggccuggacaaccacacuauucuuuuguauuacagcacagccgcuucaagucuggccgugacgcucaugaucgcaaucuucgucguguauauggucucccgugauaacgugagcuguucuauuugccuguga

SEQ ID NO: 155027 - RNA, 1758 nt, Artificial Sequence
  derived and/or modified CDS sequence (opt3) from hemagglutinin__InfluenzaB__AGX15487
augaaggccaucauugugcugcucauggucguuaccagcaacgcugacagaauaugcacaggcaucacuuccucuaauucaccccacgugguaaaaacggcaacccagggggaagugaacgucacaggagugauuccucuuacuaccacaccaaccaagagucauuucgccaaucugaaagguacuaagacaaggggcaaauuguguccgaagugcuuaaacuguaccgaucuggacguugcgcuagggcggcccaagugcacgggaaauaucccuagcgcuaaaguguccauucuccacgaaguccgcccagugacuucuggcuguuuucccaucaugcaugaucgaaccaagauacgucaacugccuaaccuucugagagguuacgagcacaucagguugucgacacauaauguaauuaacgccgaaaaagcaccagggggacccuauaagaucggcacuucaggcagcugcccuaauguuaccaacgggaauggauucuuugccacaauggcuugggcagugccgaaaaacgacaauaacaagaccgccacgaauagucucacuauugaggucccauacaucuguacagaaggugaggaucagauaaccguguggggcuuccacuccgacaacgagacucagauggcuaagcuguauggggauucuaaaccccagaaguuuacaagcuccgccaacggagugaccacgcacuacgucucacaaauuggcgguuucccuaaucagaccgaagacgggggacugccacagaguggccggaucguuguggauuauaugguacagaaaagcggcaagacagggacuauuaccuaccaacgcggaauccucuuaccccagaaaguguggugcgcgucugguagauccaaggucaucaaaggcucacugccucuuauuggggaggcagacuguuugcaugaaaaguauggaggccugaacaagagcaaaccauacuacacaggugagcacgccaaggcuauagggaauugccccaucugggugaaaacuccgcuaaagcucgccaacggcaccaaauauaggccucccgcaaagcugcuuaaggagcggggauuuuucggcgcuauugccggguuucuggaaggagguugggagggcaugaucgcgggguggcauggauacacaagucacggcgcccacgguguugcaguggcugccgauuugaaaucuacccaggaagcuauaaauaagauuacuaaaaaccucaauucccugagcgaguuagaagucaagaaccugcagcgccucucgggggccauggacgagcuucauaaugagauccuggaauuggaugagaaaguggacgaccuacgagcagauacgaucucuucccaaauugaacuggccguacuccugucaaacgagggcaucauuaauagugaagacgagcaccuucuggcuuuggagagaaagcucaagaaaaugcugggaccaagcgcgguugaaauaggcaacggguguuucgagacaaagcauaaaugcaaucagaccugcuuagauaggaucgcagccggaacuuuugacgcuggugaguucucccugccuaccuuugauucucuaaacauuacagccgcaagccucaaugacgauggccuggacaaccacaccauccuuuuguauuacucaacugccgcuaguucccuggccgugacacucaugaucgcaauuuucgucguguauauggucagccgggauaacgugucuuguucaauaugccuguga

SEQ ID NO: 155028 - RNA, 1758 nt, Artificial Sequence; identical to SEQ ID NO: 155027
  derived and/or modified CDS sequence (opt3) from hemagglutinin__InfluenzaB__AGX15496

SEQ ID NO: 155029 - RNA, 1758 nt, Artificial Sequence
  derived and/or modified CDS sequence (opt3) from hemagglutinin__InfluenzaB__AGX15518
augaaggccaucauugugcugcucauggucguuaccagcaacgcugacagaauaugcacaggcaucacuuccucuaauucaccccacgugguaaaaacggcaacccagggggaggugaacgucacaggagugauuccucuuacuaccgccccaacaaagagucauuucgcgaaucugaaagguaccaagacuaggggcaaauuguguccgaagugcuuaaacuguacagaucuggacguugcucuagggcggcccaagugcaccggaaauaucccuagcgccgaaguguccauucuccacgagguccgcccagugacgucuggcuguuuucccaucaugcaugaucgaacuaaaauacgucaacugccuaaccuucugagagguuacgaacacaucagguugucgacccauaauguaauuaacgcagagaaggccccagggggacccuauaaaaucggcacaucaggcagcugcccuaauguuacuaacgggaauggauucuuugcuaccauggcaugggccgugccaaagaacgacaauaacaaaacagcuaccaauagucucacgauugaagucccguacaucuguacugagggugaggaucagauaacaauuuggggcuuccacuccgacaacgaaacccagauggccaagcuguauggggauucuaagccccagaaauuuacuagcuccgcgaacggagugacaacccacuacgugucacaaaucggcgguuucccuaaucagacggaggacgggggacugccacagaguggccggauugucguugauuauauggugcagaagcccggcaaaaccgggacaaucacuuaccaacgcggaauccucuuaccucagaagguauggugcgcaagcgguagaucuaaagugauuaagggcucccugccacuuauaggggaagccgacuguuugcaugagaaauauggaggccugaacaagucaaagcccuacuacaccggugagcacgcuaaagccaucgggaauugcccgauuugggucaagacaccucuaaaacucgcaaacggcacuaaguauaggcccccagcuaaacugcuuaaggaacggggauuuuucggcgccaucgcgggguuucuggagggagguugggaaggcaugauagccggguggcauggauacaccagccacggcgcacacgguguggcuguugccgcugauuugaagaguacacaggaggccauuaauaaaaucaccaagaaccucaauucucuguccgaauuagaggugaaaaaccugcagcgccucagcucggcaauggacgagcuucauaaugaaauccuggaguuggaugaaaaggucgacgaccuacgagccgauacuauuucuucccaaaucgagcuggcugugcuccugucaaacgaagggauuauaaauagugaggacgagcaccuucuggcguuggaaagaaaacucaagaagaugcugggcccuagcgcaguagagaucggaaacggcuguuucgaaacgaaacauaagugcaaucagacaugcuuagauaggauugccgcugggaccuuugacgccggagaguucucccugcccacuuuugauucucuaaacaucaccgcagccagccucaaugacgauggucuggacaaccacacaauccuuuuguauuacucaaccgcugccaguucccuggcaguuacucucaugauugcgauauucguggucuauauggugagccgggauaacgucucuuguucaaucugccuguga

SEQ ID NO: 155030 - RNA, 1758 nt, Artificial Sequence
  derived and/or modified CDS sequence (opt3) from hemagglutinin__InfluenzaB__AGX15529
augaaggccaucauugugcugcucauggucguuaccagcaacgcugacagagugugcacaggcauaacuuccucuaauucaccccacguagugaaaacggcaacccagggggaggucaacgugacaggaguuaucccucuuacuaccacaccaaccaagagucauuucgccaaucugaaagguacuaagacaaggggcaaauuguguccgaagugcuuaaacuguaccgaucuggacguggcgcuagggcggcccaagugcacgggaaauauuccuagcgcugaagucuccauccucuacgaggugcgcccaguaacuucuggcuguuuucccauuaugcacgaucgaaccaaaauccgucaacugccuaaccuucugagagguuaugaacauauaagguugucgacacacaauguuaucaacgccgagaaggcaccagggggacccuacaaaauuggcacuucaggcagcugcccuaaugugaccaacgggaauggauucuuugccacaauggcuugggcagucccaaagaacgacaauaacaaaaccgccacgaauagucucacuaucgaagugccguauauuuguacagagggugaggaucagaucaccauauggggcuuccauuccgacaacgaaacucagauggcuaagcuguacggggauucuaagccccagaaauuuacaagcuccgccaacggagugaccacgcacuaugucucacaaauuggcgguuucccuaaucagaccgaggacgggggacugccacagaguggccggaucguuguggauuacaugguacaaaagagcggcaaaacagggacuauuaccuaucagcgcggaauccucuuaccccagaagguguggugcgcgucugguagauccaaagucaucaagggcacacugccucuuauuggggaagcagacuguuugcacgagaaauacggaggccugaacaagucaaagccauacuauacuggugagcaugccaaagcuauagggaauugccccaucugggugaagaccccgcuaaaacucgccaacggcacaaaguacaggccucccgcaaaacugcuuaaggaacggggauuuuucggcgcuauugccggguuucuggagggagguugggaaggcaugaucgcgggguggcacggauauaccagccauggcgcccacgguguugcaguggcugccgauuugaagaguacucaggaggcuauaaauaaaauuacgaagaaccucaauucucuguccgaauuagaggucaaaaaccugcagcgccucagcggggccauggacgagcuucacaaugaaauccuggaguuggaugaaaagguggacgaccuacgagcagauacaaucucgucucaaauugagcuggccguacuccuguccaacgaaggcaucauuaauucagaggacgagcaucuucuggcuuuggaaagaaaacucaagaagaugcugggaccaagugcgguugagauaggcaacggguguuucgaaaccaaacacaagugcaaucagacuugcuuagauaggaucgcagccggaaccuuugacgcuggugaguucagccugccuacauuugauucccuaaacauuaccgccgcaucucucaaugacgauggccuggacaaccauacuauccuuuuguacuauagcacagccgcuucaagucuggccgugacgcucaugaucgcaauuuucgucguguacauggucucccgggauaacgugagcuguucuauaugccuguga

SEQ ID NO: 155031 - RNA, 1758 nt, Artificial Sequence; identical to SEQ ID NO: 154621
  derived and/or modified CDS sequence (opt3) from hemagglutinin__InfluenzaB__AGX15541

SEQ ID NO: 155032 - RNA, 1758 nt, Artificial Sequence
  derived and/or modified CDS sequence (opt3) from hemagglutinin__InfluenzaB__AGX15552
augaaggccaucauugugcugcucauggucguuaccagcaacgcugacagaauaugcacaggcaucacuuccucuaauucaccccacgugguaaaaacggcaacccagggggaagugaacgucacaggagugauuccucuuacuaccacaccaaccaagagucauuucgccaaucugaaagguacugaaacaaggggcaaguuguguccgaaaugcuuaaacuguaccgaucuggacguugcgcuagggcggcccaagugcacgggaaauaucccuagcgcucgcguguccauucuccacgagguccgaccagugacuucuggcuguuuucccaucaugcaugaucguaccaagauaagacaacugccuaaccuucugagggguuacgaacacauccgguugucgacacauaauguaauuaacgccaaaaaugcaccagggggacccuauaagaucggcacuucaggcagcugcccuaacguuaccaaugggaacggauucuuugccacaauggcuugggcagugccgaaaaaugacaacaauaagaccgccacgaacagucucacuauugaggucccauacaucuguacagaaggugaggaucagauaaccguguggggcuuccacuccgacaacgagacucagauggcuaaacuguauggggauucuaagccccagaaguuuacaagcuccgccaauggagugaccacgcacuacgucucacaaauuggcgguuucccuaaccagaccgaagacgggggacugccacagaguggccgcaucguuguggauuauaugguacagaaaagcggcaagacagggacuauuaccuaccaaagaggaauccucuuaccccagaaaguguggugcgcgucugguagguccaaggucaucaaaggcucacugccucuuauuggggaggcagacuguuugcaugaaaaguauggaggccugaauaaaagcaagccauacuacacaggugagcacgccaaggcuauagggaacugccccaucugggugaaaacuccgcuaaagcucgccaauggcaccaaauaucggccucccgcaaagcugcuuaaagagcgcggauuuuucggcgcuauugccggguuucuggaaggagguugggagggcaugaucgcgggguggcauggauacacaagucacggcgcccacgguguugcaguggcugccgauuugaagucuacccaggaagcuauaaacaagauuacuaaaaaucucaacucccugagcgaguuagaagucaagaaucugcagcgacucucgggggccauggacgagcuucauaacgagauccuggaauuggaugagaaaguggacgaccuaagagcagauacgaucucuucccaaauugaacuggccguacuccugucaaaugagggcaucauuaacagugaagacgagcaccuucuggcuuuggagaggaagcucaaaaagaugcugggaccaagcgcgguugaaauaggcaauggguguuucgagacaaagcauaaaugcaaccagaccugcuuagaucggaucgcagccggaacuuuugacgcuggugaguucucccugccuaccuuugauucucuaaauauuacagccgcaagccucaacgacgauggccuggacaaccacaccauccuuuuguauuacucaacugccgcuaguucccuggccgugacacucaugaucgcaauuuucgucguguauauggucagccgugauaaugugucuuguucaauaugccuguga

SEQ ID NO: 155033 - RNA, 1758 nt, Artificial Sequence; identical to SEQ ID NO: 154630
  derived and/or modified CDS sequence (opt3) from hemagglutinin__InfluenzaB__AGX15563

SEQ ID NO: 155034 - RNA, 1758 nt, Artificial Sequence; identical to SEQ ID NO: 154630
  derived and/or modified CDS sequence (opt3) from hemagglutinin__InfluenzaB__AGX15574

SEQ ID NO: 155035 - RNA, 1758 nt, Artificial Sequence
  derived and/or modified CDS sequence (opt3) from hemagglutinin__InfluenzaB__AGX15607
augaaggccaucauugugcugcucauggucguuaccagcaacgcugacagaauaugcacaggcaucacuuccucuaauucaccccacgugguaaaaacggcaacccagggggaggugaacgucacaggagugauuccucuuacuaccacaccaaccaagagucauuucgccaaucugaaagguacugaaacaaggggcaaguuguguccgaaaugcuuaaacuguaccgaucuggacguugcgcuagggcggcccaagugcacgggaaauacuccuagcgcucgcguguccauccuccacgagguccgaccagugaccucuggcuguuuucccauuaugcaugaucguacaaagaucagacaacugccuaaccuucugagggguuacgaacacauacgguugucgacucauaauguaaucaacgccgagaaugcaccagggggacccuauaaaauuggcaccucaggcagcugcccuaacguuacaaaugggaacggauucuuugccaccauggcuugggcagugccaaagaaugacaacaauaaaacggccacuaacagucucacaaucgaagucccguacauuuguaccgagggugaggaucagaucacuguguggggcuuccacuccgacaacgaaacacagauggcuaagcuguauggggauucuaaaccccagaaguuuaccagcuccgccaauggagugacgacccacuacgucucacaaauaggcgguuucccuaaccagacagaggacgggggacugccacagaguggccgcauuguuguggauuauaugguacaaaagagcggcaaaacugggaccaucacauaccagagagguauucucuuaccccagaagguguggugcgcgucuggaagguccaaagucaucaagggcucacugccucuuaucggggaagcagacuguuugcaugagaaauauggaggccugaauaagagcaaaccauacuacacuggugagcacgccaaggcuauugggaacugccccauaugggugaagaccccgcuaaaacucgccaauggcacaaaguaucggccucccgcaaaacugcuuaaggaacgcggauuuuucggcgcuaucgccggguuucuggagggagguugggaaggcaugauugcgggguggcauggauacaccagucacggcgcccacgguguugcaguggcugccgauuugaaaucuacucaggaggcuaucaacaagauaacgaagaaucucaacucccugagcgaauuagaggucaaaaaucugcagcgacucucgggggccauggacgagcuucauaacgaaauucuggaguuggaugaaaagguggacgaccuaagagcagauacaaucucuucccaaaucgagcuggccguacuccugucaaaugaaggcauuaucaacagugaggacgagcaccuucuggcuuuggaaaggaaacucaagaaaaugcugggaccaagcgcgguugagauuggcaauggguguuucgaaaccaagcauaagugcaaccagacuugcuuagaucggauagcagccggaaccuuugacgcuggugaguucucccugccuacauuugauucucuaaauaucaccgccgcaagccucaacgacgauggccuggacaaccacacuauucuuuuguauuacucaacagccgcuaguucccuggccgugacgcucaugaucgcaaucuucgucguguauauggucagccgugauaaugugucuuguucaauuugccuguga

SEQ ID NO: 155036 - RNA, 1758 nt, Artificial Sequence
  derived and/or modified CDS sequence (opt3) from hemagglutinin__InfluenzaB__AGX15629
augaaggccaucauugugcugcucauggucguuaccagcaacgcugacagaauaugcacaggcaucacuuccucuaauucaccccacgugguaaaaacggcaacccagggggaggugaacgucacaggagugauuccucuuacuaccacaccaaccaagagucauuucgccaaucugaaagguacugaaacaaggggcaaguuguguccgaaaugcuuaaacuguaccgaucuggacguugcgcuagggcggcccaagugcacgggaaauaucccuagcgcucgcguguccauucuccacgagguccgaccagugacuucuggcuguuuucccaucaugcaugaucguaccaagauaagacaacugccuaaccuucugagggguuacgaacacauccgguugucgacacauaauguaauuaacgccgagaaugcaccagggggacccuauaaaaucggcacuucaggcagcugcccuaacguuaccaaugggaacggauucuuugccacaauggcuugggcagugccaaagaaugacaacaauaaaaccgccacgaacagucucacuauugaagucccguacaucuguacagagggugaggaucagauaaccguguggggcuuccacuccgacaacgaaauucagauggcuaagcuguauggggauucuaaaccccagaaguuuacuagcuccgccaauggagugacaacccacuacgucucacaaaucggcgguuucccuaaccagacggaggacgggggacugccacagaguggccgcauuguuguggauuauaugguacaaaagagcggcaaaaccgggacaaucacuuaccagagaggaauccucuuaccccagaagguguggugcaccucugguagguccaaagucauuaagggcucacugccucuuauaggggaagcggacuguuugcaugagaaauauggaggccugaauaagagcaaaccauacuacacaggugagcacgcaaaggccaucgggaacugccccauuugggugaagacuccgcuaaaacucgcuaauggcaccaaguaucggccucccgccaaacugcuuaaggaacgcggauuuuucggcgcaaucgcuggguuucuggagggagguugggaaggcaugauagccggguggcauggauacacaagucacggcgcgcacgguguugccguggcagcugauuugaaaucuacccaggaggccauuaacaagaucacuaagaaucucaacucccugagcgaauuagaggucaaaaaucugcagcgacucucgggggcuauggacgagcuucauaacgaaauccuggaguuggaugaaaagguggacgaccuaagagccgauacgauuucuucccaaaucgagcuggcaguacuccugucaaaugaaggcauuauaaacagugaggacgagcaccuucuggccuuggaaaggaaacucaagaaaaugcugggaccaagcgcuguugagaucggcaauggguguuucgaaacaaagcauaagugcaaccagaccugcuuagaucggauugcggcaggaacuuuugacgccggugaguucucccugccuaccuuugauucucuaaauaucacagcugccagccucaacgacgauggccuggacaaccacaccauccuuuuguauuacucaacugcagccaguucccuggcugugacacucaugauugccauauucgucguguauauggucagccgugauaaugugucuuguucaaucugccuguga

SEQ ID NO: 155037 - RNA, 1758 nt, Artificial Sequence
  derived and/or modified CDS sequence (opt3) from hemagglutinin__InfluenzaB__AGX15651
augaaggccaucauugugcugcucauggucguuaccagcaacgcugacagaauaugcacaggcaucacuuccucuaauucaccccacgugguaaaaacggcaacccagggggaggugaacgucacaggagugauuccucuuacuaccacaccaaccaagagucauuucgccaaucugaaagguacugaaacaaggggcaaguuguguccgaaaugcuuaaacuguaccgaucuggacguugcgcuagggcggcccaagugcacgggaaagaucccuagcgcucgcguguccauucuccacgagguccgaccagugacuucuggcuguuuucccaucaugcaugaucguaccaaaauaagacaacugccuaaucuucugagggguuacgaacacauccgguugucgacacauaacguaauuaaugccgagaacgcaccagggggacccuauaagaucggcacuucaggcagcugcccuaauauuaccaacgggaauggauucuuugccacaauggcuugggcaguuccgaaaaacgacaagaauaaaaccgccacgaacccacucacuaucgaagugcccuacauauguacagagggugaggaucagauuaccgucuggggcuuccacagugacaaugaaacucagauggcuaagcuguauggggauuccaagccucagaaauuuacaucuagcgccaacggagugaccacgcacuacgugucccaaaucggcgguuucccaaaccagaccgaggacgggggacugccccagucaggccgcauugucguugauuauauggugcagaagaguggcaaaacagggacuaucaccuaccaaagaggaauccucuuaccucagaagguauggugcgcgagcgguaggucuaaagugauuaagggcucccugccacuuauaggggaagcagacuguuugcaugagaaauauggaggccugaauaagucaaagcccuacuacacaggugagcacgccaaagcuaucgggaacugcccgauuugggucaagacuccucuaaaacucgccaauggcaccaaguaucggcccccagcaaaacugcuuaaggaacgcggauuuuucggcgcuaucgccggguuucuggagggagguugggaaggcaugauagcgggguggcauggauacacaagccacggcgcccacgguguggcaguugcugccgauuugaagaguacccaggaggcuauuaacaaaaucacuaagaaucucaacucucuguccgaauuagaggugaaaaaucugcagcgacucagcggggccauggacgagcuucauaacgaaauccuggaguuggaugaaaaggucgacgaccuaagagcagauacgauuucgucucaaaucgagcuggccgugcuccuguccaaugaaggcauuauaaacucagaggacgagcaccuucuggcuuuggaaaggaaacucaagaagaugcugggaccuagugcgguagagaucggcaauggguguuucgaaacaaaacauaagugcaaccagaccugcuuagaucggauugcagccggaacuuuugacgcuggugaguucagccugcccaccuuugauucccuaaauaucacagccgcaucucucaacgacgauggccuggacaaucacaccauccuuuuguauuacagcacugccgcuucaagucuggccguuacacucaugauugcaauauucguggucuauauggugucccgugauaacgucagcuguucuaucugccuguga

SEQ ID NO: 155038 - RNA, 1758 nt, Artificial Sequence; identical to SEQ ID NO: 155037
  derived and/or modified CDS sequence (opt3) from hemagglutinin__InfluenzaB__AGX15675

SEQ ID NO: 155039 - RNA, 1758 nt, Artificial Sequence; identical to SEQ ID NO: 155037
  derived and/or modified CDS sequence (opt3) from hemagglutinin__InfluenzaB__AGX15686

SEQ ID NO: 155040 - RNA, 1758 nt, Artificial Sequence
  derived and/or modified CDS sequence (opt3) from hemagglutinin__InfluenzaB__AGX15697
augaaggccaucauugugcugcucauggucguuaccagcaacgcugacagaauaugcacaggcaucacuuccucuaauucaccccacgugguaaaaacggcaacccagggggaggugaacgucacaggagugauuccucuuacuaccacaccaaccaagagucauuucgccaaucugaaagguacugaaacaaggggcaaguuguguccgaaaugcuuaaacuguaccgaucuggacguugcgcuagggcggcccaagugcacgggaaagaucccuagcgcucgcguguccauucuccacgagguccgaccagugacuucuggcuguuuucccaucaugcaugaucguaccaaaauaagacaacugccuaaucuucugagggguuacgaacacauccgguugucgacacauaacguaauuaaugccgagaacgcaccagggggacccuauaagaucggcacuucaggcagcugcccuaauauuaccaacgggaauggauucuuugccacaauggcuugggcaguuccgaaaaacgacaagaauaaaaccgccacgaacccacucacuaucgaagugcccuacauauguacagagggugaggaucagauuaccgucuggggcuuccacagugacaaugaaaaccagauggcuaagcuguauggggauuccaagccucagaaauuuacuucuagcgccaacggagugacaacccacuacgugucccaaaucggcgguuucccaaaucagacggaggacgggggacugccccagucaggccgcauugucguugauuauauggugcagaagaguggcaaaaccgggacaaucacuuaccaaagaggaauccucuuaccucagaagguauggugcgcgagcgguaggucuaaagugauuaagggcucccugccacuuauaggggaagcagacuguuugcaugagaaauauggaggccugaacaagucaaagcccuacuacaccggugagcacgccaaagcuaucgggaauugcccgauuugggucaagacaccucuaaaacucgccaacggcacuaaguaucggcccccagcaaaacugcuuaaggaacgcggauuuuucggcgcuaucgccggguuucuggagggagguugggaaggcaugauagcgggguggcauggauacaccagccacggcgcccacgguguggcaguugcugccgauuugaagaguacacaggaggcuauuaauaaaaucaccaagaaccucaauucucuguccgaauuagaggugaaaaaccugcagcgacucagcggggccauggacgagcuucauaaugaaauccuggaguuggaugaaaaggucgacgaccuaagagcagauacuauuucgucucaaaucgagcuggccgugcuccuguccaacgaaggcauuauaaauucagaggacgagcaccuucuggcuuuggaaaggaaacucaagaagaugcugggaccuagugcgguagagaucggcaacggguguuucgaaacgaaacauaagugcaaucagacaugcuuagaucggauugcagccggaaccuuugacgcuggugaguucagccugcccacuuuugauucccuaaacaucaccgccgcaucucucaaugacgauggccuggacaaccacacaauccuuuuguauuacagcaccgccgcuucaagucuggccguuacucucaugauugcaauauucguggucuauauggugucccgugauaacgucagcuguucuaucugccuguga

SEQ ID NO: 155041 - RNA, 1758 nt, Artificial Sequence; identical to SEQ ID NO: 155037
  derived and/or modified CDS sequence (opt3) from hemagglutinin__InfluenzaB__AGX15708

SEQ ID NO: 155042 - RNA, 1758 nt, Artificial Sequence; identical to SEQ ID NO: 155037
  derived and/or modified CDS sequence (opt3) from hemagglutinin__InfluenzaB__AGX15719

SEQ ID NO: 155043 - RNA, 1758 nt, Artificial Sequence; identical to SEQ ID NO: 154562
  derived and/or modified CDS sequence (opt3) from hemagglutinin__InfluenzaB__AGX15730

SEQ ID NO: 155044 - RNA, 1758 nt, Artificial Sequence; identical to SEQ ID NO: 155037
  derived and/or modified CDS sequence (opt3) from hemagglutinin__InfluenzaB__AGX15741

SEQ ID NO: 155045 - RNA, 1758 nt, Artificial Sequence; identical to SEQ ID NO: 155037
  derived and/or modified CDS sequence (opt3) from hemagglutinin__InfluenzaB__AGX15753

SEQ ID NO: 155046 - RNA, 1758 nt, Artificial Sequence
  derived and/or modified CDS sequence (opt3) from hemagglutinin__InfluenzaB__AGX15764
augaaggccaucauugugcugcucauggucguuaccagcaacgcugacagaauaugcacaggcaucacuuccucuaauucaccccacgugguaaaaacggcaacccagggggaggugaacgucacaggagugauuccucuuacuaccacaccaaccaagagucauuucgccaaucugaaagguacugaaacaaggggcaaguuguguccgaaaugcuuaaacuguaccgaucuggacguugcgcuagggcggcccaagugcacgggaaagaucccuagcgcucgcguguccauucuccacgagguccgaccagugacuucuggcuguuuucccaucaugcaugaucguaccaaaauaagacaacugccuaaucuucugagggguuacgaacacauccgguugucgacacauaacguaauuaaugccgagaacgcaccagggggacccuauaagaucggcacuucaggcagcugcccuaauauuaccaacgggaauggauucuuugccacaauggcuugggcaguuccgaaaaacgacaagaauaaaaccgccacgaacccacucacuaucgaagugcccuacauauguacagagggugaggaucagauuaccgucuggggcuuccacagugacaaugaaacucagauggcuaagcuguauggggauuccaagccucagaaauuuacaucuagcgccaacggagugaccacgcacuacgugucccaaaucggcgguuucccaaaccagaccgaggacgggggacugccccagucaggccgcauugucguugauuauauggugcagaagaguggcaaaacagggacuaucaccuaccaaagaggaauccucuuaccucagaagguauggugcgcgagcgguaggucuaaagugauuaagggcucccugccacuuauaggggaagcagacuguuugcaugagaaauauggaggccugaauaagucaaagcccuacuacacaggugagcacgccaaagcuaucgggaacugcccgauuugggucaagacuccucuaaaacucgccaauggcaccaaguaucggcccccagcaaaacugcuuaaggaacgcggauuuuucggcgcuaucgccggguuucuggagggagguugggaaggcaugauagcgggguggcauggauacacaagccacggcgcccacgguguggcaguugcugccgauuugaagaguacccaggaggcuauuaacaaaaucacuaagaaucucaacucucuguccgaauuagaggugaaaaaucugcagcgacucagcggggccauggacgagcuucauaacgaaauccuggaguuggaugaaaaggucgacgaccuaagagcagauacgauuucgucucaaaucgagcuggccgugcuccuguccaaugaaggcauuauaaacucagaggacgagcaccuucuggcuuuggaaaggaaacucaagaagaugcugggaccuagugcgguagagaucggcaauggguguuucgaaacaaaacauaagugcaaccagaccugcuuagaucggauugcagccggaacuuuugacgcuggugaguucagccugcccaccuuugauucccuaaauaucacagccgcaucucucaacgacgauggccuggacaaucacaccauccuuuuguauuacagcacugccgcuucaagucuggccauuacacucaugauagcaaucuucguuguguauauggucucccgugauaacgugagcuguucuauuugccuguga

SEQ ID NO: 155047 - RNA, 1755 nt, Artificial Sequence
  derived and/or modified CDS sequence (opt3) from hemagglutinin__InfluenzaB__AGX15775
augaaggccaucauugugcugcucauggucguuaccagcaacgcugacagaauaugcacaggcaucacuuccucuaauucaccccacgugguaaaaacggcaacccagggggaggugaacgucacaggagugauuccucuuacuaccacaccaaccaagaguuacuucgccaaucugaaagguacuaggacacggggcaaguuguguccggauugcuuaaacuguaccgaccuggauguugcgcuagggcgccccaugugcgugggaacgacuccuagcgcuaaagccuccauccuccaugaaguccgaccagugaccucuggcuguuuucccauuaugcacgaccguacaaagaucagacaacugccuaaucuucugagggguuaugagaacauacgguugucgacucagaauguaaucgaugcagaaaaggccccagggggacccuaccgccucggcaccucaggcagcugcccuaacgcuacaaguaaauccggguucuuugcaaccauggccugggcuguuccaaaggacaauaacaaaaaugccacgaacccgcugacuguggagguccccuauauuuguacagaaggagaggaucagaucaccgugugggguuuccauucugacaauaagauucagaugaaaaaccuguacggcgauagcaauccucaaaaguuuacuuccucagcgaacggggugacaacccacuaugucagucagaucggcagcuucccagaccagacggaggauggaggucucccccagucugggagaauaguuguggacuacaugaugcaaaagccuggaaaaaccggcacaauuguauaucagaggggcguguuacugccacagcgggucuggugcgcauccgggcgcucaaaggugaucaaaggaagccuucccuugauuggugaagccgauugucugcaugagaaguacggcgggcuaaacaaaaguaagccguacuauacuggagaacacgcuaaagccaucggcaauugcccuaucuggguuaagaccccacucaagcuggcaaacgguacaaaauaccgacccccugcuaaacuucugaaggagagaggguuuuucggcgccauugcgggauuuuuggagggcgggugggaaggaaugauagccgguuggcacggcuauacuucucauggggcacacggaguggcugucgccgcugaccucaaguccacccaggaggccaucaauaaaauuacaaagaaccugaauagcuuaucggaacuggaggugaagaaccuccaaaggcuuucuggcgcaauggacgaacugcauaaugagaucuuggagcuagaugaaaaaguagacgaucugcgggccgacaccauauccucacagauugagcucgcuguucugcuuaguaacgaagguaucaucaauagcgaggaugaacaccuguuggcgcucgagcguaagcugaaaaagauguuagggcccuccgcaguggagauuggcaacggauguuucgaaacuaaacacaagugcaaucagacgugccuggaccgcaucgccgcuggcacauuuaacgccggggaguucucucuaccaaccuuugauagccucaauauuacugcagccucacugaacgacgauggacuugacaaucauaccauauugcuguacuauaguacagcugccuccagccucgcagucacccugaugcuugcgaucuucauuguguacauggucucuagagauaacgugucauguaguaucugccuguga

SEQ ID NO: 155048 - RNA, 1758 nt, Artificial Sequence
  derived and/or modified CDS sequence (opt3) from hemagglutinin__InfluenzaB__AGX15786
augaaggccaucauugugcugcucauggucguuaccagcaacgcugacagaauaugcacaggcaucacuuccucuaauucaccccacgugguaaaaacggcaacccagggggaggugaacgucacaggagugauuccucuuacuaccacaccaaccaagagucauuucgccaaucugaaagguacugaaacaaggggcaaguuguguccgaaaugcuuaaacuguaccgaucuggacguugcgcuagggcggcccaagugcacgggaaagaucccuagcgcucgcguguccauucuccacgagguccgaccagugacuucuggcuguuuucccaucaugcaugaucguaccaaaauaagacaacugccuaaucuucugagggguuacgaacacauccgguugucgacacauaacguaauuaaugccgagaacgcaccagggggacccuauaagaucggcacuucaggcagcugcccuaauauuaccaacgggaauggauucuuugccacaauggcuugggcaguuccgaaaaacgacaagaauaaaaccgccacgaacccacucacuaucgaagugcccuacauauguacagagggugaggaucagauuaccgucuggggcuuccacagugacaaugaaacucagauggcuaagcuguauggggauuccaagccucagaaauuuacaucuagcgccaacggagugaccacgcacuacgugucccaaaucggcgguuucccaaaccagaccgaggacgggggacugccccagucaggccgcauugucguugauuauauggugcagaagaguggcaaaacagggacuaucaccuaccaaagaggaauccucuuaccucagaagguauggugcgcgagcgguaggucuaaagugauuaagggcucccugccacuuauaggggaagcagacuguuugcaugagaaauauggaggccugaauaagucaaagcccuacuacacaggugagcacgccaaagcuaucgggaacugcccgauuugggucaagacuccucuaaaacucgccaauggcaccaaguaucggcccccagcaaaacugcuuaaggaacgcggauuuuucggcgcuaucgccggguuucuggagggagguugggaaggcaugauagcgggguggcauggauacacaagccacggcgcccacgguguggcaguugcugccgauuugaagaguacccaggaggcuauuaacaaaaucacuaagaaucucaacucucuguccgaauuagaggugaaaaaucugcagcgacucagcggggccauggacgagcuucauaacgaaauccuggaguuggaugaaaaggucgacgaccuaagagcagauacgauuucgucucaaaucgagcuggccgugcuccuguccaaugaaggcauuauaaacucagaggacgagcaccuucuggcuuuggaaaggaaacucaagaagaugcugggaccuagugcgguagagaucggcaauggguguuucgaaacaaaacauaagugcaaccagaccugcuuagaucggauugcagccggaacuuuugacgcuggugaguucuuucugcccaccuucgauagccuaaauaucacagccgcaucccucaacgacgauggccuggacaaucacaccauccuuuuguauuacucuacugccgcuagcucacuggccguuacacucaugauugcaauauucguggucuauauggugagucgugauaacgucuccuguagcaucugccuguga

SEQ ID NO: 155049 - RNA, 1758 nt, Artificial Sequence; identical to SEQ ID NO: 155037
  derived and/or modified CDS sequence (opt3) from hemagglutinin__InfluenzaB__AGX15797

SEQ ID NO: 155050 - RNA, 1758 nt, Artificial Sequence
  derived and/or modified CDS sequence (opt3) from hemagglutinin__InfluenzaB__AGX15808
augaaggccaucauugugcugcucauggucguuaccagcaacgcugacagaauaugcacaggcaucacuuccucuaauucaccccacgugguaaaaacggcaacccagggggaggugaacgucacaggagugauuccucuuacuaccacaccaaccaagagucauuucgccaaucugaaagguacugaaacaaggggcaaguuguguccgaaaugcuuaaacuguaccgaucuggacguugcgcuagggcggcccaagugcacgggaaagaucccuagcgcucgcguguccauucuccacgagguccgaccagugacuucuggcuguuuucccaucaugcaugaucguaccaaaauaagacaacugccuaaucuucugagggguuacgaacacauccgguugucgacacauaacguaauuaaugccgagaacgcaccagggggacccuauaagaucggcacuucaggcagcugcccuaauguuaccaacgggaauggauucuuugccacaauggcuugggcagugccaaagaacgacaagaauaaaaccgccacgaacccgcucacuauugaaguccccuacaucuguacagagggugaggaucagauaaccguguggggcuuccacagugacaaugaaacucagauggcuaagcuguauggggauuccaagccucagaaauuuacaucuagcgccaacggagugaccacgcacuacgucucccaaauuggcgguuucccaaaccagaccgaggacgggggacugccccagucaggccgcaucguuguggauuauaugguacagaagaguggcaaaacagggacuauuaccuaccaaagaggaauccucuuaccucagaagguguggugcgcgaucgguaggagcaaagucauuaagggcucucugccacuuauaggggaagcagacuguuugcaugagaaauauggaggccugaauaaguccaagcccuacuacacaggugagcacgccaaagcuaucgggaacugcccgauuugggugaagacuccucuaaaacucgccaauggcaccaaguaucggcccccagcaaaacugcuuaaggaacgcggauuuuucggcgcuaucgccggguuucuggagggagguugggaaggcaugauagcgggguggcauggauacacaucacacggcgcccacgguguugcaguggcugccgauuugaaaagcacccaggaggcuauuaacaaaaucacuaagaaucucaacagucugucugaauuagaggucaaaaaucugcagcgacucuccggggccauggacgagcuucauaacgaaauccuggaguuggaugaaaagguggacgaccuaagagcagauacgauuagcucgcaaaucgagcuggccguacuccugucuaaugaaggcauuauaaacuccgaggacgagcaccuucuggcuuuggaaaggaaacucaagaagaugcugggaccuucagcgguugagaucggcaauggguguuucgaaacaaaacauaagugcaaccagaccugcuuagaucggauugcagccggaacuuuugacgcuggugaguucagucugcccaccuuugauagccuaaauaucacagccgcaucccucaacgacgauggccuggacaaucacaccauccuuuuguauuacucuacugccgcuagcucacuggccgugacacucaugauugcaauauucgucguguauauggucagucgugauaacguguccuguagcaucugccuguga

SEQ ID NO: 155051 - RNA, 1758 nt, Artificial Sequence; identical to SEQ ID NO: 154656
  derived and/or modified CDS sequence (opt3) from hemagglutinin__InfluenzaB__AGX15830

SEQ ID NO: 155052 - RNA, 1758 nt, Artificial Sequence; identical to SEQ ID NO: 154656
  derived and/or modified CDS sequence (opt3) from hemagglutinin__InfluenzaB__AGX15841

SEQ ID NO: 155053 - RNA, 1758 nt, Artificial Sequence; identical to SEQ ID NO: 154656
  derived and/or modified CDS sequence (opt3) from hemagglutinin__InfluenzaB__AGX15852

SEQ ID NO: 155054 - RNA, 1758 nt, Artificial Sequence; identical to SEQ ID NO: 154656
  derived and/or modified CDS sequence (opt3) from hemagglutinin__InfluenzaB__AGX15863

SEQ ID NO: 155055 - RNA, 1758 nt, Artificial Sequence
  derived and/or modified CDS sequence (opt3) from hemagglutinin__InfluenzaB__AGX15874
augaaggccaucauugugcugcucauggucguuaccagcaacgcugacagaauaugcacaggcaucacuuccucuaauucaccccacgugguaaaaacggcaacccagggggaggugaacgucacaggagugauuccucuuacuaccacaccaaccaagagucauuucgccaaucugaaagguacugaaacaaggggcaaguuguguccgaaaugccccaacuguaccgauuuagacguugcgcuggggcggccuaagugcacgggaaagaucccaagcgcucgcguguccauucuacacgagguccgacccgugacuucuggcuguuuuccuaucaugcaugaucguaccaaaauaagacaacucccaaaucugcuuagggguuacgaacacauccggcugucgacacauaacguaauuaaugccgagaacgcacccgggggaccuuauaagaucggcacuucaggcagcugcccaaauguuaccaacgggaauggauucuuugccacaauggcuugggcagugccgaaaaacgacaagaauaaaaccgccacgaaccccuugacuauugaagucccuuacaucuguacagagggugaggaucagauaaccguguggggcuuccacagugacaaugaaacucagauggcuaagcucuauggggauuccaagccacagaaauuuacaucuagcgccaacggagugaccacgcacuacgucucccaaauuggcgguuuccccaaccagaccgaggacgggggacugccucagucaggccgcaucguuguggauuauaugguacagaagaguggcaaaacagggacuauuaccuaccaaagaggaauccugcucccacagaagguguggugcgcgagcgguaggucuaaagucaucaagggcuccuuaccccugauuggggaagcagacugucuucaugagaaauauggaggcuugaauaagucaaagccguacuacacaggugagcacgccaaagcuauagggaacugcccuaucugggugaagacuccccugaaacuagccaauggcaccaaguaucggccuccagcaaaacuccugaaggaacgcggauuuuucggcgcuauugccggguuucuugagggagguugggaaggcaugaucgcgggguggcauggauacacaagccacggcgcccacgguguugcaguggcugccgaucugaagaguacccaggaggcuauaaacaaaauuacuaagaauuugaacucucucuccgaacuggaggucaaaaauuuacagcgacugagcggggccauggacgagcuccauaacgaaauccuugagcuggaugaaaagguggacgacuugagagcagauacgaucucgucucaaauugagcuagccguacugcucuccaaugaaggcaucauuaacucagaggacgagcaucugcuugcucuggaaaggaaauugaagaagaugcucggacccagugcgguugagauaggcaauggguguuucgaaacaaaacacaagugcaaccagaccugccuggaucggaucgcagccggaacuuuugacgcuggugaguucagcuuaccaaccuuugauucccugaauauuacagccgcaucucuaaacgacgauggccucaauaaccacaccauccugcuuuauuacagcacugccgcuucaaguuuggccgugacacugaugaucgcaauuuucgucguguauauggucucccgugacaacgugagcuguucuauaugccucuga

SEQ ID NO: 155056 - RNA, 1758 nt, Artificial Sequence; identical to SEQ ID NO: 154656
  derived and/or modified CDS sequence (opt3) from hemagglutinin__InfluenzaB__AGX15885

SEQ ID NO: 155057 - RNA, 1758 nt, Artificial Sequence
  derived and/or modified CDS sequence (opt3) from hemagglutinin__InfluenzaB__AGX15896
augaaggccaucauugugcugcucauggucguuaccagcaacgcugacagaauaugcacaggcaucacuuccucuaauucaccccacgugguaaaaacggcaacccagggggaggugaacgucacaggagugauuccucuuacuaccacaccaaccaagagucauuucgccaaucugaaagguacugaaacaaggggcaaguuguguccgaaaugccccaacuguaccgauuuagacguugcgcuggggcggccuaagugcacgggaaagaucccaagcgcucgcguguccauucuacacgagguccgacccgugacuucuggcuguuuuccuaucaugcaugaucguaccaaaauaagacaacucccaaaucugcuuagggguuacgaacacauccggcugucgacacauaacguaauuaaugccgagaacgcacccgggggaccuuauaagaucggcacuucaggcagcugcccaaauguuaccaacgggaauggauucuuugccacaauggcuugggcagugccgaaaaacgacaagaauaaaaccgccacgaaccccuugacuauugaagucccuuacaucuguacagagggugaggaucagauaaccguguggggcuuccacagugacaaugaaacucagauggcuaagcucuauggggauuccaagccacagaaauuuacaucuagcgccaacggagugaccgcgcacuacgucucccaaauuggcgguuuccccaaccagacggaggacgggggacugccucagucaggccgcaucguuguggauuauaugguacagaagaguggcaaaaccgggacaauuacuuaccaaagaggaauccugcucccacagaagguguggugcgcaagcgguaggucuaaagucaucaagggcuccuuaccccugauuggggaagccgacugucuucaugagaaauauggaggcuugaauaagucaaagccguacuacaccggugagcacgcuaaagccauagggaacugcccuaucugggugaagacaccccugaaacuagcaaauggcacuaaguaucggccuccagcuaaacuccugaaggaacgcggauuuuucggcgccauugcgggguuucuugagggagguugggaaggcaugaucgccggguggcauggauacaccagccacggcgcacacgguguugcuguggccgcugaucugaagaguacacaggaggccauaaacaaaauuaccaagaauuugaacucucucuccgaacuggaggucaaaaauuuacagcgacugagcggggcaauggacgagcuccauggcgaaauccuugagcuggaugaaaagguggacgacuugagagccgauacuaucucgucucaaauugagcuagcuguacugcucuccaacgaaggaaucauuaauucagaggacgagcaucugcuugcgcuggaaaggaaauugaagaagaugcucggccccagugcaguugagauagggaacggauguuucgaaacgaaacacaagugcaaucagacaugccuggaucggaucgccgcugguaccuuugacgccggcgaguucagcuuaccaacuuuugauucccugaacauuaccgcagccucucuaaaugacgaugggcucgacaaccacacaauccugcuuuauuacagcaccgcugccucaaguuuggcagugacucugaugaucgcgauuuucgucguguauauggucucccgugauaaugugagcuguucuauaugccucuga

SEQ ID NO: 155058 - RNA, 1758 nt, Artificial Sequence; identical to SEQ ID NO: 154656
  derived and/or modified CDS sequence (opt3) from hemagglutinin__InfluenzaB__AGX15907

SEQ ID NO: 155059 - RNA, 1758 nt, Artificial Sequence; identical to SEQ ID NO: 154656
  derived and/or modified CDS sequence (opt3) from hemagglutinin__InfluenzaB__AGX15918

SEQ ID NO: 155060 - RNA, 1758 nt, Artificial Sequence
  derived and/or modified CDS sequence (opt3) from hemagglutinin__InfluenzaB__AGX15929
augaaggccaucauugugcugcucauggucguuaccagcaacgcugacagaauaugcacaggcaucacuuccucuaauucaccccacgugguaaaaacggcaacccagggggaagugaacgucacaggagugauuccucuuacuaccacaccaaccaagagucauuucgccaaucugaaagguacugaaacaaggggcaaguuguguccgaaaugcuuaaacuguaccgaucuggacguugcgcuagggcggcccaagugcacgggaaagaucccuagcgcucgcguguccauucuccacgagguccgaccagugacuucuggcuguuuucccaucaugcaugaucguaccaaaauaagacaacugccuaaucuucugagggguuacgaacacauccgguugucgacaaacaauguaauuaacgccgagaaugcaccagggggacccuauaagaucggcacuucaggcagcugcccuaacguuaccaaugggaacggauucuuugccacaauggcuugggcagugccgaaaaaugacaagaacaaaaccgccacgaauccacucacuauugaaguccccuacaucuguacagagggugaggaucagauaaccguguggggcuuccauagugacaacgaaacucagauggcuaagcuguauggggauuccaagccucagaaauuuacaucuagcgccaacggagugaccacgcacuacgucucccaaauuggcgguuucccaaaucagaccgaggacgggggacugccccagucaggccgcaucguuguggauuauaugguacagaagagugagaaaacaggcacuauuaccuaccaaagagggauccucuuaccucagaagguguggugcgcgagcggaaggucuaaagucaucaaggguucccugccacuuauuggcgaagcagacuguuugcacgagaaauaugggggacugaacaagucaaagcccuacuacacaggcgaacaugccaaagcuauagguaauugcccgaucugggugaagacuccucuaaaacucgccaacgggaccaaguaucggcccccagcaaaacugcuuaaggagcgcggcuuuuucggagcuauugccggcuuucuggaagggggaugggaggguaugaucgcgggcuggcacggguacacaagccauggagcccacggcguugcaguggcugccgauuugaagaguacccaggaagcuauaaauaaaauuacuaagaaccucaauucucuguccgaguuagaggucaaaaaccugcagcgacucagcggugccauggacgaacuucacaaugagauccuggaauuggaugagaagguggacgaccuaagagcagauacgaucucgucucaaauugaacuggccguacuccuguccaacgaggggaucauuaauucagaggacgaacaucuucuggcuuuggagaggaaacucaagaagaugcugggcccuagugcgguugaaauaggaaacggcuguuucgagacaaaacacaagugcaaucagaccugcuuagaucggaucgcagccgggacuuuugacgcuggagaguucagccugcccaccuuugauucccuaaacauuacagccgcaucucucaaugacgauggucuggacaaccauaccauccuuuuguauuacagcacugccgcuucaagucuggccgugacacucaugaucgcaauuuucgucguguauauggucucccgugauaacgugagcuguucuauaugccuguga

SEQ ID NO: 155061 - RNA, 1758 nt, Artificial Sequence; identical to SEQ ID NO: 154656
  derived and/or modified CDS sequence (opt3) from hemagglutinin__InfluenzaB__AGX15940

SEQ ID NO: 155062 - RNA, 1758 nt, Artificial Sequence
  derived and/or modified CDS sequence (opt3) from hemagglutinin__InfluenzaB__AGX15962
augaaggccaucauugugcugcucauggucguuaccagcaacgcugacagaauaugcacaggcaucacuuccucuaauucaccccacauugugaaaacggcaacccagggggagguaaacgugacaggagucaucccucuuacuaccacaccaaccaagagucauuucgccaaucugaaagguacugaaacaaggggcaaguuguguccgaaaugcuuaaacuguaccgaucuggacguggcgcuagggcggcccaagugcacgggaaagauuccuagcgcucgcguuuccauccuccacgaggugcgaccagucacuucuggcuguuuucccauaaugcaugaucguaccaaaaucagacaacugccuaaucuucugagggguuacgaacacauucgguugucgacacauaacgugaucaaugccgagaacgcaccagggggacccuauaagauuggcacuucaggcagcugcccuaauaucaccaacgggaauggauucuuugccacaauggcuugggcaguaccgaaaaacgacaagaauaaaaccgccacgaacccacucacuauagaaguucccuacauuuguacagagggugaggaucagaucaccguguggggcuuccacagugacaaugaaacucagauggcuaagcuguauggggauuccaagccucagaaauuuacaucuagcgccaacggagucaccacgcacuacgugucccaaauuggcgguuucccaaaccagaccgaggacgggggacugccccagucaggccgcaucguggucgauuauaugaugcagaagaguggcaaaacagggacuaucaccuaccaaagagguauucucuuaccucagaagguuuggugcgcgagcggaaggucuaaagugauaaagggcucccugccacuuaucggggaagcagacuguuugcaugagaaauauggaggccugaauaagucaaagcccuacuacacaggugagcacgccaaagcuauugggaacugcccgaucuggguaaagacuccucuaaaacucgccaauggcaccaaguaucggcccccagcaaaacugcuuaaggaacgcggauuuuucggcgcuauagccggguuucuggagggagguugggaaggcaugauugcgggguggcauggauacacaagccacggcgcccacgguguggcagucgcugccgauuugaagaguacccaggaggcuaucaacaaaaucacuaagaaucucaacucucuguccgaauuagaggugaaaaaucugcagcgacucagcggggccauggacgagcuucauaacgaaauucuggaguuggaugaaaagguugacgaccuaagagcagauacgaucucgucucaaauugagcuggccgugcuccuguccaaugaaggcauaaucaacucagaggacgagcaccuucuggcuuuggaaaggaaacucaagaagaugcugggaccuagugcggucgagauuggcaauggguguuucgaaacaaaacauaagugcaaccagaccugcuuagaucggaucgcagccggaacuuuugacgcuggugaguucagccugcccaccuuugauucccuaaauaucacagccgcaucucucaacgacgauggccuggacaaucacaccauucuuuuguauuacagcacugccgcuucaagucuggccgugacacucaugauagcaaucuucguaguuuauauggugucccgugauaacgucagcuguucuauuugccuguga

SEQ ID NO: 155063 - RNA, 1758 nt, Artificial Sequence; identical to SEQ ID NO: 154693
  derived and/or modified CDS sequence (opt3) from hemagglutinin__InfluenzaB__AGX15973

SEQ ID NO: 155064 - RNA, 1758 nt, Artificial Sequence; identical to SEQ ID NO: 154693
  derived and/or modified CDS sequence (opt3) from hemagglutinin__InfluenzaB__AGX15984

SEQ ID NO: 155065 - RNA, 1758 nt, Artificial Sequence; identical to SEQ ID NO: 154731
  derived and/or modified CDS sequence (opt3) from hemagglutinin__InfluenzaB__AGX15995

SEQ ID NO: 155066 - RNA, 1758 nt, Artificial Sequence; identical to SEQ ID NO: 154731
  derived and/or modified CDS sequence (opt3) from hemagglutinin__InfluenzaB__AGX16006

SEQ ID NO: 155067 - RNA, 1758 nt, Artificial Sequence
  derived and/or modified CDS sequence (opt3) from hemagglutinin__InfluenzaB__AGX16017
augaaggccaucauugugcugcucauggucguuaccagcaacgcugacagaauaugcacaggcaucacuuccucuaauucaccccacauugugaaaacggcaacccagggggagguaaacgugacaggagucaucccucuuacuaccacaccaaccaagagucauuucgccaaucugaaagguacugaaacaaggggcaaguuguguccgaaaugcuuaaacuguaccgaucuggacguggcgcuagggcggcccaagugcacgggaaagauuccuagcgcucgcguuuccauccuccacgaggugcgaccagucacuucuggcuguuuucccauaaugcaugaucguaccaaaaucagacaacugccuaaucuucugagggguuacgaacacauucgguugucgacacauaacgugaucaaugccgagaacgcaccagggggacccuauaagauuggcacuucaggcagcugcccuaauaucaccaacgggaauggauucuuugccacaauggcuugggcaguaccgaaaaacgacaagaauaaaaccgccacgaacccacucacuauagaaguucccuacauuuguacagagggugaggaucagaucaccguguggggcuuccacagugacaaugaaauucagauggcuaagcuguauggggauuccaagccucagaaauuuacuucuagcgccaacggagucacaacccacuacgugucccaaaucggcgguuucccaaaccagacggaggacgggggacugccccagucaggccgcaucguggucgauuauaugguucagaagaguggcaaaaccgggacaauuacuuaccaaagaggaauacucuuaccucagaagguguggugcgcgagcgguaggucuaaaguaaucaagggcucccugccacuuauuggggaagcagacuguuugcaugagaaauauggaggccugaauaagucaaagcccuacuacaccggugagcacgccaaagcuaucgggaacugcccgauaugggugaagacaccucuaaaacucgccaauggcacuaaguaucggcccccagcaaaacugcuuaaggaacgcggauuuuucggcgcuauugccggguuucuggagggagguugggaaggcaugaucgcgggguggcauggauacaccagccacggcgcccacggugucgcaguggcugccgauuugaagaguacacaggaggcuaucaacaaaauuaccaagaaucucaacucucuguccgaauuagagguuaaaaaucugcagcgacucagcggggccauggacgagcuucauaacgaaauccuggaguuggaugaaaagguggacgaccuaagagcagauacuauuucgucucaaauagagcuggccguccuccuguccaaugaaggcaucauuaacucagaggacgagcaccuucuggcuuuggaaaggaaacucaagaagaugcugggaccuagugcgguggagaucggcaauggguguuucgaaacgaaacauaagugcaaccagacaugcuuagaucggaucgcagccggaaccuuugacgcuggugaguucagccugcccacuuuugauucccuaaauauuaccgccgcaucucucaacgacgauggccuggacaaucacacaauacuuuuguauuacagcaccgccgcuucaagucuggccguaacucucaugaucgcaauuuucguuguguauauggucucccgugauaacgugagcuguucuaucugccuguga

SEQ ID NO: 155068 - RNA, 1755 nt, Artificial Sequence; identical to SEQ ID NO: 154474
  derived and/or modified CDS sequence (opt3) from hemagglutinin__InfluenzaB__AGX16028

SEQ ID NO: 155069 - RNA, 1755 nt, Artificial Sequence
  derived and/or modified CDS sequence (opt3) from hemagglutinin__InfluenzaB__AGX16039
augaaggccaucauugugcugcucauggucguuaccagcaacgcugacagaauaugcacaggcaucacuuccucuaauucaccccacgugguaaaaacggcaacccagggggaggugaacgucacaggagugauuccucuuacuaccacaccaaccaagaguuacuucgccaaucugaaagguacuaggacacggggcaaguuguguccggauugcuuaaacuguaccgaccuggauguugcgcuagggcgccccaugugcgugggaacgacuccuagcgcuaaagccuccauccuccaugaaguccgaccagugaccucuggcuguuuucccauuaugcacgaccguacaaagaucagacaacugccuaaucuucugagggguuaugagaacauacgguugucgacucagaauguaaucgaugcagaaaaggccccagggggacccuaccgccucggcaccucaggcagcugcccuaacgcuacaaguaaauccggguucuuugcaaccauggccugggcuguuccaaaggacaauaacaaaaaugccacgaacccgcugacuguggagguccccuauauuuguacagaaggagaggaucagaucaccgugugggguuuccauucugacaauaagacucagaugaaaaaccuguacggcgauagcaauccucaaaaguuuacauccucagcgaacggggugaccacgcacuaugucagucagauuggaggcuucccagaccagaccgaggauggugggcucccccagagcggaagaaucguuguggacuacaugaugcaaaagccuggcaaaacaggcacuauaguauaucagaggggaguguuacugccacagaaggucuggugcgcaucugggcgguccaaagugauuaaggguucacuucccuugaucggcgaagccgauugucugcaugagaaauacgggggacuaaacaagagcaaaccguacuauaccggcgaacacgcuaaggccauugguaauugcccuaucuggguuaagacaccccucaaacuggcaaacgggacuaaguaccgcccuccagcuaaacuucugaaggagcgaggcuuuuucggagccaucgcgggcuuuuuggaagggggaugggaagguaugauugccggcuggcacggguauaccagucauggagcacacggcguggcugucgccgcugaccucaaaucuacacaggaggccauaaauaagaucaccaagaacuuaaauucccugagcgaacuggaggugaaaaaccuccaaagacuuucgggugcaguagacgaacugcauaaugagauuuuggagcuagaugaaaagguugacgaucugagggccgacacuaucucuucccagauagagcucgcugugcugcuuucaaacgaagggauuaucaauagugaggaugaacaccuguuggcgcucgagcggaaacugaagaaaauguuaggccccagcgcagucgacaucggaaacggcuguuucgagacgaagcacaagugcaaucagacaugccuggaucguauugccgcugggaccuuuaacgccggagaguucucccuaccaacuuuugacucucucaauaucaccgcagccagccugaacgaugacggucuugauaaucauacaauuuugcuguacuauucaaccgcugccaguucccucgcagugacucugaugcuugcgauauucaucgucuacauggugagccgcgacaacguuucuuguucaauuugccuguga

SEQ ID NO: 155070 - RNA, 1755 nt, Artificial Sequence
  derived and/or modified CDS sequence (opt3) from hemagglutinin__InfluenzaB__AGX16050
augaaggccaucauugugcugcucauggucguuaccagcaacgcugacagaauaugcacaggcaucacuuccucuaauucaccccacgugguaaaaacggcaacccagggggaagugaacgucacaggagugauuccucuuacuaccacaccaaccaagaguuacuucgccaaucugaaagguacuaggacacggggcaaguuguguccggauugcuuaaacuguaccgaccuggauguugcgcuagggcgccccaugugcgugggaacgacuccuagcgcuaaagccuccauccuccaugaaguccgaccagugaccucuggcuguuuucccauuaugcacgaccguacaaagaucagacaacugccuaaucuucugagggguuaugagaacauacgguugucgacucagaauguaaucgaugcagaaaacgccccagggggacccuaccgccucggcaccucaggcagcugcccuaaugcuacaaguaaguccggguucuuugcaaccauggccugggcuguuccaaaagacaacaauaagaacgccacgaauccgcugacuguggagguccccuauauuuguacagaaggagaggaucagaucaccgugugggguuuccauucugacaacaaaacucagaugaagaaucuguacggcgauagcaacccucaaaaauuuacauccucagcgaacggggugaccacgcacuaugucagucagauuggaggcuucccagcacagaccgaggacggugggcucccccagagcggaagaaucguuguggauuacaugguacaaaagccuaggaagacaggcacuauaguguaucagcggggcgucuuacugccacagaaaguguggugcgccucugggcgcuccaagguuauuaaaggaucacuucccuugaucggugaagcugacugucugcaugagaaguacggcgggcuaaauaaaagcaagccguacuauaccggagaacacgccaaagcaauuggcaacugcccuaucugggugaagacaccccucaagcuggcuaaugguacuaaauaccgaccuccagccaaacuucugaaggagagaggguuuuucggcgcgaucgccggauuuuuggagggcgggugggaaggaaugauugcagguuggcacggcuauaccagucauggggcucacggagucgccguggcugccgaucucaagucuacacaggaggcaauaaacaaaaucaccaagaaucugaacuccuuaagcgaacuggagguaaagaaucuccaaaggcuuucgggcgccauggacgaacugcauaacgagauuuuggagcuagacgaaaaaguugaugaccugcgggcugauacuaucucuucccagauagagcucgcggugcugcuuucaaaugaagguauuaucaacagugaggacgaacaccuguuggcacucgagcguaagcugaaaaagauguuagggcccagcgccgucgauaucggcaauggauguuucgagacgaaacacaagugcaaccagacaugccuggaccgcauugcugccggcaccuuuaaugcaggggaguucucccuaccaacuuuugauucucucaacaucaccgccgcuagccugaaugacgauggacuugacaaccauacaauuuugcuguacuauucaaccgccgcaaguucccucgcggugacucugaugcuugcuauauucaucgucuacauggugagcagagauaacguuucuuguucaauuugccuguga

SEQ ID NO: 155071 - RNA, 1755 nt, Artificial Sequence
  derived and/or modified CDS sequence (opt3) from hemagglutinin__InfluenzaB__AGX16061
augaaggccaucauugugcugcucauggucguuaccagcaacgcugacagaauaugcacaggcaucacuuccucuaauucaccccacgugguaaaaacggcaacccagggggaggugaacgucacaggagugauuccucuuacuaccacaccaaccaagaguuacuucgccaaucugaaagguacuaggacacggggcaaguuguguccggauugcuuaaacuguaccgaccuggauguugcgcuagggcgccccaugugcgugggaacgacuccuagcgcuaaagccuccauccuccaugaaguccgaccagugaccucuggcuguuuucccauuaugcacgaccguacaaagaucagacaacugccuaaucuucugagggguuaugagaacauacgguugucgacucagaauguaaucgaugcagaaaaggccccagggggacccuaccgccucggcaccucaggcagcugcccuaacgcuacaaguaaauccggguucuuugcaaccauggccugggcuguuccaaaggacaauaacaaaaaugccacgaacccgcugacuguggagguccccuauauuuguacagaaggagaggaucagaucaccgugugggguuuccauucugacaauaagacucagaugaaaaaccuguacggcgauagcaauccucaaaaguuuacauccucagcgaacggggugaccacgcacuaugucagucagauuggaggcuucccagaccagaccgaggauggugggcucccccagagcggaagaaucguuguggacuacaugaugcaaaagccuggcaaaacaggcacuauaguauaucagaggggaguguuacugccacagaaggucuggugcgcaucugggcgguccaaagugauuaaggguucacuucccuugaucggcgaagccgauugucugcaugagaaauacgggggacuaaacaagagcaaaccguacuauaccggcgaacacgcuaaggccauugguaauugcccuaucuggguuaagacaccccucaaacuggcaaacgggacuaaguaccgcccuccagcuaaacuucugaaggagcgaggcuuuuucggagccaucgcgggcuuuuuggaagggggaugggaagguaugauugccggcuggcacggguauaccagucauggagcacacggcguggcugucgccgcugaccucaaaucuacacaggaggccauaaauaagaucaccaagaacuuaaauucccugagcgaacuggaggugaaaaaccuccaaagacuuucgggugcaauggacgaacugcauaaugagauuuuggagcuagaugaaaagguagacgaucugagggccgacacuaucucuucccagauagagcucgcuguucugcuuucaaacgaagggauuaucaauagugaggaugaacaccuguuggcgcucgagcggaaacugaagaaaauguuaggccccagcgcaguggacaucggaaacggcuguuucgagacgaagcacaagugcaaucagacaugccuggaucguauugccgcugggaccuuuaacgccggagaguucucccuaccaacuuuugacucucucaauaucaccgcagccagccugaacgaugacggucuugauaaucauacaauuuugcuguacuauucaaccgcugccaguucccucgcagucacucugaugcuugcgauauucaucguguacauggucagccgcgacaacgugucuuguucaauuugccuguga

SEQ ID NO: 155072 - RNA, 1755 nt, Artificial Sequence
  derived and/or modified CDS sequence (opt3) from hemagglutinin__InfluenzaB__AGX16083
augaaggccaucauugugcugcucauggucguuaccagcaacgcugacagaauaugcacaggcaucacuuccucuaauucaccccacgugguaaaaacggcaacccagggggaggugaacgucacaggagugauuccucuuacuaccacaccaaccaagaguuacuucgccaaucugaaagguacuaggacacggggcaaguuguguccggauugcuuaaacuguaccgaccuggauguugcgcuagggcgccccaugugcgugggaacgacuccuagcgcuaaagccuccauccuccaugaaguccgaccagugaccucuggcuguuuucccauuaugcacgaccguacaaagaucagacaacugccuaaucuucugagggguuaugagaacauacgguugucgacucagaauguaaucgaugcagaaaaggccccagggggacccuaccgccucggcaccucaggcagcugcccuaacgcuacaaguaaauccggguucuuugcaaccauggccugggcuguuccaaaggacaauaacaaaaaugccacgaacccgcugacuguggagguccccuauauuuguacagaaggagaggaucagaucaccgugugggguuuccauucugacaauaagacucagaugaaaaaccuguacggcgauagcaauccucaaaaguuuacauccucagcgaacggggugaccacgcacuaugucagucagauuggaggcuucccagaccagaccgaggauggugggcucccccagagcggaagaaucguuguggacuacaugaugcaaaagccuggcaaaacaggcacuauaguauaucagaggggaguguuacugccacagaaggucuggugcgcaucugggcgguccaaagugauuaaggguucacuucccuugaucggcgaagccgauugucugcaugagaaauacgggggacuaaacaagagcaaaccguacuauaccggcgaacacgcuaaggccauugguaauugcccuaucuggguuaagacaccccucaaacuggcaaacgggacuaaguaccgcccuccagcuaaacuucugaaggagcgaggcuuuuucggagccaucgcgggcuuuuuggaagggggaugggaggguaugauugccggcuggcacggguauaccagucauggagcacacggcguggcugucgccgcugaccucaaaucuacacaggaggccauaaauaagaucaccaagaacuuaaauucccugagcgaacuggaggugaaaaaccuccaaagacuuucgggugcaauggacgaacugcauaaugagauuuuggagcuagaugaaaagguagacgaucugagggccgacacuaucucuucccagauagagcucgcuguucugcuuucaaacgaagggauuaucaauagugaggaugaacaccuguuggcgcucgagcggaaacugaagaaaauguuaggccccagcgcaguggagaucggaaacggcuguuucgaaacgaagcacaagugcaaucagacaugccuggaccguauugccgcugggaccuuuaacgccggagaguucucccuaccaacuuuugauucucucaauaucaccgcagccagccugaacgacgauggucuugacaaucauacaauuuugcuguacuauucaaccgcugccaguucccucgcagucacucugaugcuugcgauauucaucguguacauggucagccgcgauaacgugucuuguucaauuugccuguga

SEQ ID NO: 155073 - RNA, 1755 nt, Artificial Sequence
  derived and/or modified CDS sequence (opt3) from hemagglutinin__InfluenzaB__AGX16105
augaaggccaucauugugcugcucauggucguuaccagcaacgcugacagaauaugcacaggcaucacuuccucuucaaguccccacgugguaaaaacggcaacccagggggaggugaaugucacaggagugauuccucuuacuaccacaccaaccaagagcuacuucgccaaccugaaagguacuaggacacggggcaaguuguguccggauugcuuaaauuguaccgaccuggauguugcgcuagggcgccccaugugcgugggaacgacuccuuccgcuaaagccucuauccuccaugaaguccgaccagugaccucgggcuguuuucccauuaugcacgaccguacaaagaucagacaacugccuaaccuucugagggguuaugagaauauacgguugucaacucagaacguaaucgaugcagaaaaggccccagggggacccuaccgccucggcaccagcggcaguugcccuaaugcuacauccaaaucuggguucuuugcaaccauggccugggcuguuccaaaggacaacaauaaaaacgccacgaauccgcugacuguggagguccccuauauuuguacagaaggagaggaucagaucaccgugugggguuuccauagcgacaacaagacucagaugaaaaaucuguacggcgauuccaacccucaaaaguuuacaucaagugcgaauggggugaccacgcacuaugucagccagauuggaggcuucccagaccagaccgaggauggugggcucccccagucuggaagaaucguuguggacuacaugaugcaaaagccuggcaaaacaggcacuauaguauaucagaggggaguguuacugccacagaaggucuggugcgcauccgggcggucaaaagugauuaaggguagccuucccuugaucggcgaagccgauugucugcaugagaaauacgggggacuaaacaagaguaaaccguacuauaccggcgaacacgcuaaggccauugguaacugcccuaucuggguuaagacaccccucaaacuggcaaaugggacuaaguaccgcccuccagcuaaacuucugaaggagcgaggcuuuuucggagccaucgcgggcuuuuuggaagggggaugggaagguaugauugccggcuggcacggguauaccucucauggagcacacggcguggcugucgccgcugaccucaaauccacacaggaggccauaaacaagaucaccaagaaucugaacagcuuaucggaacuggaggugaaaaaucuccaaagacuuucuggugcaauggacgaacugcauuccgagauuuuggagcuagaugaaaagguagacgaucugagggccgacacuaucucaagucagauagagcucgcuguucugcuuagcaacgaagggauuaucaauuccgaggaugaacaccuguuggcgcucgagcggaaacugaagaaaauguuaggccccucugcaguggacaucggaaacggcuguuucgagacgaagcacaagugcaaucagacaugccuggaucguauugccgcugggaccuuuaacgccggagaguucagccuaccaacuuuugacucacucaauaucaccgcagccagucugaacgaugacggucuugauaaucauacaauuuugcuguacuauuccaccgcugccagcucucucgcagucacucugaugcuugcgauauucaucguguacauggucucacgcgacaacgugaguuguagcauuugccuguga

SEQ ID NO: 155074 - RNA, 1755 nt, Artificial Sequence
  derived and/or modified CDS sequence (opt3) from hemagglutinin__InfluenzaB__AGX16116
augaaggccaucauugugcugcucauggucguuaccagcaacgcugacagaauaugcacaggcaucacuuccucuaauucaccccacgugguaaaaacggcaacccagggggaagugaacgucacaggagugauuccucuuacuaccacaccaaccaagaguuacuucgccaaucugaaagguacuaggacacggggcaaguuguguccggauugcuuaaacuguaccgaccuggauguugcgcuagggcgccccaugugcgugggaacgacuccuagcgcuaaagccuccauccuccaugaaguccgaccagugaccucuggcuguuuucccauuaugcacgaccguacaaagaucagacaacugccuaaucuucugagggguuaugagaacauacgguugucgacucagaauguaaucgaugcagaaaacgccccagggggacccuaccgccucggcaccucaggcagcugcccuaaugcuacaaguaaguccggguucuuugcaaccauggccugggcuguuccaaaagacaacaauaagaacgccacgaauccgcugacuguggagguccccuauguguguacagaaggagaggaucagauuaccgugugggguuuccauucugacaacaaaacucagaugaagaaucuguacggcgauagcaacccucaaaaauuuacauccucagcgaacggggucaccacgcacuauguuagucagaucggaggcuucccagcacagaccgaggacggugggcucccccagagcggaagaauugugguagauuacauggugcaaaagccuaggaagacaggcacuaucgucuaucagcggggcguguuacugccacagaaaguuuggugcgccucugggcgcuccaaggugauaaaaggaucacuucccuugauuggugaagcugacugucugcaugagaaguacggcgggcuaaauaaaagcaagccguacuauaccggagaacacgccaaagcaaucggcaacugcccuauuugggucaagacaccccucaagcuggcuaaugguacuaaauaccgaccuccagccaaacuucugaaggagagaggguuuuucggcgcgaucgccggauuuuuggagggcgggugggaaggaaugaucgcagguuggcacggcuauaccagucauggggcucacggaguggccguagcugccgaucucaagucuacacaggaggcaauuaacaaaauaaccaagaaucugaacuccuuaagcgaacuggagaucaagaaucuccaaaggcuuucgggcgccauggacgaacugcauaacgagauuuuggagcuagacgaaaaaguugaugaccugcgggcugauacuaucucuucccagauagagcucgcggugcugcuuucaaaugaagguauuaucaacagugaggacgaacaccuguuggcacucgagcguaagcugaaaaagauguuagggcccagcgccgucgauaucggcaauggauguuucgagacgaaacacaagugcaaccagacaugccuggaccgcauugcugccggcaccuuuaaugcaggggaguucucccuaccaacuuuugauucucucaacaucaccgccgcuagccugaaugacgauggacuugacaaccauacaauuuugcuguacuauucaaccgccgcaaguucccucgcggugacucugaugcuugcuauauucaucgucuacauggugagcagagauaacguuucuuguucaauuugccuguga

SEQ ID NO: 155075 - RNA, 1755 nt, Artificial Sequence
  derived and/or modified CDS sequence (opt3) from hemagglutinin__InfluenzaB__AGX16127
augaaggccaucauugugcugcucauggucguuaccagcaacgcugacagaauaugcacaggcaucacuuccucuaauucaccccacgugguaaaaacggcaacccagggggaagugaacgucacaggagugauuccucuuacuaccacaccaaccaagaguuacuucgccaaucugaaagguacuaggacacggggcaaguuguguccggauugcuuaaacuguaccgaccuggauguugcgcuagggcgccccaugugcgugggaacgacuccuagcgcuaaagccuccauccuccaugaaguccgaccagugaccucuggcuguuuucccauuaugcacgaccguacaaagaucagacaacugccuaaucuucugagggguuaugagaacauacgguugucgacucagaauguaaucgaugcagaaaacgccccagggggacccuaccgccucggcaccucaggcagcugcccuaaugcuacaaguaaguccggguucuuugcaaccauggccugggcuguuccaaaagacaacaauaagaacgccacgaauccgcugacuguggagguccccuauguguguacagaaggagaggaucagauuaccgugugggguuuccauucugacaacaaaauccagaugaagaaucuguacggcgauagcaacccucaaaaauuuacuuccucagcgaacggggucacaacccacuauguuagucagauuggaggcuucccagcacagacggaggacggugggcucccccagagcggaagaaucgugguagauuacauggugcaaaagccuaggaagaccggcacaauagucuaucagcggggcguguuacugccacagaaaguuuggugcgccucugggcgcuccaaggugauuaaaggaucacuucccuugaucggugaagcugacugucugcaugagaaguacggcgggcuaaauaaaagcaagccguacuauacuggagaacacgccaaagcaauuggcaacugcccuaucugggucaagacuccccucaagcuggcuaaugguacaaaauaccgaccuccagccaaacuucugaaggagagaggguuuuucggcgcgaucgccggauuuuuggagggcgggugggaaggaaugauugcagguuggcacggcuauaccagucauggggcucacggaguggccguagcugccgaucucaagucuacccaggaggcaauaaacaaaaucacaaagaaucugaacuccuuaagcgaacuggagauuaagaaucuccaaaggcuuucgggcgccauggacgaacugcauaacgagaucuuggagcuagacgaaaaaguugaugaccugcgggcugauaccauaucuucccagauugagcucgcggugcugcuuucaaaugaagguaucaucaacagugaggacgaacaccuguuggcacucgagcguaagcugaaaaagauguuagggcccagcgccgucgauauuggcaauggauguuucgagacuaaacacaagugcaaccagacgugccuggaccgcaucgcugccggcacauuuaaugcaggggaguucucccuaccaaccuuugauucucucaacauuacugccgcuagccugaaugacgauggacuugacaaccauaccauauugcuguacuauucaacagccgcaaguucccucgcggugacccugaugcuugcuaucuucauugucuacauggugagcagagauaacguuucuuguucaaucugccuguga

SEQ ID NO: 155076 - RNA, 1755 nt, Artificial Sequence; identical to SEQ ID NO: 155074
  derived and/or modified CDS sequence (opt3) from hemagglutinin__InfluenzaB__AGX16138

SEQ ID NO: 155077 - RNA, 1755 nt, Artificial Sequence; identical to SEQ ID NO: 155071
  derived and/or modified CDS sequence (opt3) from hemagglutinin__InfluenzaB__AGX16149

SEQ ID NO: 155078 - RNA, 1755 nt, Artificial Sequence; identical to SEQ ID NO: 155072
  derived and/or modified CDS sequence (opt3) from hemagglutinin__InfluenzaB__AGX16160

SEQ ID NO: 155079 - RNA, 1755 nt, Artificial Sequence; identical to SEQ ID NO: 155072
  derived and/or modified CDS sequence (opt3) from hemagglutinin__InfluenzaB__AGX16182

SEQ ID NO: 155080 - RNA, 1755 nt, Artificial Sequence; identical to SEQ ID NO: 154474
  derived and/or modified CDS sequence (opt3) from hemagglutinin__InfluenzaB__AGX16193

SEQ ID NO: 155081 - RNA, 1755 nt, Artificial Sequence; identical to SEQ ID NO: 154474
  derived and/or modified CDS sequence (opt3) from hemagglutinin__InfluenzaB__AGX16215

SEQ ID NO: 155082 - RNA, 1755 nt, Artificial Sequence; identical to SEQ ID NO: 154474
  derived and/or modified CDS sequence (opt3) from hemagglutinin__InfluenzaB__AGX16226

SEQ ID NO: 155083 - RNA, 1755 nt, Artificial Sequence
  derived and/or modified CDS sequence (opt3) from hemagglutinin__InfluenzaB__AGX16237
augaaggccaucauugugcugcucauggucguuaccagcaacgcugacagaauaugcacaggcaucacuuccucuaauucaccccacgugguaaaaacggcaacccagggggaggugaacgucacaggagugauuccucuuacuaccacaccaaccaagaguuacuucgccaaucugaaagguacuaggacacggggcaaguuguguccggauugcuuaaacuguaccgaccuggauguugcgcuagggcgccccaugugcgugggaacgacuccuagcgcuaaagccuccauccuccaugaaguccgaccagugaccucuggcuguuuucccauuaugcacgaccguacaaagaucagacaacugccuaaucuucugagggguuaugagaacauacgguugucgacucagaauguaaucgaugcagaaaaggccccagggggacccuaccgccucggcaccucaggcagcugcccuaacgcuacaaguaaauccggguucuuugcaaccauggccugggcuguuccaaaggacaauaacaaaaaugccacgaacccgcugacuguggagguccccuauauuuguacagaaggagaggaucagaucaccgugugggguuuccauucugacaauaagacucagaugaaaaaccuguacggcgauagcaauccucaaaaguuuacauccucagcgaacggggugaccacgcacuaugucagucagauuggaggcuucccagaccagaccgaggauggugggcucccccagagcggaagaaucguuguggacuacaugaugcaaaagccuggcaaaacaggcacuauaguauaucagaggggaguguuacugccacagaaggucuggugcgcaucugggcgguccaaagugauuaaggguucacuucccuugaucggcgaagccgauugucugcaugagaaauacgggggacuaaacaagagcaaaccguacuauaccggcgaacacgcuaaggccauugguaauugcccuaucuggguuaagacaccccucaaacuggcaaacgggacuaaguaccgcccuccagcuaaacuucugaaggagcgaggcuuuuucggagccaucgcgggcuuuuuggaagggggaugggaagguaugauugccggcuggcacggguauaccagucauggagcacacggcguggcugucgccgcugaccucaaaucuacacaggaggccauaaauaagaucaccaagaacuuaaauucccugagcgaacuggaggugaaaaaccuccaaagacuuucgggugcaauggacgaacugcauaaugagauuuuggagcuagaugaaaagguagacgaucugagggccgacacuaucucuucccagauagagcucgcuguucugcuuucaaacgaagggauuaucaauagugaggaugaacaccuguuggcgcucgagcggaaacugaagaaaauguuaggccccagcgcaguggacaucggaaacggcuguuucgagacgaagcacaagugcaaucagacaugccuggaucguauugccgcugggaccuuuaacgccggagaguucucccuaccaacuuuugacucucucaauaucaccgcagccagccugaacgaugacggucuugauaaucauacaauuuugcuguacuauucaaccgcugccaguucccucgcaauaacucugaugcuugcgaucuucauugucuacauggugagccgcgacaacgucucuuguucaaucugccuguga

SEQ ID NO: 155084 - RNA, 1755 nt, Artificial Sequence; identical to SEQ ID NO: 154474
  derived and/or modified CDS sequence (opt3) from hemagglutinin__InfluenzaB__AGX16248

SEQ ID NO: 155085 - RNA, 1755 nt, Artificial Sequence; identical to SEQ ID NO: 154474
  derived and/or modified CDS sequence (opt3) from hemagglutinin__InfluenzaB__AGX16259

SEQ ID NO: 155086 - RNA, 1755 nt, Artificial Sequence
  derived and/or modified CDS sequence (opt3) from hemagglutinin__InfluenzaB__AGX16270
augaaggccaucauugugcugcucauggucguuaccagcaacgcugacagaauaugcacaggcaucacuuccucuaauucaccccacgugguaaaaacggcaacccagggggaggugaacgucacaggagugauuccucuuacuaccacaccaaccaagaguuacuucgccaaucugaaagguacuaggacacggggcaaguuguguccggauugcuuaaacuguaccgaccuggauguugcgcuagggcgccccaugugcgugggaacgacuccuagcgcuaaagccuccauccuccaugaaguccgaccagugaccucuggcuguuuucccauuaugcacgaccguacaaagaucagacaacuggcaaaucuucugagggguuaugagaacauacgguugucgacucagaauguaaucgaugccgaaaaggcuccugggggaccauaccgccucggcaccucaggcagcugccccaacgcaacaaguaaauccggguucuuugccaccauggcuugggccguuccuaaggacaauaacaaaaaugcgacgaacccacugacuguggaggucccguauauuuguaaggaaggagaggaucagaucacagugugggguuuccauucugacaauaaaacccagaugaagaaccuguacggcgauagcaauccccaaaaguuuacuuccucagcaaacggggugacaacccacuaugucagucagauuggaggcuucccugaccagacggaggauggugggcucccacagagcggaagaaucguuguggacuacaugauacaaaaacccggcaagaccggcacaauuguauaucagcgcgggguguuacugccucagaaagucuggugcgccucuggacgguccaaggugaucaaagguucacuuccauugauuggcgaagcugauugucugcaugagaaguacgggggacuaaacaaaagcaagcccuacuauacuggcgaacacgccaaggcaaucgguaauugcccgaucuggguuaaaaccccucucaagcuggcuaacgggacaaaauacaggcccccagccaagcugcugaaagagcgaggcuuuuucggagcgauugccggcuuuuuggaagggggaugggaagguaugauagcaggcuggcacggguauacaagucauggagcucacggcguggccgucgcugccgaccucaagucuacccaggaggcaaucaauaagauuacuaaaaaccuuaauuccuuaagcgaacuggaggugaagaaccuccaaagacuuucgggugccauggacgaacugcauaaugagaucuuggagcuagaugaaaaaguagacgaucugagggcugacaccauaucuucccagauugagcucgcgguucugcuuucaaacgaagggaucaucaauagugaggaugaacaccuguuggcacucgagcggaagcugaaaaagauguuaggcccuagcgccguggacauuggaaacggcuguuucgagacuaagcacaaaugcaaucagacgugccuggaucguaucgcugccgggacauuuaacgcaggagaguucucccuacccaccuuugacucucucaauauuacugccgcuagccugaacgaugacggucuugauaaucauaccauauugcuguacuauucaacagccgcaaguucccucgcggucacccugaugcuugcuaucuucauuguguacauggucagccgcgacaacgugucuuguucaaucugccuguga

SEQ ID NO: 155087 - RNA, 1755 nt, Artificial Sequence; identical to SEQ ID NO: 155086
  derived and/or modified CDS sequence (opt3) from hemagglutinin__InfluenzaB__AGX16281

SEQ ID NO: 155088 - RNA, 1755 nt, Artificial Sequence
  derived and/or modified CDS sequence (opt3) from hemagglutinin__InfluenzaB__AGX16292
augaaggccaucauugugcugcucauggucguuaccagcaacgcugacagaauaugcacaggcaucacuuccucuaauucaccccacgugguaaaaacggcaacccagggggaggugaacgucacaggagugauuccucuuacuaccacaccaaccaagaguuacuucgccaaucugaaagguacuaggacacggggcaaguuguguccggauugcuuaaacuguaccgaccuggauguugcgcuagggcgccccaugugcgugggaacgacuccuagcgcuaaagccuccauccuccaugaaguccgaccagugaccucuggcuguuuucccauuaugcacgaccguacaaagaucagacaacuggcaaaucuucugagggguuaugagaacauacgguugucgaaucagaacguaaucgaugccgaaaaggcuccugggggaccauaccgccucggcacuucaggcagcugccccaaugcaaccaguaaauccggguucuuugccacaauggcuugggccguuccuaaggacaacaauaaaaacgcgaccaauccacugacgguggaggucccguauauuuguacugaaggagaggaucagaucacagugugggguuuccauucugacaacaagacccagaugaaaaaucuguacggcgauagcaacccccaaaaguuuacuuccucagcaaacggggugacaacccacuaugucagucagauuggaggcuucccugaccagacggaggauggugggcucccacagagcggaagaaucguuguggacuacaugaugcaaaagcccggcaaaaccggcacaauaguauaucagcgcgggguguuacugccucagaaggucuggugcgccucuggacgguccaaagugauuaagggugcccuuccauugaucggcgaagcugauugucugcaugagaaauacgggggacuaaauaagucaaaacccuacuauacuggcgaacacgcaaaggcuauugguaacugcccgaucuggguuaagaccccucucaaacuggccaaugggacaaaguacaggcccccagcgaaacuucugaaggagcgaggcuuuuucggagccaucgcaggcuuuuuggaagggggaugggaagguaugauugcuggcuggcacggguauacuagccauggagcccacggcguggcugucgccgcagaccucaaaaguacccaggaggccauaaacaagaucacaaagaaucugaacucuuuauccgaacuggaggugaaaaaucuccaaagacuuagcggugcuauggacgaacugcauaacgagauuuuggagcuagaugaaaagguagacgaucugagggcggacaccaucucgucucagauagagcucgcaguucugcuuuccaaugaagggauuaucaacucagaggaugaacaccuguuggcccucgagcggaaacugaagaaaauguuaggcccuagugcuguggacaucggaaauggcuguuucgagacuaagcacaagugcaaccagacgugccuggaucguauugccgcagggacauuuaaugccggagaguucagccuacccaccuuugacucccucaacaucacugcugccucucugaaugaugacggucuugauaaccauaccauuuugcuguacuauagcacagcagcgucaagucucgcugucacccugaugcuugccauauucaucguguacauggucucccgcgacaacgugagcuguucuauuugccuguga

SEQ ID NO: 155089 - RNA, 1758 nt, Artificial Sequence; identical to SEQ ID NO: 154562
  derived and/or modified CDS sequence (opt3) from hemagglutinin__InfluenzaB__AGX16303

SEQ ID NO: 155090 - RNA, 1755 nt, Artificial Sequence; identical to SEQ ID NO: 154474
  derived and/or modified CDS sequence (opt3) from hemagglutinin__InfluenzaB__AGX16314

SEQ ID NO: 155091 - RNA, 1755 nt, Artificial Sequence; identical to SEQ ID NO: 154474
  derived and/or modified CDS sequence (opt3) from hemagglutinin__InfluenzaB__AGX16325

SEQ ID NO: 155092 - RNA, 1755 nt, Artificial Sequence; identical to SEQ ID NO: 154779
  derived and/or modified CDS sequence (opt3) from hemagglutinin__InfluenzaB__AGX16336

SEQ ID NO: 155093 - RNA, 1755 nt, Artificial Sequence; identical to SEQ ID NO: 154779
  derived and/or modified CDS sequence (opt3) from hemagglutinin__InfluenzaB__AGX16347

SEQ ID NO: 155094 - RNA, 1755 nt, Artificial Sequence; identical to SEQ ID NO: 154779
  derived and/or modified CDS sequence (opt3) from hemagglutinin__InfluenzaB__AGX16358

SEQ ID NO: 155095 - RNA, 1755 nt, Artificial Sequence
  derived and/or modified CDS sequence (opt3) from hemagglutinin__InfluenzaB__AGX16369
augaaggccaucauugugcugcucauggucguuaccagcaacgcugacagaauaugcacaggcaucacuuccucuaauucaccccacgugguaaaaacggcaacccagggggaggugaacgucacaggagugauuccucuuacuaccacaccaaccaagaguuacuucgccaaucugaaagguacuaggacacggggcaaguuguguccggauugcuuaaacuguaccgaccuggauguugcgcuagggcgccccaugugcgugggaacgacuccuagcgcuaaagccuccauccuccaugaaguccgaccagugaccucuggcuguuuucccauuaugcacgaccguacaaagaucagacaacugccuaaucuucugagggguuaugagaacauacgguugucgacucagaauguaaucgaugcagaaaaggccccagggggacccuaccgccucggcaccucaggcagcugcccuaacgcuacaaguaaauccggguucuuugcaaccauggccugggcuguuccaaaggacaauaacaaaaaugccacgaacccgcugacuguggagguccccuauauuuguacagaaggagaggaucagaucaccgugugggguuuccauucugacaauaagacucagaugaaaaaccuguacggcgauagcaauccucaaaaguuuacauccucagcgaacggggugaccacgcacuaugucagucagauuggcagcuucccagaccagaccgaggauggaggucucccccagucugggagaaucguuguggacuacaugaugcaaaagccuggaaaaacaggcacuauaguauaucagaggggcauuuuacugccacagaagguguggugcgcauccgggcggucaaaagucaucaagggaagccuucccuugauuggugaagccgauugucugcaugagaaauacggcgggcuaaacaagaguaaaccguacuauaccggagaacacgcuaaggccaucggcaauugcccuaucugggugaagacaccccucaaacuggcaaacgguacuaaguaccgcccuccagcuaaacuucugaaggagcgaggguuuuucggcgccauugcgggauuuuuggagggcgggugggaaggaaugauagccgguuggcacggcuauaccucucauggggcacacggaguugcuguggccgcugaccucaaauccacacaggaggccaucaauaagauuaccaagaaccugaauagcuuaucggaacuggaggucaaaaaccuccaaagacuuucuggcgcaauggacgaacugcauaaugagaucuuggagcuagaugaaaagguggacgaucugagggccgacacuauauccucacagauugagcucgcuguacugcuuaguaacgaagguaucaucaauagcgaggaugaacaccuguuggcgcucgagcggaaacugaagaaaauguuagggcccuccgcaguugagauuggcaacggauguuucgaaacgaagcacaagugcaaucagacaugccuggaccguaucgccgcuggcaccuuuaacgccggggaguucucucuaccaacuuuugauagccucaauauuaccgcagccucacugaacgacgauggacuugacaaucauacaauauugcuguacuauaguaccgcugccuccagccucgcagugacucugaugcuugcgaucuucauugucuacauggugucucgcgauaacgucucauguaguaucugccuguga

SEQ ID NO: 155096 - RNA, 1755 nt, Artificial Sequence
  derived and/or modified CDS sequence (opt3) from hemagglutinin__InfluenzaB__AGX16380
augaaggccaucgugguccugcucaugguugugaccagcaacgcugacagaauuugcacaggcauaacuuccucuaauucaccccacguagugaaaacggcaacccagggggaggucaacgugacaggaguuaucccucuuacuaccacaccaaccaagaguuacuucgccaaucugaaagguacuaggacacggggcaaguuguguccggauugcuuaaacuguaccgaccuggauguggcgcuagggcgccccaugugcgucggagcuacgccuagcgccaaagcauccauucuccaugaagugcgaccaguaacuucuggcuguuuucccaugaugcacgaccguaccaagaucagacaacugccuaaucuucugagggguuaugagaacauucgguugucgacacagaauguuaucgaugccgaaaaggcuccagggggacccuaccgccucggcacuucaggcagcugcccuaacgcaaccaguaaauccggguucuuugccacaauggcuugggccgugccaaaggacaauaacaaaaaugcgaccaacccgcugacggucgaggugcccuauauauguacugaaggagaggaucagaucacagugugggguuuccauucugacaauaagacccagaugaaaaaccuguacggcgauagcaauccucaaaaguuuacuuccucagcaaacggggucacaacccacuauguuagucagauuggcagcuucccagaccagacggaggauggaggucucccccagucugggagaaucgugguagacuacaugaugcaaaagccuggaaaaaccggcacaauuguguaucagaggggcgucuuacugccacagaagguguggugcgccuccgggcggucaaaaguuaucaagggaagccuucccuugauaggugaagcugauugucugcaugagaaauacggcgggcuaaacaagaguaaaccguacuauacuggagaacacgccaaggcaauuggcaauugcccuaucugggugaagaccccucucaaacuggcuaacgguacaaaguaccgcccacccgccaaacuucugaaggagcgaggguuuuucggcgcgauugccggauuuuuggagggcgggugggaaggaaugaucgcagguuggcacggcuauacuucucauggggcucacggagucgccguggcugccgaccucaaauccacccaggaggcaaucaauaagauuacaaagaaccugaauagcuuaucggaacuggagguuaaaaaccuccaaagacuuucuggcgccauggacgaacugcauaaugagauauuggagcuagaugaaaagguagacgaucugagggcugacaccaucuccucacagauugagcucgcggugcugcuuaguaacgaagguaucauaaauagcgaggaugaacaccuguuggcacucgagcggaaacugaagaaaauguuagggcccuccgccgucgagauuggcaacggauguuucgaaacuaagcacaagugcaaucagacgugccuggaccguaucgcugccggcacauuuaacgcaggggaguucucucuaccaaccuuugauagccucaauaucacugccgcuucacugaacgacgauggacuugacaaucauaccauuuugcuguacuauaguacagccgcauccagccucgcggugacccugaugcuugcuaucuucauugucuacauggugucucgcgauaacguuucauguaguauaugccuguga

SEQ ID NO: 155097 - RNA, 1755 nt, Artificial Sequence; identical to SEQ ID NO: 154615
  derived and/or modified CDS sequence (opt3) from hemagglutinin__InfluenzaB__AGX16391

SEQ ID NO: 155098 - RNA, 1755 nt, Artificial Sequence
  derived and/or modified CDS sequence (opt3) from hemagglutinin__InfluenzaB__AGX16402
augaaggccaucauugugcugcucauggucguuaccagcaacgcugacagaauaugcacaggcaucacuuccucuaauucaccccacgugguaaaaacggcaacccagggggaagugaacgucacaggagugauuccucuuacuaccacaccaaccaagaguuacuucgccaaucugaaagguacuaggacacggggcaaguuguguccggauugcuuaaacuguaccgaccuggauguugcgcuagggcgccccaugugcgugggaacgacuccuagcgcuaaagccuccauccuccaugaaguccgaccagugaccucuggcuguuuucccauuaugcacgaccguacaaagaucagacaacugccuaaucuucugagggguuaugagaacauacgguugucgacucagaauguaaucgaugcagaaaaggccccagggggacccuaccgccucggcaccucaggcagcugcccuaacgcuacaaguaaaauuggguucuuugcaaccauggccugggcuguuccaaaggacaauuauaaaaacgccacgaauccgcugacuguggagguccccuacaucuguacagaaggagaggaucagauuaccgugugggguuuccauuccgacaacaagccucagaugaaaaaucuguauggcgauucuaacccacaaaaguuuacuagcuccgcgaauggggugacaacccacuacgucucacagaucggagacuuccccgaucagacggaggacggcggucucccucagagugggagaauaguuguggauuauaugaugcaaaagccaggaaaaaccggcacaauuguauaccagaggggcguguuacugccccagaaggucuggugcgcaagcgggcggucuaaagugaucaagggaucccuuccguugauuggugaagccgacugucugcaugagaaauacggcgggcuaaacaagucaaaaccuuauuacacuggagaacacgcuaaggccaucggcaacugccccaucuggguuaagaccccacucaaacuggcaaaugguacaaaguaucgcccucccgcuaaacuucugaaggagcgaggguuuuucggcgccauugcgggauuuuuggagggcgggugggaaggaaugauagccgguuggcacggcuacacuagccauggggcacacggaguggcugucgccgcugaccucaaaaguacccaggaggccaucaacaagauuacaaagaaucugaacucuuuauccgaacuggaggugaaaaaucuccaaagacuuagcggcgcaauggaugaacugcauaacgagaucuuggagcuagacgaaaagguagaugaccugagggccgauaccauaucgucucagauugagcucgcuguucugcuuuccaaugaagguaucaucaacucagaggacgaacaccuguuggcgcucgagcggaaacugaagaaaauguuagggccaagugcaguggauauuggcaauggauguuucgagacuaagcacaagugcaaccagacgugccuggaccguaucgccgcuggcacauuuaaugccggggaguucagccuacccaccuuugauucccucaacauuacugcagccucucugaaugacgauggacuugacaaccauaccauauugcuguauuacagcacagcugccucaagucucgcagucacccugaugcuugcgaucuucauuguguauauggucucccgcgacaaugugagcuguucuaucugccuguga

SEQ ID NO: 155099 - RNA, 1755 nt, Artificial Sequence; identical to SEQ ID NO: 154868
  derived and/or modified CDS sequence (opt3) from hemagglutinin__InfluenzaB__AGX16413

SEQ ID NO: 155100 - RNA, 1755 nt, Artificial Sequence; identical to SEQ ID NO: 154868
  derived and/or modified CDS sequence (opt3) from hemagglutinin__InfluenzaB__AGX16423

SEQ ID NO: 155101 - RNA, 1755 nt, Artificial Sequence; identical to SEQ ID NO: 154868
  derived and/or modified CDS sequence (opt3) from hemagglutinin__InfluenzaB__AGX16434

SEQ ID NO: 155102 - RNA, 1755 nt, Artificial Sequence; identical to SEQ ID NO: 154868
  derived and/or modified CDS sequence (opt3) from hemagglutinin__InfluenzaB__AGX16445

SEQ ID NO: 155103 - RNA, 1755 nt, Artificial Sequence; identical to SEQ ID NO: 154868
  derived and/or modified CDS sequence (opt3) from hemagglutinin__InfluenzaB__AGX16456

SEQ ID NO: 155104 - RNA, 1755 nt, Artificial Sequence
  derived and/or modified CDS sequence (opt3) from hemagglutinin__InfluenzaB__AGX16467
augaaggccaucauugugcugcucauggucguuaccagcaacgcugacagaauaugcacaggcaucacuuccucuaauucaccccacgugguaaaaacggcaacccagggggaggugaacgucacaggagugauuccucuuacuaccacaccaaccaagaguuacuucgccaaucugaaagguacuaggacacggggcaaguuguguccggauugcuuaaacuguaccgaccuggauguugcgcuagggcgccccaugugcgugggaacgacuccuagcgcuaaagccuccauccuccaugaaguccgaccagugaccucuggcuguuuucccauuaugcacgaccguacaaagaucagacaacugccuaaucuucugagggguuaugagaacauacgguugucgacucagaauguaaucgaugcagaaaaggccccagggggacccuaccgccucggcaccucaggcagcugcccuaacgcuacaaguaaauccggguucuuugcaaccauggccugggcuguuccaaaggacaauaacaaaaaugccacgaacccgcugacuguggagguccccuauauuuguacagaaggagaggaucagaucaccgugugggguuuccauucugacaauaagacucagaugaaaaaccuguacggcgauagcaauccucaaaaguuuacauccucagcgaacggggugaccacgcacuaugucagucagauuggcagcuucccagaccagaccgaggauggaggucucccccagucugggagaaucguuguggacuacaugaugcaaaagccuggaaaaacaggcacuauaguauaucagaggggcguguuacugccacagcgggucuggugcgcauccgggcgcucaaaggugauuaaaggaagccuucccuugaucggugaagccgauugucugcaugagaaguacggcgggcuaaacaaaaguaagccguacuauaccggagaacacgcuaaagccauuggcaauugcccuaucuggguuaagacaccccucaagcuggcaaacgguacuaaauaccgaccuccagcuaaacuucugaaggagagaggguuuuucggcgccaucgcgggauuuuuggagggcgggugggaaggaaugauugccgguuggcacggcuauaccucucauggggcacacggaguggcugucgccgcugaccucaaguccacacaggaggccauaaauaaaaucaccaagaaccugaauagcuuaucggaacuggaggugaagaaccuccaaaggcuuucuggcgcaauggacgaacugcauaaugagauuuuggagcuagaugaaaaaguagacgaucugcgggccgacacuaucuccucacagauagagcucgcuguucugcuuaguaacgaagguauuaucaauagcgaggaugaacaccuguuggcgcucgagcguaagcugaaaaagauguuagggcccuccgcaguggagaucggcaacggauguuucgaaacgaaacacaagugcaaucagacaugccuggaccgcauugccgcuggcaccuuuaacgccggggaguucucucuaccaacuuuugauagccucaauaucaccgcagccucacugaacgacgauggacuugacaaucauacaauuuugcuguacuauaguaccgcugccuccagccucgcagucacucugaugcuugcgauauucaucguguacauggucucuagagauaacgugucauguaguauuugccuguga

SEQ ID NO: 155105 - RNA, 1755 nt, Artificial Sequence; identical to SEQ ID NO: 154868
  derived and/or modified CDS sequence (opt3) from hemagglutinin__InfluenzaB__AGX16478

SEQ ID NO: 155106 - RNA, 1755 nt, Artificial Sequence; identical to SEQ ID NO: 154615
  derived and/or modified CDS sequence (opt3) from hemagglutinin__InfluenzaB__AGX16489

SEQ ID NO: 155107 - RNA, 1758 nt, Artificial Sequence; identical to SEQ ID NO: 155027
  derived and/or modified CDS sequence (opt3) from hemagglutinin__InfluenzaB__AGX16500

SEQ ID NO: 155108 - RNA, 1758 nt, Artificial Sequence; identical to SEQ ID NO: 155027
  derived and/or modified CDS sequence (opt3) from hemagglutinin__InfluenzaB__AGX16511

SEQ ID NO: 155109 - RNA, 1758 nt, Artificial Sequence; identical to SEQ ID NO: 155027
  derived and/or modified CDS sequence (opt3) from hemagglutinin__InfluenzaB__AGX16522

SEQ ID NO: 155110 - RNA, 1758 nt, Artificial Sequence
  derived and/or modified CDS sequence (opt3) from hemagglutinin__InfluenzaB__AGX16533
augaaggccaucauugugcugcucauggucguuaccagcaacgcugacagaauaugcacaggcaucacuuccucuaauucaccccacgugguaaaaacggcaacccagggggaagugaacgucacaggagugauuccucuuacuaccacaccaaccaagagucauuucgccaaucugaaagguacuaagacaaggggcaaauuguguccgaagugcuuaaacuguaccgaucuggacguugcgcuagggcggcccaagugcacgggaaauaucccuagcgcuaaaguguccauucuccacgaaguccgcccagugacuucuggcuguuuucccaucaugcaugaucgaaccaagauacgucaacugccuaaccuucugagagguuacgagcacaucagguugucgacacauaauguaauuaacgccgaaaaagcaccagggggacccuauaagaucggcacuucaggcagcugcccuaauguuaccaacgggaauggauucuuugccacaauggcuugggcagugccaaagaacgacaauaacaagaccgccacgaauagucucacuauugaggucccguacaucuguacagaaggugaggaucagauaaccguguggggcuuccacuccgacaaggagacucagauggcuaaacuguauggggauucuaagccccagaaauuuacaagcuccgccaacggagugaccacgcacuacgucucacaaauuggcgguuucccuaaccagaccgaagacgggggacugccacagaguggccggaucguuguggauuauaugguacagaaaagcggcaaaacagggacuauuaccuaccaacgcggaauccucuuaccccagaagguguggugcgcgucugguagauccaaagucaucaagggcucacugccucuuauuggggaggcagacuguuugcaugaaaaguauggaggccugaauaaaagcaagccauacuacacaggugagcacgccaaagcuauagggaacugccccaucugggugaagacuccgcuaaaacucgccaauggcaccaaguauaggccucccgcaaagcugcuuaaagagcggggauuuuucggcgcuauugccggguuucuggaaggagguugggagggcaugaucgcgggguggcauggauacacaagucacggcgcccacgguguugcaguggcugccgauuugaagucuacccaggaagcuauaaacaaaauuacuaagaaucucaacucccugagcgaguuagaagucaaaaaucugcagcgccucucgggggccauggacgagcuucauaacgagauccuggaauuggaugagaagguggacgaccuacgagcagauacgaucucuucccaaauugaacuggccguacuccugucaaaugagggcaucauuaacagugaagacgagcaccuucuggcuuuggagagaaagcucaaaaagaugcugggaccaagcgcgguugaaauaggcaauggguguuucgagacaaaacauaagugcaaccagaccugcuuagauaggaucgcagccggaacuuuugacgcuggugaguucucccugccuaccuuugauucucuaaauauuacagccgcaagccucaacgacgauggccuggacaaucacaccauccuuuuguauuacucaacugccgcuaguucccuggccgugacacucaugaucgcaauuuucgucguguauauggucagccgggauaacgugucuuguucaauaugccuguga

SEQ ID NO: 155111 - RNA, 1758 nt, Artificial Sequence
  derived and/or modified CDS sequence (opt3) from hemagglutinin__InfluenzaB__AGX16555
augaaggccaucauugugcugcucauggucguuaccagcaacgcugacagaauaugcacaggcaucacuuccucuaauucaccccacgugguaaaaacggcaacccagggggaagugaacgucacaggagugauuccucuuacuaccacaccaaccaagagucauuucgccaaucugaaagguacuaagacaaggggcaaauuguguccgaagugcuuaaacuguaccgaucuggacguugcgcuagggcggcccaagugcacgggaaauaucccuagcgcuaaaguguccauucuccacgaaguccgcccagugacuucuggcuguuuucccaucaugcaugaucgaaccaagauacgucaacugccuaaccuucugagagguuacgagcacaucagguugucgacacauaauguaauuaacgccgaaaaagcaccagggggacccuauaagaucggcacuucaggcagcugcccuaauguuaccaacgggaauggauucuuugccacaauggcuugggcagugccgaaaaacgacaauaacaagaccgccacgaauagucucacuauugaggucccauacaucuguacagaaggugaggaucagauaaccguguggggcuuccacuccgacaacgaggcucagauggccaagcuguauggggauucuaaaccccagaaguuuacuagcuccgcgaacggagugacaacccacuacgucucacaaauuggcgguuucccuaaucagacggaagacgggggacugccacagaguggccggaucguuguggauuauaugguacagaaaagcggcaagaccgggacaauuacuuaccaacgcggaauccucuuaccccagaaaguguggugcgcaucugguagauccaaggucaucaaaggcucacugccucuuauuggggaggccgacuguuugcaugaaaaguauggaggccugaacaagagcaaaccauacuacaccggugagcacgcuaaggccauagggaauugccccaucugggugaaaacaccgcuaaagcucgcaaacggcacuaaauauaggccucccgcuaagcugcuuaaggagcggggauuuuucggcgccauugcgggguuucuggaaggagguugggagggcaugaucgccggguggcauggauacaccagucacggcgcacacgguguugcuguggccgcugauuugaaaucuacacaggaagccauaaauaagauuaccaaaaaccucaauucccugagcgaguuagaagucaagaaccugcagcgccucucgggggcaauggacgagcuucauaaugagauccuggaauuggaugagaaaguggacgaccuacgagccgauacuaucucuucccaaauugaacuggcuguacuccugucaaacgagggcaucauuaauagugaagacgagcaccuucuggcguuggagagaaagcucaagaaaaugcugggaccaagcgcaguugaaauaggcaacggguguuucgagacgaagcauaaaugcaaucagacaugcuuagauaggaucgccgcuggaaccuuugacgccggugaguucucccugccuacuuuugauucucuaaacauuaccgcagccagccucaaugacgauggccuggacaaccacacaauccuuuuguauuacucaaccgcugccaguucccuggcagugacucucaugaucgcgauuuucgucguguauauggucagccgggauaacgugucuuguucaauaugccuguga

SEQ ID NO: 155112 - RNA, 1758 nt, Artificial Sequence
  derived and/or modified CDS sequence (opt3) from hemagglutinin__InfluenzaB__AGX16566
augaaggccaucauugugcugcucauggucguuaccagcaacgcugacagaauaugcacaggcaucacuuccucuaauucaccccacgugguaaaaacggcaacccagggggaagugaacgucacaggagugauuccucuuacuaccacaccaaccaagagucauuucgccaaucugaaagguacuaagacaaggggcaaauuguguccgaagugcuuaaacuguaccgaucuggacguugcgcuagggcggcccaagugcacgggaaauaucccuagcgcuaaaguguccauucuccacgaaguccgcccagugacuucuggcuguuuucccaucaugcaugaucgaaccaagauacgucaacugccuaaccuucugagagguuacgagcacaucagguugucgacacauaauguaauuaacgccgaaaaagcaccagggggacccuauaagaucggcacuucaggcagcugcccuaauguuaccaacgggaauggauucuuugccacaauggcuugggcagugccgaaaaacgacaauaacaagaccgccacgaauagucucacuauugaggucccauacaucuguacagaaggugaggaucagauaaccguguggggcuuccacuccgacaacgagauucagauggcuaagcuguauggggauucuaaaccccagaaguuuacuagcuccgccaacggagugacaacccacuacgucucacaaaucggcgguuucccuaaucagacggaagacgggggacugccacagaguggccggauuguuguggauuauaugguacagaaaagcggcaagaccgggacaaucacuuaccaacgcggaauccucuuaccccagaaaguguggugcgcgucugguagauccaaggucauuaaaggcucacugccucuuauaggggaggcagacuguuugcaugaaaaguauggaggccugaacaagagcaaaccauacuacaccggugagcacgccaaggcuaucgggaauugccccauuugggugaaaacaccgcuaaagcucgccaacggcacuaaauauaggccucccgcaaagcugcuuaaggagcggggauuuuucggcgcuaucgccggguuucuggaaggagguugggagggcaugauagcgggguggcauggauacaccagucacggcgcccacgguguugcaguggcugccgauuugaaaucuacacaggaagcuauuaauaagaucaccaaaaaccucaauucccugagcgaguuagaagucaagaaccugcagcgccucucgggggccauggacgagcuucauaaugagauccuggaauuggaugagaaaguggacgaccuacgagcagauacuauuucuucccaaaucgaacuggccguacuccugucaaacgagggcauuauaaauagugaagacgagcaccuucuggcuuuggagagaaagcucaagaaaaugcugggaccaagcgcgguugaaaucggcaacggguguuucgagacgaagcauaaaugcaaucagacaugcuuagauaggauugcagccggaaccuuugacgcuggugaguucucccugccuacuuuugauucucuaaacaucaccgccgcaagccucaaugacgauggccuggacaaccacacaauccuuuuguauuacucaaccgccgcuaguucccuggccgugacucucaugauugcaauauucgucguguauauggucagccgggauaacgugucuuguucaaucugccuguga

SEQ ID NO: 155113 - RNA, 1758 nt, Artificial Sequence; identical to SEQ ID NO: 155027
  derived and/or modified CDS sequence (opt3) from hemagglutinin__InfluenzaB__AGX16577

SEQ ID NO: 155114 - RNA, 1758 nt, Artificial Sequence
  derived and/or modified CDS sequence (opt3) from hemagglutinin__InfluenzaB__AGX16588
augaaggccaucauugugcugcucauggucguuaccagcaacgcugacagaauaugcacaggcaucacuuccucuaauucaccccacgugguaaaaacggcaacccagggggaagugaacgucacaggagugauuccucuuacuaccacaccaaccaagagucauuucgccaaucugaaagguacuaagacaaggggcaaauuguguccgaagugcuuaaacuguaccgaucuggacguugcgcuagggcggcccaagugcacgggaaauaucccuagcgcuaaaguguccauucuccacgaaguccgcccagugacuucuggcuguuuucccaucaugcaugaucgaaccaagauacgucaacugccuaaccuucugagagguuacgagcacaucagguugucgacacauaauguaauuaacgccgaaaaagcaccagggggacccuauaagaucggcacuucaggcagcugcccuaauguuaccaacgggaauggauucuuugccacaauggcuugggcagugccgaaaaacgacaauaacaagaccgccacgaauagucucacuauugaggucccauacaucuguacagaaggugaggaucagauaaccguguggggcuuccacuccgacaacgagauucagauggcuaagcuguauggggauucuaaaccccagaaguuuacuagcuccgccaacggagugacaacccacuacgucucacaaaucggcgguuucccuaaucagacggaagacgggggacugccacagaguggccggauuguuguggauuauaugguacagaaaagcggcaagaccgggacaaucacuuaccaacgcggaauccucuuaccccagaaaguguggugcgcgucugguagauccaaggucauuaaaggcucacugccucuuauaggggaggcagacuguuugcaugaaaaguauggaggccugaacaagagcaaaccauacuacaccggugagcacgccaaggcuaucgggaauugccccauuugggugaaaacaccgcuaaagcucgccaacggcacuaaauauaggccucccgcaaagcugcuuaaggagcggggauuuuucggcgcuaucgccggguuucuggaaggagguugggagggcaugauagcgggguggcauggauacaccagucacggcgcccacgguguugcaguggcugccgauuugaaaucuacacaggaagcuauuaauaagaucaccaaaaaccucaauucccugagcgaguuagaagucaagaaccugcagcgccucucgggggccauggacgagcuucauaaugagauccuggaauuggaugagaaaguggacgaccuacgagcagauacuauuucuucccaaaucgaacuggccguacuccugucaaacgagggcauuauaaauagugaagacgagcaccuucuggcuuuggagagaaagcucaagaaaaugcugggaccaagcgcgaucgaaauuggcaacggguguuucgagacgaagcauaaaugcaaucagacaugcuuagauaggaucgcagccggaaccuuugacgcuggugaguucucccugccuacuuuugauucucuaaacaucaccgccgcaagccucaaugacgauggccuggacaaccacacaauucuuuuguauuacucaaccgccgcuaguucccuggccguuacucucaugauagcaaucuucguggucuauauggugagccgggauaacgucucuuguucaauuugccuguga

SEQ ID NO: 155115 - RNA, 1758 nt, Artificial Sequence; identical to SEQ ID NO: 155027
  derived and/or modified CDS sequence (opt3) from hemagglutinin__InfluenzaB__AGX16599

SEQ ID NO: 155116 - RNA, 1758 nt, Artificial Sequence; identical to SEQ ID NO: 155110
  derived and/or modified CDS sequence (opt3) from hemagglutinin__InfluenzaB__AGX16610

SEQ ID NO: 155117 - RNA, 1758 nt, Artificial Sequence; identical to SEQ ID NO: 155027
  derived and/or modified CDS sequence (opt3) from hemagglutinin__InfluenzaB__AGX16621

SEQ ID NO: 155118 - RNA, 1758 nt, Artificial Sequence
  derived and/or modified CDS sequence (opt3) from hemagglutinin__InfluenzaB__AGX16654
augaaggccaucauugugcugcucauggucguuaccagcaacgcugacagaauaugcacaggcaucacuuccucuaauucaccccacgugguaaaaacggcaacccagggggaagugaacgucacaggagugauuccucuuacuaccacaccaaccaagagucauuucgccaaucugaaagguacuaagacaaggggcaaauuguguccgaagugcuuaaacuguaccgaucuggacguugcgcuagggcggcccaagugcacgggaaauaucccuagcgcuaaaguguccauucuccacgaaguccgcccagugacuucuggcuguuuucccaucaugcaugaucgaaccaagauacgucaacugccuaaccuucugagagguuacgagcacaucagguugucgacacauaauguaauuaacgccgaaaaagcaccagggggacccuauaagaucggcacuucaggcagcugcccuaauguuaccaacgggaauggauucuuugccacaauggcuugggcagugccgaaaaacgacaauaacaagaccgccauuaauagucucacgaucgaggucccauacauauguacugaaggugaggaucagauuacaguguggggcuuccacuccgacaacgagacccagauggcuaagcuguauggggauucuaaaccccagaaguuuacuagcuccgccaacggagugacaacccacuacgucucacaaaucggcgguuucccuaaucagacggaagacgggggacugccacagaguggccggauuguuguggauuauaugguacagaaaagcggcaagaccgggacaaucacuuaccaacgcggaauccucuuaccccagaaaguguggugcgcgucugguagauccaaggucauuaaaggcucacugccucuuauaggggaggcagacuguuugcaugaaaaguauggaggccugaacaagagcaaaccauacuacaccggugagcacgccaaggcuaucgggaauugccccauuugggugaaaacaccgcuaaagcucgccaacggcacuaaauauaggccucccgcaaagcugcuuaaggagcggggauuuuucggcgcuaucgccggguuucuggaaggagguugggagggcaugauagcgggguggcauggauacaccagucacggcgcccacgguguugcaguggcugccgauuugaaaucuacacaggaagcuauuaauaagaucaccaaaaaccucaauucccugagcgaguuagaagucaagaaccugcagcgccucucgggggccauggacgagcuucauaaugagauccuggaauuggaugagaaaguggacgaccuacgagcagauacuauuucuucccaaaucgaacuggccguacuccugucaaacgagggcauuauaaauagugaagacgagcaccuucuggcuuuggagagaaagcucaagaaaaugcugggaccaagcgcgaucgaaauuggcaacggguguuucgagacgaagcauaaaugcaaucagacaugcuuagauaggaucgcagccggaaccuuugacgcuggugaguucucccugccuacuuuugauucucuaaacaucaccgccgcaagccucaaugacgauggccuggacaaccacacaauucuuuuguauuacucaaccgccgcuaguucccuggccguuacucucaugauagcaaucuucguggucuauauggugagccgggauaacgucucuuguucaauuugccuguga

SEQ ID NO: 155119 - RNA, 1758 nt, Artificial Sequence; identical to SEQ ID NO: 155027
  derived and/or modified CDS sequence (opt3) from hemagglutinin__InfluenzaB__AGX16665

SEQ ID NO: 155120 - RNA, 1758 nt, Artificial Sequence; identical to SEQ ID NO: 155027
  derived and/or modified CDS sequence (opt3) from hemagglutinin__InfluenzaB__AGX16676

SEQ ID NO: 155121 - RNA, 1758 nt, Artificial Sequence; identical to SEQ ID NO: 155027
  derived and/or modified CDS sequence (opt3) from hemagglutinin__InfluenzaB__AGX16687

SEQ ID NO: 155122 - RNA, 1758 nt, Artificial Sequence; identical to SEQ ID NO: 155027
  derived and/or modified CDS sequence (opt3) from hemagglutinin__InfluenzaB__AGX16698

SEQ ID NO: 155123 - RNA, 1758 nt, Artificial Sequence
  derived and/or modified CDS sequence (opt3) from hemagglutinin__InfluenzaB__AGX16709
augaaggccaucauugugcugcucauggucguuaccagcaacgcugacagaauaugcacaggcaucacuuccucuaauucaccccacgugguaaaaacggcaacccagggggaggugaacgucacaggagugauuccucuuacuaccacaccaaccaagagucauuucgccaaucugaaagguacuaagacaaggggcaaauuguguccgaagugcuuaaacuguaccgaucuggacguugcgcuagggcggcccaagugcacggaaaauaucccuagcgcuaaaguguccauucuccacgagguccgcccagugacuucuggauguuuucccaucaugcaugaucgaaccaagauacgucaacugccuaaccuucugagaggcuacgaacacaucagguugucgacacauaauguaauuaacgccgagaaagcaccaggugggcccuauaagaucggaacuucaggcagcugcccuaauguuaccaacggcaauggguucuuugccacaauggcuugggcagugccgaaaaacgacaauaacaagaccgccacgaauagucucacuauugaagucccauacaucuguacagagggagaggaucagauaaccgugugggguuuccacuccgacaacgaaacucagauggcuaagcuguauggcgauucuaaaccccagaaguuuacaagcuccgccaacggggugaccacgcacuacgucucacaaauuggaggcuucccuaaucagaccgaggacggugggcugccacagaguggacggaucguuguggauuauaugguacagaaaagcggcaagacaggcacuauuaccuaccaacgcgggauccucuuaccccagaaaguguggugcgcgucuggaagauccaaggucaucaaagguucacugccucuuauuggcgaagcagacuguuugcaugagaaguaugggggacugaacaagagcaaaccauacuacacaggcgagcacgccaaggcuauagguaauugccccaucugggugaaaacuccgcuaaagcucgccaacgggaccaaauauaggccucccgcaaagcugcuuaaggaacggggcuuuuucggagcuauugccggcuuucuggaagggggaugggaggguaugaucgcgggcuggcauggguacacaagucacggagcccacggcguugcaguggcugccgauuugaaaucuacccaggaggcuauaaauaagauuacuaaaaaccucaauucccugagcgaauuagaggucaagaaccugcagcgccucucgggugccauggacgagcuucauaaugaaauccuggaguuggaugaaaaaguggacgaccuacgagcagauacgaucucuucccaaauugagcuggccguacuccugucaaacgaagggaucauuaauagugaggacgagcaccuucuggcuuuggaaagaaagcucaagaaaaugcugggcccaagcgcgguugagauaggaaacggcuguuucgaaacaaagcauaaaugcaaucagaccugcuuagauaggaucgcagccgggacuuuugacgcuggagaguucucccugccuaccuuugauucucuaaacauuacagccgcaagccucaaugacgauggucuggacaaccacaccauccuuuuguauuacucaacugccgcuaguucccuggccgugacacucaugaucgcaauuuucgucguguauauggucagccgggauaacgugucuuguucaauaugccuguga

SEQ ID NO: 155124 - RNA, 1758 nt, Artificial Sequence; identical to SEQ ID NO: 155027
  derived and/or modified CDS sequence (opt3) from hemagglutinin__InfluenzaB__AGX16720

SEQ ID NO: 155125 - RNA, 1758 nt, Artificial Sequence; identical to SEQ ID NO: 155027
  derived and/or modified CDS sequence (opt3) from hemagglutinin__InfluenzaB__AGX16731

SEQ ID NO: 155126 - RNA, 1758 nt, Artificial Sequence
  derived and/or modified CDS sequence (opt3) from hemagglutinin__InfluenzaB__AGX16742
augaaggccaucauugugcugcucauggucguuaccagcaacgcugacagaauaugcacaggcaucacuuccucuaauucaccccacgugguaaaaacggcaacccagggggaagugaacgucacaggagugauuccucuuacuaccacaccaaccaagagucauuucgccaaucugaaagguacuaagacaaggggcaaauuguguccgaagugcuuaaacuguaccgaucuggacguugcgcuagggcggcccaagugcacgggaaauaucccuagcgcuaaaguguccauuauccacgaaguccgcccagugacuucuggcuguuuucccauaaugcaugaucgaaccaagauccgucaacucccuaaccugcuuagagguuacgagcacauuaggcugucgacacauaauguaaucaacgccgaaaaagcaccagggggacccuauaagauuggcacuucaggcagcugcccuaauguuaccaacgggaauggauucuuugccacaauggcuugggcagugccgaaaaacgacaauaacaagaccgccacgaauaguuugacuaucgaggucccauacauauguacagaaggugaggaucagauuaccguguggggcuuccacuccgacaacgagacucagauggcuaagcucuauggggauucuaaaccccagaaguuuacaagcuccgccaacggagugaccacgcacuacgucucacaaaucggcgguuucccuaaucagaccgaagacgggggacugccacagaguggccggauuguuguggauuauaugguacagaaaagcggcaagacagggacuaucaccuaccaacgcggaauccugcucccccagaaaguguggugcgcgucugguagauccaaggucauuaaaggcucauuaccucugauaggggaggcagacugucuucaugaaaaguauggaggcuugaacaagagcaaaccauacuacacaggugagcacgccaaggcuaucgggaauugccccauuugggugaaaacuccgcugaagcuagccaacggcaccaaauauaggccucccgcaaagcuccugaaggagcggggauuuuucggcgcuaucgccggguuucuugaaggagguugggagggcaugauagcgggguggcauggauacacaagucacggcgcccacgguguugcaguggcugccgaucugaaaucuacccaggaagcuauuaauaagaucacuaaaaaccuuaauucccucagcgagcuggaagucaagaacuuacagcgccugucgggggccauggacgagcuccauaaugagauccuugaacuggaugagaaaguggacgacuugcgagcagauacgauuucuucccaaaucgaacuagccguacugcucucaaacgagggcauuauaaauagugaagacgagcaccuguuggcucuggagagaaaguugaagaaaaugcucggaccaagcgcgguugaaaucggcaacggguguuucgagacaaagcauaaaugcaaucagaccugccuggauaggauugcagccggaacuuuugacgcuggugaguucuccuuaccuaccuuugauucucugaacaucacagccgcaagccuaaaugacgauggccucgacaaccacaccauccugcuuuauuacucaacugccgcuaguuccuuggccgugacacugaugauugcaauauucgucguguauauggucagccgggauaacgugucuuguucaaucugccucuga

SEQ ID NO: 155127 - RNA, 1758 nt, Artificial Sequence; identical to SEQ ID NO: 155027
  derived and/or modified CDS sequence (opt3) from hemagglutinin__InfluenzaB__AGX16753

SEQ ID NO: 155128 - RNA, 1758 nt, Artificial Sequence; identical to SEQ ID NO: 155027
  derived and/or modified CDS sequence (opt3) from hemagglutinin__InfluenzaB__AGX16764

SEQ ID NO: 155129 - RNA, 1758 nt, Artificial Sequence; identical to SEQ ID NO: 155027
  derived and/or modified CDS sequence (opt3) from hemagglutinin__InfluenzaB__AGX16775

SEQ ID NO: 155130 - RNA, 1758 nt, Artificial Sequence
  derived and/or modified CDS sequence (opt3) from hemagglutinin__InfluenzaB__AGX16797
augaaggccaucauugugcugcucauggucguuaccagcaacgcugacagaauaugcacaggcaucacuuccucuaauucaccccacgugguaaaaacggcaacccagggggaagugaacgucacaggagugauuccucuuacuaccacaccaaccaagagucauuucgccaaucugaaagguacuaagacaaggggcaaauuguguccgaagugcuuaaacuguaccgaucuggacguugcgcuagggcggcccaagugcacgggaaauaugccuagcgcuaaaguguccauccuccacgaaguccgcccagugacuucuggcuguuuucccauuaugcaugaucgaaccaagauccgucaacugccuaaccuucugagagguuacgagcacauaagguugucgacacauaauguaaucaacgccgaaaaagcaccagggggacccuauaagauuggcacuucaggcagcugcccuaauguuaccaacgggaauggauucuuugccacaauggcuugggcagugccgaaaaacgacaauaacaagaccgccacgaauagucucacuaucgaggucccauacauuuguacagaaggugaggaucagaucaccguguggggcuuccacuccgacaacgagacucagauggcuaagcuguauggggauucuaaaccccagaaguuuacaagcuccgccaacggagugaccacgcacuacgucucacaaauaggcgguuucccuaaucagaccgaagacgggggacugccacagaguggccggauuguuguggauuauaugguacagaaaagcggcaagacagggacuaucaccuaccaacgcgguauucucuuaccccagaaaguguggugcgcgucuggaagauccaaggucaucaaaggcucacugccucuuaucggggaggcagacuguuugcaugaaaaguauggaggccugaacaagagcaaaccauacuacacaggugagcacgccaaggcuauugggaauugccccauaugggugaaaacuccgcuaaagcucgccaacggcaccaaauauaggccucccgcaaagcugcuuaaggagcggggauuuuucggcgcuaucgccggguuucuggaaggagguugggagggcaugauugcgggguggcauggauacacaagucacggcgcccacgguguugcaguggcugccgauuugaaaucuacccaggaagcuaucaauaagauaacuaaaaaccucaauucccugagcgaguuagaagucaagaaccugcagcgccucucgggggccauggacgagcuucauaaugagauucuggaauuggaugagaaaguggacgaccuacgagcagauacgaucucuucccaaaucgaacuggccguacuccugucaaacgagggcauuaucaauagugaagacgagcaccuucuggcuuuggagagaaagcucaagaaaaugcugggaccaagcgcgguugaaauuggcaacggguguuucgagacaaagcauaaaugcaaucagaccugcuuagauaggauagcagccggaacuuuugacgcuggugaguucucccugccuaccuuugauucucuaaacaucacagccgcaagccucaaugacgauggccuggacaaccacaccauucuuuuguauuacucaacugccgcuaguucccuggccgugacacucaugaucgcaaucuucgucguguauauggucagccgggauaacgugucuuguucaauuugccuguga

SEQ ID NO: 155131 - RNA, 1758 nt, Artificial Sequence; identical to SEQ ID NO: 155027
  derived and/or modified CDS sequence (opt3) from hemagglutinin__InfluenzaB__AGX16808

SEQ ID NO: 155132 - RNA, 1758 nt, Artificial Sequence
  derived and/or modified CDS sequence (opt3) from hemagglutinin__InfluenzaB__AGX16819
augaaggccaucauugugcugcucauggucguuaccagcaacgcugacagaauaugcacaggcaucacuuccucuaauucaccccacgugguaaaaacggcaacccagggggaagugaacgucacaggagugauuccucuuacuaccacaccaaccaagagucauuucgccaaucugaaagguacuaagacaaggggcaaauuguguccgaagugcuuaaacuguaccgaucuggacguugcgcuagggcggcccaagugcacgggaaauaucccuagcgcuaaaguguccauucuccacgaaguccgcccagugacuucuggcuguuuucccaucaugcaugaucgaaccaagauacgucaacugccuaaccuucugagagguuacgagcacaucagguugucgacacauaauguaauuaacgccgaaaaagcaccagggggacccuauaagaucggcacuucaggcagcugcccuaauguuaccaacgggaauggauucuuugccacaauggcuugggcagugccgaaaaacgacaauaacaagaccgccacgaauagucucacuauugaggucccauacaucuguacagaaggugaggaucagauaaccguguggggcuuccacuccgacucugagacucagauggcuaagcuguauggggauagcaaaccccagaaguuuacauccucagccaacggagugaccacgcacuacgucagucaaauuggcgguuucccuaaccagaccgaagacgggggacugccacagagcggccggaucguuguggauuauaugguacagaaaucuggcaagacagggacuauuaccuaccaacgcggaauccucuuaccccagaaaguguggugcgcguccgguagaucaaaggucaucaaaggcagccugccucuuauuggggaggcagacuguuugcaugaaaaguauggaggccugaauaagaguaaaccauacuacacaggugagcacgccaaggcuauagggaacugccccaucugggugaaaacuccgcuaaagcucgccaauggcaccaaauauaggccucccgcaaagcugcuuaaggagcggggauuuuucggcgcuauugccggguuucuggaaggagguugggagggcaugaucgcgggguggcauggauacacaucucacggcgcccacgguguugcaguggcugccgauuugaaauccacccaggaagcuauaaacaagauuacuaaaaaucucaacagccugucggaguuagaagucaagaaucugcagcgccucucuggggccauggacgagcuucauaacgagauccuggaauuggaugagaaaguggacgaccuacgagcagauacgaucuccucacaaauugaacuggccguacuccugaguaaugagggcaucauuaacagcgaagacgagcaccuucuggcuuuggagagaaagcucaagaaaaugcugggaccauccgcgguugaaauaggcaauggguguuucgagacaaagcauaaaugcaaccagaccugcuuagauaggaucgcagccggaacuuuugacgcuggugaguucucucugccuaccuuugauagccuaaauauuacagccgcaucacucaacgacgauggccuggacaaucacaccauccuuuuguauuacaguacugccgcuuccagccuggccgugacacucaugaucgcaauuuucauagucuauauggugucucgggauaacgucucauguaguaucugccuguga

SEQ ID NO: 155133 - RNA, 1758 nt, Artificial Sequence; identical to SEQ ID NO: 155027
  derived and/or modified CDS sequence (opt3) from hemagglutinin__InfluenzaB__AGX16830

SEQ ID NO: 155134 - RNA, 1758 nt, Artificial Sequence
  derived and/or modified CDS sequence (opt3) from hemagglutinin__InfluenzaB__AGX16841
augaaggccaucauugugcugcucauggucguuaccagcaacgcugacagaauaugcacaggcaucacuuccucuaauucaccccacgugguaaaaacggcaacccagggggaagugaacgucacaggagugauuccucuuacuaccacaccaaccaagagucauuucgccaaucugaaagguacuaagacaaggggcaaauuguguccgaagugcuuaaacuguaccgaucuggacguugcgcuagggcggcccaagugcacgggaaauaucccuagcgcuaaaguguccauucuccacgaaguccgcccagugacuucuggcuguuuucccaucaugcaugaucgaaccaagauacgucaacugccuaaccuucugagagguuacgagcacaucagguugucgacacauaauguaauuaacgccgaaaaagcaccagggggacccuauaagaucggcacuucaggcagcugcccuaauguuaccaacgggaauggauucuuugccacaauggcuugggcagugccgaaaaacgacaauaacaagaccgccacgaauagucucacuauugaggucccauacaucuguacagaaggugaggaucagauaaccguguggggcuuccacuccgacaacgagacucagauggcuaagcuguauggggauucuaaaccccagaaguuuacaagcuccgccaacggaaugaccacgcacuacgugucacaaauuggcgguuucccuaaucagaccgaagacgggggacugccacagaguggccggaucgucguugauuauauggugcagaaaagcggcaagacagggacuauuaccuaccaacgcggaauccucuuaccccagaaaguauggugcgcgucugguagauccaaggugaucaaaggcucacugccucuuauuggggaggcagacuguuugcaugaaaaguauggaggccugaacaagagcaaaccauacuacacaggugagcacgccaaggcuauagggaauugccccaucugggucaaaacuccgcuaaagcucgccaacggcaccaaauauaggccucccgcaaagcugcuuaaggagcggggauuuuucggcgcuauugccggguuucuggaaggagguugggagggcaugaucgcgggguggcauggauacacaagucacggcgcccacgguguggcaguugcugccgauuugaaaucuacccaggaagcuauaaauaagauuacuaaaaaccucaauucccugagcgaguuagaagugaagaaccugcagcgccucucgggggccauggacgagcuucauaaugagauccuggaauuggaugagaaagucgacgaccuacgagcagauacgaucucuucccaaauugaacuggccgugcuccugucaaacgagggcaucauuaauagugaagacgagcaccuucuggcuuuggagagaaagcucaagaaaaugcugggaccaagcgcgguagaaauaggcaacggguguuucgagacaaagcauaaaugcaaucagaccugcuuagauaggaucgcagccggaacuuuugacgcuggugaguucucccugccuaccuuugauucucuaaacauuacagccgcaagccucaauggcgacgggcuggauaaccacaccauccuuuuguauuacucaacugccgcuaguucccuggccguuacacucaugaucgcaauuuucguggucuauauggugagccgggacaacgucucuuguucaauaugccuguga

SEQ ID NO: 155135 - RNA, 1758 nt, Artificial Sequence
  derived and/or modified CDS sequence (opt3) from hemagglutinin__InfluenzaB__AGX16852
augaaggccaucauugugcugcucauggucguuaccagcaacgcugacagaauaugcacaggcaucacuuccucuaauucaccccacgugguaaaaacggcaacccagggggaagugaacgucacaggagugauuccucuuacuaccacaccaaccaagagucauuucgccaaucugaaagguacuaagacaaggggcaaauuguguccgaagugcuuaaacuguaccgaucuggacguugcgcuagggcggcccaagugcacgggaaauaucccuagcgcuaaaguguccauucuccacgaaguccgcccagugacuucuggcuguuuucccaucaugcaugaucgaaccaagauacgucaacugccuaaccuucugagagguuacgagcacaucagguugucgacacauaauguaauuaacgccgaaaaagcaccagggggacccuauaagaucggcacuucaggcagcugcccuaauguuaccaacgggaauggauucuuugccacaauggcuugggcagugccgaaaaacgacaauaacaagaccgccacgaauagucucacuauugaggucccauacaucuguacagaaggugaggaucagauaaccguguggggcuuccacuccgacaacgagacucagauggcuaagcuguauggggauucuaaaccccagaaguuuacaagcuccgccaacggagugaccacgcacuacgucucacaaauuggcgguuucccuaaucagaccgaagacgggggacugccacagaguggccggaucguuguggauuauaugguacagaaaagcggcaagacagggacuauuaccuaccaacgcggaauccucuuaccccagaaaguguggugcgcgucugguagauccaaggucaucaaaggcucacugccucuuauuggggaggcagacuguuugcaugaaaaguauggaggccugaacaagagcaaaccauacuacacaggugagcacgccaaggcuauagggaauugccccaucugggugaaaacuccgcuaaagcucgccaacggcaccaaauauaggccucccgcaaagcugcuuaaggagcggggauuuuucggcgcuauugccggguuucuggaaggagguugggagggcaugaucgcgggguggcauggauacacaagucacggcgcccacgguguugcaguggcugccgauuugaaaucuacccaggaagcuauaaauaagauuacuaaaaaccucaauucccugagcgaguuagaagucaagaaccugcagcgcaucucgggggccauggacgagcuccauaaugagauccuugaacuggaugagaaaguggacgacuugcgagcagauacgauuucuucccaaaucgaacuagccguacugcucucaaacgagggcauuauaaauagugaagacgagcaucugcuugcucuggagagaaaguugaagaaaaugcucggaccaagcgcgguugaaaucggcaacggguguuucgagacaaagcacaaaugcaaucagaccugccuggauaggauugcagccggaacuuuugacgcuggugaguucuccuuaccuaccuuugauucucugaacaucacagccgcaagccuaaaugacgauggccucgacaaccacaccauccugcuuuauuacucaacugccgcuaguuccuuggccgugacacugaugauugcaauauucgucguguauauggucagccgggauaacgugucuuguucaaucugccucuga

SEQ ID NO: 155136 - RNA, 1758 nt, Artificial Sequence; identical to SEQ ID NO: 155027
  derived and/or modified CDS sequence (opt3) from hemagglutinin__InfluenzaB__AGX16863

SEQ ID NO: 155137 - RNA, 1758 nt, Artificial Sequence; identical to SEQ ID NO: 155027
  derived and/or modified CDS sequence (opt3) from hemagglutinin__InfluenzaB__AGX16874

SEQ ID NO: 155138 - RNA, 1758 nt, Artificial Sequence
  derived and/or modified CDS sequence (opt3) from hemagglutinin__InfluenzaB__AGX16885
augaaggccaucauugugcugcucauggucguuaccagcaacgcugacagaauaugcacaggcaucacuuccucuaauucaccccacgugguaaaaacggcaacccagggggaagugaacgucacaggagugauuccucuuacuaccacaccaaccaagagucauuucgccaaucugaaagguacuaagacaaggggcaaauuguguccgaagugcuuaaacuguaccgaucuggacguugcgcuagggcggcccaagugcacgggaaauaucccuagcgcuaaaguguccauucuccacgaaguccgcccagugacuucuggcuguuuucccaucaugcaugaucgaaccaagauacgucaacugccuaaccuucugagagguuacgagcacaucagguugucgacacauaauguaauuaacgccgaaaaagcaccagggggacccuauaagaucggcacuucaggcagcugcccuaauguuaccaacgggaauggauucuuugccacaauggcuugggcagugccgaaaaacgacaauaacaagaccgccacgaauagucucacuauugaggucccauacaucuguacagaaggugaggaucagauaaccguguggggcuuccacuccgacaacgagacucagauggcuaagcuguauggggauucuaaaccccagaaguuuacaagcuccgccaacggagugaccacgcacuacgucucacaaauuggcgguuucccuaaucagaccgaagacgggggacugccacagaguggccggaucguuguggauuauaugguacagaaaagcggcaagacagggacuauuaccuaccaacgcggaauccucuuaccccagaaaguguggugcgcgucugguagauccaaggucaucaaaggcucacugccucuuauuggggaggcagacuguuugcaugaaaaguauggaggccugaacaagagcaaaccauacuacacaggugagcacgccaaggcuauagggaauugccccaucugggugaaaacuccgcuaaagcucgccaacggcaccaaauauaggccucccgcaaagcugcuuaaggagcggggauuuuucggcgcuauugccggguuucuggaaggagguugggagggcaugaucgcgggguggcauggauacacaagucacggcgcccacgguguugcaguggcugccgauuugaaaucuacccaggaagcuauaaauaagauuacuaaaaaccucaauucccugagcgaguuagaagucaagaaccugcagcgccucucgggggccauggacgagcuucauaaugagauccuggaauuggaugagaaaguggacgaccuacgagcagauacgaucucuucccaaauugaacuggccguacuccugucaaacgagggcaucauuaauagugaagacgagcaccuucuggcuuuggagagaaagcucaagaaaaugcugggaccaagcgcgauagaaaucggcaacggguguuucgagacaaagcauaaaugcaaucagaccugcuuagauaggauugcagccggaacuuuugacgcuggugaguucucccugccuaccuuugauucucuaaacaucacagccgcaagccucaaugacgauggccuggacaaccacaccauccuuuuguauuacucaacugccgcuaguucccuggccguuacacucaugauugcaauauucguggucuauauggugagccgggauaacgucucuuguucaaucugccuguga

SEQ ID NO: 155139 - RNA, 1758 nt, Artificial Sequence; identical to SEQ ID NO: 155138
  derived and/or modified CDS sequence (opt3) from hemagglutinin__InfluenzaB__AGX16896

SEQ ID NO: 155140 - RNA, 1758 nt, Artificial Sequence; identical to SEQ ID NO: 155027
  derived and/or modified CDS sequence (opt3) from hemagglutinin__InfluenzaB__AGX16907

SEQ ID NO: 155141 - RNA, 1758 nt, Artificial Sequence; identical to SEQ ID NO: 155112
  derived and/or modified CDS sequence (opt3) from hemagglutinin__InfluenzaB__AGX16918

SEQ ID NO: 155142 - RNA, 1758 nt, Artificial Sequence; identical to SEQ ID NO: 155027
  derived and/or modified CDS sequence (opt3) from hemagglutinin__InfluenzaB__AGX16940

SEQ ID NO: 155143 - RNA, 1758 nt, Artificial Sequence; identical to SEQ ID NO: 155138
  derived and/or modified CDS sequence (opt3) from hemagglutinin__InfluenzaB__AGX16951

SEQ ID NO: 155144 - RNA, 1758 nt, Artificial Sequence
  derived and/or modified CDS sequence (opt3) from hemagglutinin__InfluenzaB__AGX16962
augaaggccaucauugugcugcucauggucguuaccagcaacgcugacagaauaugcacaggcaucacuuccucuaauucaccccacgugguaaaaacggcaacccagggggaggugaacgucacaggagugauuccucuuacuaccacaccaaccgaaagucauuucgccaaucugaaggguacuaaaacaaggggcaaguuguguccgaaaugcuuaaacuguaccgaucuggacguugcgcuagggcggcccaagugcacgggaaauaucccuagcgcuaagguguccauucuccacgagguccgcccagugacuucuggcuguuuucccaucaugcaugaucgaaccaaaauacgucaacugccuaaccuucugagagguuacgaacacaucagguugucgacacauaauguaauuaacgccgagaaggcaccagggggacccuauaaaaucggcacuucaggcagcugcccuaauguuaccaacgggaauggauucuuugccacaauggcuugggcagugccaaagaacgacaauaacaaaaccgccacgaauagucucacuauugaagucccguacaucuguacagagggugaggaucagauaaccguguggggcuuccacuccgacaacgaaacucagauggcuaagcuguauggggauucuaagccccagaaauuuacaagcuccgccaacggagugaccacgcacuacgucucacaaauuggcgguuucccuaaucagaaggaggacgggggacugccacagaguggccggaucguuguggauuauaugguacagaaaagcggcaacaccgggacaauuacuuaccaacgcggaauccucuuaccccagaagguguggugcgcgucugguagauccaaagucaucaagggcucacugccucuuauuggggaagcagacuguuugcaugagaaauauggaggccugaauaagagcaagccauacuacaccggugagcacgccaaagcuauagggaacugccccaucugggugaagacaccgcuaaaacucgccaauggcacuaaguauaggccucccgcaaaacugcuuaaggaacggggauuuuucggcgcuauugccggguuucuggagggagguugggaaggcaugaucgcgggguggcauggauacaccagucacggcgcccacgguguugcaguggcugccgauuugaagucuacacaggaggcuauaaacaaaauuaccaagaaucucaacucccugagcgaauuagaggucaaaaaucugcagcgccucucgggggccauggacgagcuucauaacgaaauccuggaguuggaugaaaagguggacgaccuacgagcagauacuaucucuucccaaauugagcuggccguacuccugucaaaugaaggcaucauuaacagugaggacgagcaccuucuggcuuuggaaagaaaacucaagaagaugcugggaccaagcgcgguugagauaggcaauggguguuucgaaacgaaacauaagugcaaccagacaugcuuagauaggaucgcagccggaaccuuugacgcuggugaguucucccugccuacuuuugauucucuaaauauuaccgccgcaagccucaacgacgauggccuggacaaccacacaauccuuuuguauuacucaaccgccgcuaguucccuggccgugacucucaugaucgcaauuuucgucguguauauggucagccgggauaaugugucuuguucaauaugccuguga

SEQ ID NO: 155145 - RNA, 1758 nt, Artificial Sequence; identical to SEQ ID NO: 155027
  derived and/or modified CDS sequence (opt3) from hemagglutinin__InfluenzaB__AGX16973

SEQ ID NO: 155146 - RNA, 1758 nt, Artificial Sequence
  derived and/or modified CDS sequence (opt3) from hemagglutinin__InfluenzaB__AGX16995
augaaggccaucauugugcugcucauggucguuaccagcaacgcugacagaauaugcacaggcaucacuuccucuaauucaccccacgugguaaaaacggcaacccagggggaagugaacgucacaggagugauuccucuuacuaccacaccaaccaagagucauuucgccaaucugaaagguacuaagacaaggggcaaauuguguccgaagugcuuaaacuguaccgaucuggacguugcgcuagggcggcccaagugcacgggaaauaucccuagcgcuaaaguguccauucuccacgaaguccgcccagugacuucuggcuguuuucccaucaugcaugaucgaaccaagauacgucaacugccuaaccuucugagagguuacgagcacaucagguugucgacacauaauguaauuaacgccgaaaaagcaccagggggacccuauaagaucggcacuucaggcagcugcccuaauguuaccaacgggaauggauucuuugccacaauggcuugggcagugccgaaaaacgacaauaacaagaccgccacgaauagucucacugucgaggugccauacauuuguacagaaggugaggaucagaucaccguguggggcuuccacuccgacaacgagauacagauggcuaagcuguauggggauucuaaaccccagaaguuuacuagcuccgccaacggagucacaacccacuacguuucacaaauuggcgguuucccuaaucagacggaagacgggggacugccacagaguggccggaucgugguagauuauauggugcagaaaagcggcaagaccgggacaauuacuuaccaacgcggaauccucuuaccccagaaagucuggugcgcgucugguagauccaaggugaucaaaggcucacugccucuuauuggggaggcagacuguuugcaugaaaaguauggaggccugaacaagagcaaaccauacuacaccggugagcacgccaaggcuauagggaauugccccaucuggguuaaaacaccgcuaaagcucgccaacggcacuaaauauaggccucccgcaaagcugcuuaaggagcggggauuuuucggcgcuauugccggguuucuggaaggagguugggagggcaugaucgcgggguggcauggauacaccagucacggcgcccacgguguggcagucgcugccgauuugaaaucuacacaggaagcuauaaauaagauuaccaaaaaccucaauucccugagcgaguuagaagugaagaaccugcagcgccucucgggggccauggacgagcuucauaaugagauccuggaauuggaugagaaaguagacgaccuacgagcagauacuaucucuucccaaauugaacuggccguucuccugucaaacgagggcaucauuaauagugaagacgagcaccuucuggcuuuggagagaaagcucaagaaaaugcugggaccaagcgcgguggaaauaggcaacggguguuucgagacgaagcauaaaugcaaucagacaugcuuagauaggaucgcagccggaaccuuugacgcuggugaguucucccugccuacuuuugauucucuaaacauuaccgccgcaagccucaaugacgauggccuggacaaccacacaauccuuuuguauuacucaaccgccgcuaguucccuggccgucacucucaugaucgcaauuuucguggucuauauggugagccgggauaacguuucuuguucaauaugccuguga

SEQ ID NO: 155147 - RNA, 1758 nt, Artificial Sequence
  derived and/or modified CDS sequence (opt3) from hemagglutinin__InfluenzaB__AGX17006
augaaggccaucauugugcugcucauggucguuaccagcaacgcugacagaauaugcacaggcaucacuuccucuaauucaccccacgugguaaaaacggcaacccagggggaagugaacgucacaggagugauuccucuuacuaccacaccaaccaagagucauuucgccaaucugaaagguacuaagacaaggggcaaauuguguccgaagugcuuaaacuguaccgaucuggacguugcgcuagggcggcccaagugcacgggaaauaucccuagcgcuaaaguguccauucuccacgaaguccgcccagugacuucuggcuguuuucccaucaugcaugaucgaaccaagauacgucaacugccuaaccuucugagagguuacgagcacaucagguugucgacacauaauguaauuaacgccgaaaaagcaccagggggacccuauaagaucggcacuucaggcagcugcccuaauguuaccaacgggaauggauucuuugccacaauggcuugggcagugccgaaaaacgacaauaacaagaccgccacgaauagucucacuauugaggucccauacaucuguacagaaggugaggaucagauaaccguguggggcuuccacuccgacaacgagaaccagauggcuaagcuguauggggauucuaaaccccagaaguuuacuagcuccgccaauggagugacaacccacuacgucucacaaauuggcgguuucccuaaccagacggaagacgggggacugccacagaguggccggaucguuguggauuauaugguacagaaaagcggcaagaccgggacaauuacuuaccaacgcggaauccucuuaccccagaaaguguggugcgcgucugguagauccaaggucaucaaaggcucacugccucuuauuggggaggcagacuguuugcaugaaaaguauggaggccugaauaagagcaaaccauacuacaccggugagcacgccaaggcuauagggaacugccccaucugggugaaaacaccgcuaaagcucgccaauggcacuaaauauaggccucccgcaaagcugcuuaaggagcggggauuuuucggcgcuauugccggguuucuggaaggagguugggagggcaugaucgcgggguggcauggauacaccagucacggcgcccacgguguugcaguggcugccgauuugaaaucuacacaggaagcuauaaacaagauuaccaaaaaucucaacucccugagcgaguuagaagucaagaaucugcagcgccucucgggggccauggacgagcuucauaacgagauccuggaauuggaugagaaaguggacgaccuacgagcagauacuaucucuucccaaauugaacuggccguacuccugucaaaugagggcaucauuaacagugaagacgagcaccuucuggcuuuggagagaaagcucaagaaaaugcugggaccaagcgcgguugaaauaggcaauggguguuucgagacgaagcauaaaugcaaccagacaugcuuagauaggaucgcagccggaaccuuugacgcuggugaguucucccugccuacuuuugauucucuaaauauuaccgccgcaagccucaacgacgauggccuggacaaccacacaauccuuuuguauuacucaaccgccgcuaguucccuggccgugacucucaugaucgcaauuuucgucguguauauggucagccgggauaaugugucuuguucaauaugccuguga

SEQ ID NO: 155148 - RNA, 1758 nt, Artificial Sequence; identical to SEQ ID NO: 155027
  derived and/or modified CDS sequence (opt3) from hemagglutinin__InfluenzaB__AGX17017

SEQ ID NO: 155149 - RNA, 1758 nt, Artificial Sequence; identical to SEQ ID NO: 155027
  derived and/or modified CDS sequence (opt3) from hemagglutinin__InfluenzaB__AGX17028

SEQ ID NO: 155150 - RNA, 1758 nt, Artificial Sequence
  derived and/or modified CDS sequence (opt3) from hemagglutinin__InfluenzaB__AGX17039
augaaggccaucauugugcugcucauggucguuaccagcaacgcugacagaauaugcacaggcaucacuuccucuaauucaccccacgugguaaaaacggcaacccagggggaggugaacgucacaggagugauuccucuuacuaccacaccaaccgaaagucauuucgccaaucugaaggguacuaaaacaaggggcaaguuguguccgaaaugcuuaaacuguaccgaucuggacguugcgcuagggcggcccaagugcacgggaaauaucccuagcgcuaagguguccauucuccacgagguccgcccagugacuucuggcuguuuucccaucaugcaugaucgaaccaaaauacgucaacugccuaaccuucugagagguuacgaacacaucagguugucgacacauaauguaauuaacgccgagaaggcaccagggggacccuauaaaaucggcacuucaggcagcugcccuaauguuaccaacgggaauggauucuuugccacaauggcuugggcagugccaaagaacgacaauaacaaaaccgccacgaauagucucacuauugaagucccguacaucuguacagagggugaggaucagauaaccguguggggcuuccacuccgacaacgaaacucagauggcuaagcuguauggggauucuaagccccagaaauuuacaagcuccgccaacggagugaccacgcacuacgucucacaaauuggcgguuucccuaaucagaccgaggacgggggacugccacagaguggccggaucguuguggauuauaugguacaaaagagcggcaacacagggacuauuaccuaccagcgcggaauccucuuaccccagaaaguguggugcgcgucugguagauccaaggucaucaaaggcucacugccucuuauuggggaagcagacuguuugcaugagaaguauggaggccugaauaaaagcaagccauacuacacaggugagcacgccaaggcuauagggaacugccccaucugggugaaaacuccgcuaaagcucgccaauggcaccaaauauaggccucccgcaaagcugcuuaaagaacggggauuuuucggcgcuauugccggguuucuggagggagguugggaaggcaugaucgcgggguggcauggauacacaagucacggcgcccacgguguugcaguggcugccgauuugaagucuacccaggaggcuauaaacaagauuacuaaaaaucucaacucccugagcgaauuagaggucaagaaucugcagcgccucucgggggccauggacgagcuucauaacgaaauccuggaguuggaugaaaaaguggacgaccuacgagcagauacgaucucuucccaaauugagcuggccguacuccugucaaaugaaggcaucauuaacagugaggacgagcaccuucuggcuuuggaaagaaagcucaaaaagaugcugggaccaagcgcgguugagauaggcaauggguguuucgaaacaaagcauaaaugcaaccagaccugcuuagauaggaucgcagccggaacuuuugacgcuggugaguucucccugccuaccuuugauucucuaaauauuacagccgcaagccucaacgacgauggccuggacaaccacaccaucaugcuuuauuacucaacugccgcuaguuccuuggccgugacacugaugaucgcaauuuucgucguguauauggucagccgggauaaugugucuuguucaauaugccucuga

SEQ ID NO: 155151 - RNA, 1758 nt, Artificial Sequence; identical to SEQ ID NO: 155027
  derived and/or modified CDS sequence (opt3) from hemagglutinin__InfluenzaB__AGX17050

SEQ ID NO: 155152 - RNA, 1758 nt, Artificial Sequence
  derived and/or modified CDS sequence (opt3) from hemagglutinin__InfluenzaB__AGX17061
augaaggccaucauugugcugcucauggucguuaccagcaacgcugacagaauaugcacaggcaucacuuccucuaauucaccccacgugguaaaaacggcaacccagggggaggugaacgucacaggagugauuccucuuacuaccacaccaaccaagagucauuucgccaaucugaaagguacuaagacaaggggcaaauuguguccgaagugcuuaaacuguaccgaucuggacguugcgcuagggcggcccaagugcacgggaaauaucccuagcgcuaaaguguccauucuccacgaaguccgcccagugacuucuggcuguuuucccaucaugcaugaucgaaccaagauacgucaacugccuaaccuucugagagguuacgagaggauccgguugucgaaucacaacguaauuaaugccgaaaaagcaccagggggacccuauaagaucggcacaucaggcagcugcccuaacguuacuaaugggaacggauucuuugccaccauggcuugggcagugccgaaaaaugagaacaauaagacagccaccaacagucucacgauugaagucccauacaucuguacugagggugaggaccagauaacaguguggggcuuccauuccgauaacgaaacccagauggcuaagcuguauggggacucuaaaccccagaaguuuacuagcuccgccaauggagugacaacccacuacgucucacaaauuggcgguuucccuaaccagacggaggaugggggacugccacagaguggccgcaucguuguggacuauaugguacagaaaagcggcaagaccgggacaauuacuuaccaaagaggaauccucuuaccccagaaaguguggugcgcgucugguagguccaaggucaucaaaggcucacugccucuuauuggggaagcagauuguuugcacgagaaguauggaggccugaauaagagcaaaccauacuacaccggugagcaugccaaggcuauagggaacugccccaucugggugaaaacaccgcuaaagcucgccaauggcacuaaauaucggccucccgcaaagcugcuuaaggaacgcggauuuuucggcgcuauugccggguuucuggagggagguugggaaggcaugaucgcgggguggcacggauacaccagucauggcgcccacgguguugcaguggcugccgacuugaaaucuacacaggaggcuauaaacaagauuaccaaaaaucucaacucccugagcgaauuagaggucaagaaucugcagcgacucucgggggccauggaugagcuucacaacgaaauccuggaguuggacgaaaaaguggaugaccuaagagcagacacuaucucuucccaaauugagcuggccguacuccugucaaaugaaggcaucauuaacagugaggaugagcaucuucuggcuuuggaaaggaagcucaagaaaaugcugggaccaagcgcgguugagauaggcaauggguguuucgaaacgaagcacaaaugcaaccagacaugcuuagaccggaucgcagccggaaccuuuaaugcuggugaguucucccugccuacuuuugauucucuaaacauuaccgccgcaagccucaacgacgauggccuggacaaucauacaauccuuuuguauuacucaaccgccgcuaguucccuggccgugacucucaugaucgcaauuuucgucguguauauggucagccgugauaacgugucuuguucaauaugccuguga

SEQ ID NO: 155153 - RNA, 1758 nt, Artificial Sequence
  derived and/or modified CDS sequence (opt3) from hemagglutinin__InfluenzaB__AGX17072
augaaggccaucauugugcugcucauggucguuaccagcaacgcugacagaauaugcacaggcaucacuuccucuaauucaccccacgugguaaaaacggcaacccagggggaggugaacgucacaggagugauuccucuuacuaccacaccaaccgaaagucauuucgccaaucugaaggguacuaaaacaaggggcaaguuguguccgaaaugcuuaaacuguaccgaucuggacguugcgcuagggcggcccaagugcacgggaaauaucccuagcgcuaagguguccauucuccacgagguccgcccagugacuucuggcuguuuucccaucaugcaugaucgaaccaaaauacgucaacugccuaaccuucugagagguuacgaacacaucagguugucgacacauaauguaauuaacgccgagaaggcaccagggggacccuauaaaaucggcacuucaggcagcugcccuaauguuaccaacgggaauggauucuuugccacaauggcuugggcagugccaaagaacgacaauaacaaaaccgccacgaauagucucacuauugaagucccguacaucuguacagagggugaggaucagauaaccguguggggcuuccacuccgacaacgaaacucagauggcuaagcuguauggggauucuaagccccagaaauuuacaagcuccgccaacggagugaccacgcacuacgucucacaaauuggcgguuucccuaaucagaccgaggacgggggacugccacagaguggccggaucguuguggauuauaugguacaaaagagcggcaacacagggacuauuaccuaccagcgcggaauccucuuaccccagaaaguguggugcgcgucugguagauccaaggucaucaaaggcucacugccucuuauuggggaagcagacuguuugcaugagaaguauggaggccugaauaaaagcaagccauacuacacaggugagcacgccaaggcuauagggaacugccccaucugggugaaaacuccgcuaaagcucgccaauggcaccaaauauaggccucccgcaaagcugcuuaaagaacggggauuuuucggcgcuauugccggguuucuggagggagguugggaaggcaugaucgcgggguggcauggauacacaagucacggcgcccacgguguugcaguggcugccgauuugaagucuacccaggaggcuauaaacaagauuacuaaaaaucucaacucccugagcgaauuagaggucaagaaucugcagcgccucucgggggccauggacgagcuucauaacgaaauccuggaguuggaugaaaaaguggacgaccuacgagcagauacgaucucuucccaaauugagcuggccguacuccugucaaaugaaggcaucauuaacagugaggacgagcaccuucuggcuuuggaaagaaagcucaaaaagaugcugggaccaagcgcgguugagauaggcaauggguguuucgaaacaaagcauaaaugcaaccagaccugcuuagauaggaucgcagccggaacuuuugacgcuggugaguucucccugccuaccuuugauucucuaaauauuacagccgcaagccucaacgacgauggccuggacaaccacaccauccuuuuguauuacucaacugccgcuaguucccuggccgugacacucaugaucgcaauuuucgucguguauauggucagccgggauaaugugucuuguucaauaugccuguga

SEQ ID NO: 155154 - RNA, 1758 nt, Artificial Sequence; identical to SEQ ID NO: 155138
  derived and/or modified CDS sequence (opt3) from hemagglutinin__InfluenzaB__AGX17083

SEQ ID NO: 155155 - RNA, 1758 nt, Artificial Sequence
  derived and/or modified CDS sequence (opt3) from hemagglutinin__InfluenzaB__AGX17094
augaaggccaucauugugcugcucauggucguuaccagcaacgcugacagaauaugcacaggcaucacuuccucuaauucaccccacgugguaaaaacggcaacccagggggaagugaacgucacaggagugauuccucuuacuaccacaccaaccaagagucauuucgccaaucugaaagguacuaagacaaggggcaaauuguguccgaagugcuuaaacuguaccgaucuggacguugcgcuagggcggcccaagugcacgggaaauaucccuagcgcuaaaguguccauucuccacgaaguccgcccagugacuucuggcuguuuucccaucaugcaugaucgaaccaagauacgucaacugccuaaccuucugagagguuacgagcacaucagguugucgacacauaauguaauuaacgccgaaaaagcaccagggggacccuauaagaucggcacuucaggcagcugcccuaauguuaccaacgggaauggauucuuugccacaauggcuugggcagugccgaaaaacgacaauaacaagaccgccacgaauagucucacuauugaggucccauacaucuguacagaaggugaggaucagauaaccguguggggcuuccacuccgacucugagacucagauggcuaagcuguauggggauagcaaaccccagaaguuuacauccucagccaacggagugaccacgcacuacgucagucaaauuggcgguuucccuaaccagaccgaagacgggggacugccacagagcggccggaucguuguggauuauaugguacagaaaucuggcaagacagggacuauuaccuaccaacgcggaauccucuuaccccagaaaguguggugcgcguccgguagaucaaaggucaucaaaggcagccugccucuuauuggggaggcagacuguuugcaugaaaaguauggaggccugaauaagaguaaaccauacuacacaggugagcacgccaaggcuauagggaacugccccaucugggugaaaacuccgcuaaagcucgccaauggcaccaaauauaggccucccgcaaagcugcuuaaggagcggggauuuuucggcgcuauugccggguuucuggaaggagguugggagggcaugaucgcgggguggcauggauacacaucucacggcgcccacgguguugcaguggcugccgauuugaaauccacccaggaagcuauaaacaagauuacuaaaaaucucaacagccugucggaguuagaagucaagaaucugcagcgccucucuggggccauggacgagcuucauaacgagauccuggaauuggaugagaaaguggacgaccuacgagcagauacgaucuccucacaaauugaacuggccguacuccugaguaaugagggcaucauuaacagcgaagacgagcaccuucuggcuuuggagagaaagcucaagaaaaugcugggaccauccgcgguugaaauaggcaauggguguuucgagacaaagcauaaaugcaaccagaccugcuuagauaggaucgcagccggaacuuuugacgcuggugaguucucucugccuaccuuugauagccuaaauauuacagccgcaucacucaacgacgauggccuggacaaucacaccauccuuuuguauuacaguacugccgcuuccagccuggccgugacacucaugaucgcaauuuucgucguguauauggucucucgggauaacgugucauguaguauaugccuguga

SEQ ID NO: 155156 - RNA, 1758 nt, Artificial Sequence
  derived and/or modified CDS sequence (opt3) from hemagglutinin__InfluenzaB__AGX17105
augaaggccaucauugugcugcucauggucguuaccagcaacgcugacagaauaugcacaggcaucacuuccucuaauucaccccacgugguaaaaacggcaacccagggggaaauuaacgugacaggagucaucccucuuacuaccacaccaaccaagagucauuucgccaaucugaaagguacuaagacaaggggcaaauuguguccgaagugcuuaaacuguaccgaucuggacguggcgcuagggcggcccaagugcacgggaaauauuccuagcgcuaaaguuuccauccuccacgaagugcgcccagucacuucuggcuguuuucccauaaugcaugaucgaaccaagauccgucaacugccuaaccuucugagagguuacgagcacauuagguugucgacacauaaugugaucaacgccgaaaaagcaccagggggacccuauaagauuggcacuucaggcagcugcccuaauguaaccaacgggaauggauucuuugccacaauggcuugggcaguuccgaaaaacgacaauaacaagaccgccacgaauagucucacuaucgaggugccacacauauguacagaaggugaggaucagauuaccgucuggggcuuccacuccgacaacgagauccagauggcuaagcuguacggggauucuaaaccccagaaguuuacuagcuccgccaacggagugacaacccauuauauuucacaaaucggcgguuucccuaaucagacggaagacgggggacugccacagaguggccggaucguggucgauuacaugguucagaaaagcggcaagaccgggacaauuacuuaucaacgcggaauacucuuaccccagaaaguguggugcgcgucugguagauccaagguaaucaaaggcucacugccucuuauuggggaggcagacuguuugcacgaaaaguacggaggccugaacaagagcaaaccauauuacaccggugagcaugccaaggcuaucgggaauugccccauaugggugaaaacaccgcuaaagcucgccaacggcacuaaauacaggccucccgcaaagcugcuuaaggagcggggauuuuucggcgcuauugccggguuucuggaaggagguugggagggcaugaucgcgggguggcacggauauaccagucacggcgcccauggugucgcaguggcugccgauuugaaaucuacacaggaagcuaucaauaagauuaccaaaaaccucaauucccugagcgaguuagaaguuaagaaccugcagcgccucucgggggccauggacgagcuucacaaugagauccuggaauuggaugagaaaguggacgaccuacgagcagauacuauuucuucccaaauagaacuggccguccuccugucaaacgagggcaucauuaauagugaagacgagcaucuucuggcuuuggagagaaagcucaagaaaaugcugggaccaagcgcgaucgaaaucggcaacggguguuucgagacgaagcacaaaugcaaucagacaugcuuagauaggauugcagccggaaccuuugacgcuggugaguucucccugccuacuuuugauucucuaaacauaaccgccgcaagccucaaugacgauggccuggacaaccauacaauccuuuuguacuauucaaccgccgcuaguucccuggccgugacucucaugauugcaaucuucguaguuuacauggugagccgggauaacgucucuuguucaauuugccuguga

SEQ ID NO: 155157 - RNA, 1758 nt, Artificial Sequence; identical to SEQ ID NO: 155138
  derived and/or modified CDS sequence (opt3) from hemagglutinin__InfluenzaB__AGX17116

SEQ ID NO: 155158 - RNA, 1758 nt, Artificial Sequence
  derived and/or modified CDS sequence (opt3) from hemagglutinin__InfluenzaB__AGX17127
augaaggccaucauugugcugcucauggucguuaccagcaacgcugacagaauaugcacaggcaucacuuccucuaauucaccccacgugguaaaaacggcaacccagggggaggugaacgucacaggagugauuccucuuacuaccacaccaaccgaaagucauuucgccaaucugaaggguacuaaaacaaggggcaaguuguguccgaaaugcuuaaacuguaccgaucuggacguugcgcuagggcggcccaagugcacgggaaauaucccuagcgcuaagguguccauucuccacgagguccgcccagugacuucuggcuguuuucccaucaugcaugaucgaaccaaaauacgucaacugccuaaccuucugagagguuacgaacacaucagguugucgacacauaauguaauuaacgccgagaaggcaccagggggacccuauaaaaucggcacuucaggcagcugcccuaauguuaccaacgggaauggauucuuugccacaauggcuugggcagugccaaagaacgacaauaacaaaaccgccacgaauagucucacuauugaagucccguacaucuguacagagggugaggaucagauaaccguguggggcuuccacuccgacaacgaaaaccagauggcuaagcuguauggggauucuaagccccagaaauuuacuagcuccgccaauggagugacaacccacuacgucucacaaauuggcgguuucccuaaccagacggaggacgggggacugccacagaguggccggaucguuguggauuauaugguacaaaagagcggcaauaccgggacaauuacuuaccagcgcggaauccucuuaccccagaaaguguggugcgcgucugguagauccaaggucaucaaaggcucacugccucuuauuggggaagcagacuguuugcaugagaaguauggaggccugaacaaaagcaagccauacuacaccggugagcacgccaaggcuauagggaauugccccaucugggugaaaacaccgcuaaagcucgccaacggcacuaaauauaggccucccgcaaagcugcuuaaagaacggggauuuuucggcgcuauugccggguuucuggagggagguugggaaggcaugaucgcgggguggcauggauacaccagucacggcgcccacgguguugcaguggcugccgauuugaagucuacacaggaggcuauaaauaagauuaccaaaaaccucaauucccugagcgaauuagaggucaagaaccugcagcgccucucgggggccauggacgagcuucauaaugaaauccuggaguuggaugaaaaaguggacgaccuacgagcagauacuaucucuucccaaauugagcuggccguacuccugucaaacgaaggcaucauuaauagugaggacgagcaccuucuggcuuuggaaagaaagcucaaaaagaugcugggaccaagcgcgguugagauaggcaacggguguuucgaaacgaagcauaaaugcaaucagacaugcuuagauaggaucgcagccggaaccuuugacgcuggugaguucucccugccuacuuuugauucucuaaacauuaccgccgcaagccucaacgacgauggccuggacaaucacacaauccuuuuguauuacucaaccgccgcuaguucccuggccgugacucucaugaucgcaauuuucgucguguauauggucagccgggauaacgugucuuguucaauaugccuguga

SEQ ID NO: 155159 - RNA, 1758 nt, Artificial Sequence; identical to SEQ ID NO: 155147
  derived and/or modified CDS sequence (opt3) from hemagglutinin__InfluenzaB__AGX17138

SEQ ID NO: 155160 - RNA, 1758 nt, Artificial Sequence; identical to SEQ ID NO: 155147
  derived and/or modified CDS sequence (opt3) from hemagglutinin__InfluenzaB__AGX17149

SEQ ID NO: 155161 - RNA, 1758 nt, Artificial Sequence
  derived and/or modified CDS sequence (opt3) from hemagglutinin__InfluenzaB__AGX17160
augaaggccaucauugugcugcucauggucguuaccagcaacgcugacagaauaugcacaggcaucacuuccucuaauucaccccacgugguaaaaacggcaacccagggggaagugaacgucacaggaaugauuccucuuacuaccacaccaaccaagagucauuucgccaaucugaaagguacuaagacaaggggcaaauuguguccgaagugcuuaaacuguaccgaucuggacguggcgcuagggcggcccaagugcacgggaaauaucccuagcgcuaaaguuuccauucuccacgaagugcgcccagucacuucuggcuguuuucccaucaugcaugaucgaaccaagauacgucaacugccuaaccuucugagagguuacgagcacaucagguugucgacacauaaugugauuaacgccgaaaaagcaccagggggacccuauaagaucggcacuucaggcagcugcccuaauguaaccaacgggaauggauucuuugccacaauggcuugggcaguuccgaaaaacgacaauaacaagaccgccacgaauagucucacuauugaggugccauacaucuguacagaaggugaggaucagauaaccgucuggggcuuccacuccgacaacgagacucagauggcuaagcuguauggggauucuaaaccccagaaguuuacaagcuccgccaacggagugaccacgcacuacgugucacaaauuggcgguuucccuaaucagaccgaagacgggggacugccacagaguggccggaucgucguugauuauauggugcagaaaagcggcaagacagggacuauuaccuaccaacgcggaauccucuuaccccagaaaguauggugcgcgucugguagauccaaggugaucaaaggcucacugccucuuauuggggaggcagacuguuugcaugaaaaguauggaggccugaacaagagcaaaccauacuacacaggugagcacgccaaggcuauagggaauugccccaucugggucaaaacuccgcuaaagcucgccaacggcaccaaauauaggccucccgcaaagcugcuuaaggagcggggauuuuucggcgcuauugccggguuucuggaaggagguugggagggcaugaucgcgggguggcauggauacacaagucacggcgcccacgguguggcaguugcugccgauuugaaaucuacccaggaagcuauaaauaagauuacuaaaaaccucaauucccugagcgaguuagaagugaagaaccugcagcgccucucgggggccauggacgagcuucauaaugagauccuggaauuggaugagaaagucgacgaccuacgagcagauacgaucucuucccaaauugaacuggccgugcuccugucaaacgagggcaucauuaauagugaagacgagcaccuucuggcuuuggagagaaagcucaagaaaaugcugggaccaagcgcgguagaaauaggcaacggguguuucgagacaaagcauaaaugcaaucagaccugcuuagauaggaucgcagccggaacuuuugacgcuggugaguucucccugccuaccuuugauucucuaaacauuacagccgcaagccucaaugacgauggccuggacaaccacaccauccuuuuguauuacucaacugccgcuaguucccuggccguuacacucaugaucgcaauuuucguggucuauauggugagccgggauaacgucucuuguucaauaugccuguga

SEQ ID NO: 155162 - RNA, 1758 nt, Artificial Sequence
  derived and/or modified CDS sequence (opt3) from hemagglutinin__InfluenzaB__AGX17171
augaaggccaucauugugcugcucauggucguuaccagcaacgcugacagaauaugcacaggcaucacuuccucuaauucaccccacgugguaaaaacggcaacccagggggaggugaacgucacaggagugauuccucuuacuaccacaccaaccgaaagucauuucgccaaucugaaggguacuaaaacaaggggcaaguuguguccgaaaugcuuaaacuguaccgaucuggacguugcgcuagggcggcccaagugcacgggaaauaucccuagcgcuaagguguccauucuccacgagguccgcccagugacuucuggcuguuuucccaucaugcauaaccgaaccaaaauacgucaacugccuaaucuucugagagguuacgaacacaucagguugucgacacauaacguaauuaaugccgagaaggcaccagggggacccuauaaaaucggcacuucaggcagcugcccuaacguuaccaaugggaacggauucuuugccacaauggcuugggcagugccaaagaaugauaacaauaaaaccgccacgaacagucucacuauugaagucccguacaucuguacagagggugaggaccagauaaccguguggggcuuccacuccgauaacgaagcucagauggccaagcuguauggggacucuaagccccagaaauuuacuagcuccgcgaauggagugacaacccacuacgucucacaaauuggcgguuucccuaaccagacggaggaugggggacugccacagaguggccggaucguuguggacuauaugguacaaaagagcggcaauaccgggacaauuacuuaccagcgcggaauccucuuaccccagaaaguguggugcgcaucugguagauccaaggucaucaaaggcucacugccucuuauuggggaagccgauuguuugcaugagaaguauggaggccugaacaaaagcaagccauacuacaccggugagcacgcuaaggccauagggaauugccccaucugggugaaaacaccgcuaaagcucgcaaacggcacuaaauauaggccucccgcuaagcugcuuaaagaacggggauuuuucggcgccauugcgggguuucuggagggagguugggaaggcaugaucgccggguggcauggauacaccagucacggcgcacacgguguugcuguggccgcugacuugaagucuacacaggaggccauaaauaagauuaccaaaaaccucaauucccugagcgaauuagaggucaagaaccugcagcgccucucgggggcaauggaugagcuucauaaugaaauccuggaguuggacgaaaaaguggaugaccuacgagccgacacuaucucuucccaaauugagcuggcuguacuccugucaaacgaaggcaucauuaauagugaggaugagcaccuucuggcguuggaaagaaagcucaaaaagaugcugggaccaagcgcaguugagauaggcaacggguguuucgaaacgaagcauaaaugcaaucagacaugcuuagacaggaucgccgcuggaaccuuugaugccggugaguucucccugccuacuuuugacucucuaaacauuaccgcagccagccucaacgaugacggccuggauaaucacacaauccuuuuguauuacucaaccgcugccaguucccuggcagugacucucaugaucgcgauuuucgucguguauauggucagccgggacaacgugucuuguucaauaugccuguga

SEQ ID NO: 155163 - RNA, 1758 nt, Artificial Sequence; identical to SEQ ID NO: 155027
  derived and/or modified CDS sequence (opt3) from hemagglutinin__InfluenzaB__AGX17182

SEQ ID NO: 155164 - RNA, 1758 nt, Artificial Sequence; identical to SEQ ID NO: 155027
  derived and/or modified CDS sequence (opt3) from hemagglutinin__InfluenzaB__AGX17193

SEQ ID NO: 155165 - RNA, 1758 nt, Artificial Sequence; identical to SEQ ID NO: 155027
  derived and/or modified CDS sequence (opt3) from hemagglutinin__InfluenzaB__AGX17204

SEQ ID NO: 155166 - RNA, 1758 nt, Artificial Sequence
  derived and/or modified CDS sequence (opt3) from hemagglutinin__InfluenzaB__AGX17215
augaaggccaucauugugcugcucauggucguuaccagcaacgcugacagaauaugcacaggcaucacuuccucuaauucaccccacgugguaaaaacggcaacccagggggaagugaacgucacaggagugauuccucuuacuaccacaccaaccaagagucauuucgccaaucugaaagguacuaagacaaggggcaaauuguguccgaagugcuuaaacuguaccgaucuggacguugcgcuagggcggcccaagugcacgggaaauaucccuagcgcuaaaguguccauucuccacgaaguccgcccagugacuucuggcuguuuucccaucaugcaugaucgaaccaagauacgucaacugccuaaccuucugagagguuacgagcacaucagguugucgacacauaauguaauuaacgccgaaaaagcaccagggggacccuauaagaucggcacuucaggcagcugcccuaauguuaccaacgggaauggauucuuugccacaauggcuugggcagugccgaaaaacgacaauaacaagaccgccacgaauagucucacuauugaggucccauacaucuguacagaaggugaggaucagauaaccguguggggcuuccacuccgacaacgaggcucagauggccaagcuguauggggauucuaaaccccagaaguuuacuagcuccgcgaacggagugacaacccacuacgucucacaaauuggcgguuucccuaaucagacggaagacgggggacugccacagaguggccggaucguuguggauuauaugguacagaaaagcggcaagaccgggacaauuacuuaccaacgcggaauccucuuaccccagaaaguguggugcgcaucugguagauccaaggucaucaaaggcucacugccucuuauuggggaggccgacuguuugcaugaaaaguauggaggccugaacaagagcaaaccauacuacaccggugagcacgcuaaggccauagggaauugccccaucugggugaaaacaccgcuaaagcucgcaaacggcacuaaauauaggccucccgcuaagcugcuuaaggagcggggauuuuucggcgccauugcgggguuucuggaaggagguugggagggcaugaucgccggguggcauggauacaccagucacggcgcacacgguguugcuguggccgcugauuugaaaucuacacaggaagccauaaauaagauuaccaaaaaccucaauucccugagcgaguuagaagucaagaaccugcagcgccucucgggggcaauggacgagcuucauaaugagauccuggaauuggaugagaaaguggacgaccuacgagccgauacuaucucuucccaaauugaacuggcuguacuccugucaaacgagggcaucauuaauagugaagacgagcaccuucuggcguuggagagaaagcucaagaaaaugcugggaccaagcgcaauagaaaucggcaacggguguuucgagacgaagcauaaaugcaaucagacaugcuuagauaggauugccgcuggaaccuuugacgccggugaguucucccugccuacuuuugauucucuaaacaucaccgcagccagccucaaugacgauggccuggacaaccacacaauccuuuuguauuacucaaccgcugccaguucccuggcaguuacucucaugauugcgauauucguggucuauauggugagccgggauaacgucucuuguucaaucugccuguga

SEQ ID NO: 155167 - RNA, 1758 nt, Artificial Sequence; identical to SEQ ID NO: 155027
  derived and/or modified CDS sequence (opt3) from hemagglutinin__InfluenzaB__AGX17226

SEQ ID NO: 155168 - RNA, 1758 nt, Artificial Sequence
  derived and/or modified CDS sequence (opt3) from hemagglutinin__InfluenzaB__AGX17237
augaaggccaucauugugcugcucauggucguuaccagcaacgcugacagaauaugcacaggcaucacuuccucuaauucaccccacgugguaaaaacggcaacccagggggaagugaacgucacaggagugauuccucuuacuaccacaccaaccaagagucauuucgccaaucugaaagguacuaagacaaggggcaaauuguguccgaagugcuuaaacuguaccgaucuggacguugcgcuagggcggcccaagugcacgggaaauaucccuagcgcuaaaguguccauucuccacgaaguccgcccagugacuucuggcuguuuucccaucaugcaugaucgaaccaagauacgucaacugccuaaccuucugagagguuacgagcacaucagguugucgacacauaauguaauuaacgccgaaaaagcaccagggggacccuauaagaucggcacuucaggcagcugcccuaauauuaccaacgggaauggauucuuugccacaauggcuugggcaguuccgaaaaacgacaauaacaagaccgccacgaauagucucacuaucgaggugccauacauauguacagaaggugaggaucagauuaccgucuggggcuuccacuccgacaacgagauccagauggcuaagcuguauggggauucuaaaccccagaaguuuacuagcuccgccaacggagugacaacccacuacgugucacaaauuggcgguuucccuaaucagacggaagacgggggacugccacagaguggccggaucgucguugauuauauggugcagaaaagcggcaagaccgggacaaucacuuaccaacgcgguauucucuuaccccagaaaguauggugcgcgucuggaagauccaaggugauaaaaggcucacugccucuuaucggggaggcagacuguuugcaugaaaaguauggaggccugaacaagagcaaaccauacuacaccggugagcacgccaaggcuauugggaauugccccaucugggucaaaacaccgcuaaagcucgccaacggcacuaaauauaggccucccgcaaagcugcuuaaggagcggggauuuuucggcgcuauagccggguuucuggaaggagguugggagggcaugauugcgggguggcauggauacaccagucacggcgcccacgguguggcaguugcugccgauuugaaaucuacacaggaagcuaucaauaagaucaccaaaaaccucaauucccugagcgaguuagaagugaagaaccugcagcgccucucgggggccauggacgagcuucauaaugagauucuggaauuggaugagaaagucgacgaccuacgagcagauacuaucucuucccaaauugaacuggccgugcuccugucaaacgagggcauaaucaauagugaagacgagcaccuucuggcuuuggagagaaagcucaagaaaaugcugggaccaagcgcgguagaaauuggcaacggguguuucgagacgaagcauaaaugcaaucagacaugcuuagauaggaucgcagccggaaccuuugacgcuggugaguucucccugccuacuuuugauucucuaaacaucaccgccgcaagccucaaugacgauggccuggacaaccacacaauucuuuuguauuacucaaccgccgcuaguucccuggccguuacucucaugauagcaaucuucguggucuauauggugagccgggauaacgucucuuguucaauuugccuguga

SEQ ID NO: 155169 - RNA, 1758 nt, Artificial Sequence
  derived and/or modified CDS sequence (opt3) from hemagglutinin__InfluenzaB__AGX17248
augaaggccaucauugugcugcucauggucguuaccagcaacgcugacagaauaugcacaggcaucacuuccucuaauucaccccacgugguaaaaacggcaacccagggggaagugaacgucacaggagugauuccucuuacuaccacaccaaccaagagucauuucgccaaucugaaagguacuaagacaaggggcaaauuguguccgaagugcuuaaacuguaccgaucuggacguugcgcuagggcggcccaagugcacgggaaauaucccuagcgcuaaaguguccauucuccacgaaguccgcccagugacuucuggcuguuuucccaucaugcaugaucgaaccaagauacgucaacugccuaaccuucugagagguuacgagcacaucagguugucgacacauaauguaauuaacgccgaaaaagcaccagggggacccuauaagaucggcacuucaggcagcugcccuaauguuaccaacgggaauggauucuuugccacaauggcuugggcagugccgaaaaacgacaauaacaagaccgccacgaauagucucacuauugaggucccauacaucuguacagaaggugaggaucagauaaccguguggggcuuccacuccgacaacgagacucagauggcuaagcuguauggggauucuaaaccccagaaguuuacaagcuccgccaacggagugaccacgcacuacgucucacaaauuggcgguuucccuaaucagaccgaagacgggggacugccacagaguggccggaucguuguggauuauaugguacagaaaagcggcaagacagggacuauuaccuaccaacgcggaauccucuuaccccagaaaguguggugcacaucugguagauccaaggucaucaaaggcucacugccucuuauuggggaggcggacuguuugcaugaaaaguauggaggccugaacaagagcaaaccauacuacacuggugagcacgcaaaggccauagggaauugccccaucugggugaaaaccccgcuaaagcucgcuaacggcacaaaauauaggccucccgccaagcugcuuaaggagcggggauuuuucggcgcaauugcuggguuucuggaaggagguugggagggcaugaucgccggguggcauggauacaccagucacggcgcgcacgguguugccguggcagcugauuugaaaucuacucaggaagccauaaauaagauuacgaaaaaccucaauucccugagcgaguuagaagucaagaaccugcagcgccucucgggggcuauggacgagcuucauaaugagauccuggaauuggaugagaaaguggacgaccuacgagccgauacaaucucuucccaaauugaacuggcaguacuccugucaaacgagggcaucauuaauagugaagacgagcaccuucuggccuuggagagaaagcucaagaaaaugcugggaccaagcgcuguugaaauaggcaacggguguuucgagaccaagcauaaaugcaaucagacuugcuuagauaggaucgcggcaggaaccuuugacgccggugaguucucccugccuacauuugauucucuaaacauuaccgcugccagccucaaugacgauggccuggacaaccacacuauccuuuuguauuacucaacagcagccaguucccuggcugugacgcucaugaucgccauuuucgucguguauauggucagccgggauaacgugucuuguucaauaugccuguga

SEQ ID NO: 155170 - RNA, 1758 nt, Artificial Sequence; identical to SEQ ID NO: 155111
  derived and/or modified CDS sequence (opt3) from hemagglutinin__InfluenzaB__AGX17270

SEQ ID NO: 155171 - RNA, 1758 nt, Artificial Sequence; identical to SEQ ID NO: 155027
  derived and/or modified CDS sequence (opt3) from hemagglutinin__InfluenzaB__AGX17281

SEQ ID NO: 155172 - RNA, 1758 nt, Artificial Sequence; identical to SEQ ID NO: 155027
  derived and/or modified CDS sequence (opt3) from hemagglutinin__InfluenzaB__AGX17292

SEQ ID NO: 155173 - RNA, 1758 nt, Artificial Sequence; identical to SEQ ID NO: 155027
  derived and/or modified CDS sequence (opt3) from hemagglutinin__InfluenzaB__AGX17303

SEQ ID NO: 155174 - RNA, 1758 nt, Artificial Sequence; identical to SEQ ID NO: 155153
  derived and/or modified CDS sequence (opt3) from hemagglutinin__InfluenzaB__AGX17314

SEQ ID NO: 155175 - RNA, 1758 nt, Artificial Sequence; identical to SEQ ID NO: 155027
  derived and/or modified CDS sequence (opt3) from hemagglutinin__InfluenzaB__AGX17325

SEQ ID NO: 155176 - RNA, 1758 nt, Artificial Sequence; identical to SEQ ID NO: 155138
  derived and/or modified CDS sequence (opt3) from hemagglutinin__InfluenzaB__AGX17336

SEQ ID NO: 155177 - RNA, 1758 nt, Artificial Sequence; identical to SEQ ID NO: 155027
  derived and/or modified CDS sequence (opt3) from hemagglutinin__InfluenzaB__AGX17347

SEQ ID NO: 155178 - RNA, 1758 nt, Artificial Sequence; identical to SEQ ID NO: 155027
  derived and/or modified CDS sequence (opt3) from hemagglutinin__InfluenzaB__AGX17358

SEQ ID NO: 155179 - RNA, 1758 nt, Artificial Sequence
  derived and/or modified CDS sequence (opt3) from hemagglutinin__InfluenzaB__AGX17369
augaaggccaucauugugcugcucauggucguuaccagcaacgcugacagaauaugcacaggcaucacuuccucuaauucaccccacgugguaaaaacggcaacccagggggaagugaacgucacaggagugauuccucuuacuaccacaccaaccaagagucauuucgccaaucugaaagguacuaagacaaggggcaaauuguguccgaagugcuuaaacuguaccgaucuggacguugcgcuagggcggcccaagugcacgggaaauaucccuagcgcuaaaguguccauucuccacgaaguccgcccagugacuucuggcuguuuucccaucaugcaugaucgaaccaagauacgucaacugccuaaccuucugagagguuacgagcacaucagguugucgacacauaauguaauuaacgccgaaaaagcaccagggggacccuauaagaucggcacuucaggcagcugcccuaauguuaccaacgggaauggauucuuugccacaauggcuugggcagugccgaaaaacgacaauaacaagaccgccacgaauagucucacuauugaggucccauacaucuguacagaaggugaggaucagauaaccguguggggcuuccacuccgacaacgagacucagauggcuaagcuguauggggauucuaaaccccagaaguuuacaagcuccgccaacggagugaccacgcacuacgucucacaaauuggcgguuucccuaaucagaccgaagacgggggacugccacagaguggccggaucguugcggauuauauggugcagaaaagcggcaagacagggacuauuaccuaccaacgcggaauccucuuaccccagaaaguauggugcgcaucugguagauccaaggugaucaaaggcucacugccucuuauuggggaggccgacuguuugcaugaaaaguauggaggccugaacaagagcaaaccauacuacacaggugagcacgcuaaggccauagggaauugccccaucugggucaaaacuccgcuaaagcucgcaaacggcaccaaauauaggccucccgcuaagcugcuuaaggagcggggauuuuucggcgccauugcgggguuucuggaaggagguugggagggcaugaucgccggguggcauggauacacaagucacggcgcacacgguguggcuguugccgcugauuugaaaucuacccaggaagccauaaauaagauuacuaaaaaccucaauucccugagcgaguuagaagugaagaaccugcagcgccucucgggggcaauggacgagcuucauaaugagauccuggaauuggaugagaaagucgacgaccuacgagccgauacgaucucuucccaaauugaacuggcugugcuccugucaaacgagggcaucauuaauagugaagacgagcaccuucuggcguuggagagaaagcucaagaaaaugcugggaccaagcgcaguagaaauaggcaacggguguuucgagacaaagcauaaaugcaaucagaccugcuuagauaggaucgccgcuggaacuuuugacgccggugaguucucccugccuaccuuugauucucuaaacauuacagcagccagccucaaugacgauggccuggacaaccacaccauccuuuuguauuacucaacugcugccaguucccuggcaguuacacucaugaucgcgauuuucguggucuauauggugagccgggauaacgucucuuguucaauaugccuguga

SEQ ID NO: 155180 - RNA, 1758 nt, Artificial Sequence; identical to SEQ ID NO: 155153
  derived and/or modified CDS sequence (opt3) from hemagglutinin__InfluenzaB__AGX17380

SEQ ID NO: 155181 - RNA, 1758 nt, Artificial Sequence; identical to SEQ ID NO: 155027
  derived and/or modified CDS sequence (opt3) from hemagglutinin__InfluenzaB__AGX17391

SEQ ID NO: 155182 - RNA, 1758 nt, Artificial Sequence
  derived and/or modified CDS sequence (opt3) from hemagglutinin__InfluenzaB__AGX17400
augaaggccaucauugugcugcucauggucguuaccagcaacgcugacagaauaugcacaggcaucacuuccucuaauucaccccacauggugaaaacggcaacccagggggaaguaaacgugacaggagucauuccucuuacuaccacaccaaccaagagucauuucgccaaucugaaagguacuaagacaaggggcaaauuguguccgaagugcuuaaacuguaccgaucuggacguggcgcuagggcggcccaagugcacgggaaauaucccuagcgcuaaaguuuccauucuccacgaagugcgcccagucacuucuggcuguuuucccaucaugcaugaucgaaccaagauacgucaacugccuaaccuucugagagguuacgagcacaucagguugucgacacauaaugugauuaacgccgaaaaagcaccagggggacccuauaagaucggcacuucaggcagcugcccuaauguaaccaacgggaauggauucuuugccacaauggcuugggcaguuccgaaaaacgacaauaacaagaccgccacgaauagucucacuauugaggugccauacaucuguacagaaggugaggaucagauaaccgucuggggcuuccacuccgacaacgagacucagauggcuaagcuguauggggauucuaaaccccagaaguuuacaagcuccgccaacggagugaccacgcacuacgugucacaaauuggcgguuucccuaaucagaccgaagacgggggacugccacagaguggccggaucgucguugauuauauggugcagaaaagcggcaagacagggacuauuaccuaccaacgcggaauccucuuaccccagaaaguauggugcgcgucugguagauccaaggugaucaaaggcucacugccucuuauuggggaggcagacuguuugcaugaaaaguauggaggccugaacaagagcaaaccauacuacacaggugagcacgccaaggcuauagggaauugccccaucugggucaaaacuccgcuaaagcucgccaacggcaccaaauauaggccucccgcaaagcugcuuaaggagcggggauuuuucggcgcuauugccggguuucuggaaggagguugggagggcaugaucgcgggguggcauggauacacaagucacggcgcccacgguguggcaguugcugccgauuugaaaucuacccaggaagcuauaaauaagauuacuaaaaaccucaauucccugagcgaguuagaagugaagaaccugcagcgccucucgggggccauggacgagcuucauaaugagauccuggaauuggaugagaaagucgacgaccuacgagcagauacgaucucuucccaaauugaacuggccgugcuccugucaaacgagggcaucauuaauagugaagacgagcaccuucuggcuuuggagagaaagcucaagaaaaugcugggaccaagcgcgguagaaauaggcaacggguguuucgagacaaagcauaaaugcaaucagaccugcuuagauaggaucgcagccggaacuuuugacgcuggugaguucucccugccuaccuuugauucucuaaacauuacagccgcaagccucaaugacgauggccuggacaaccacaccauccuuuuguauuacucaacugccgcuaguucccuggccguuacacucaugaucgcaauuuucguggucuauauggugagccgggauaacgucucuuguucaauaugccuguga

SEQ ID NO: 155183 - RNA, 1758 nt, Artificial Sequence; identical to SEQ ID NO: 155027
  derived and/or modified CDS sequence (opt3) from hemagglutinin__InfluenzaB__AGX17411

SEQ ID NO: 155184 - RNA, 1758 nt, Artificial Sequence; identical to SEQ ID NO: 155027
  derived and/or modified CDS sequence (opt3) from hemagglutinin__InfluenzaB__AGX17422

SEQ ID NO: 155185 - RNA, 1758 nt, Artificial Sequence; identical to SEQ ID NO: 155110
  derived and/or modified CDS sequence (opt3) from hemagglutinin__InfluenzaB__AGX17433

SEQ ID NO: 155186 - RNA, 1758 nt, Artificial Sequence; identical to SEQ ID NO: 155027
  derived and/or modified CDS sequence (opt3) from hemagglutinin__InfluenzaB__AGX17444

SEQ ID NO: 155187 - RNA, 1758 nt, Artificial Sequence; identical to SEQ ID NO: 155110
  derived and/or modified CDS sequence (opt3) from hemagglutinin__InfluenzaB__AGX17455

SEQ ID NO: 155188 - RNA, 1758 nt, Artificial Sequence; identical to SEQ ID NO: 155153
  derived and/or modified CDS sequence (opt3) from hemagglutinin__InfluenzaB__AGX17466

SEQ ID NO: 155189 - RNA, 1758 nt, Artificial Sequence; identical to SEQ ID NO: 155027
  derived and/or modified CDS sequence (opt3) from hemagglutinin__InfluenzaB__AGX17477

SEQ ID NO: 155190 - RNA, 1758 nt, Artificial Sequence; identical to SEQ ID NO: 155112
  derived and/or modified CDS sequence (opt3) from hemagglutinin__InfluenzaB__AGX17488

SEQ ID NO: 155191 - RNA, 1758 nt, Artificial Sequence; identical to SEQ ID NO: 155027
  derived and/or modified CDS sequence (opt3) from hemagglutinin__InfluenzaB__AGX17499

SEQ ID NO: 155192 - RNA, 1758 nt, Artificial Sequence; identical to SEQ ID NO: 155153
  derived and/or modified CDS sequence (opt3) from hemagglutinin__InfluenzaB__AGX17510

SEQ ID NO: 155193 - RNA, 1758 nt, Artificial Sequence; identical to SEQ ID NO: 155153
  derived and/or modified CDS sequence (opt3) from hemagglutinin__InfluenzaB__AGX17521

SEQ ID NO: 155194 - RNA, 1758 nt, Artificial Sequence; identical to SEQ ID NO: 155155
  derived and/or modified CDS sequence (opt3) from hemagglutinin__InfluenzaB__AGX17532

SEQ ID NO: 155195 - RNA, 1758 nt, Artificial Sequence
  derived and/or modified CDS sequence (opt3) from hemagglutinin__InfluenzaB__AGX17543
augaaggccaucauugugcugcucauggucguuaccagcaacgcugacagaauaugcacaggcaucacuuccucuaauucaccccacgugguaaaaacggcaacccagggggaagugaacgucacaggagugauuccucuuacuaccacaccaaccaagagucauuucgccagccugaaagguacuaagacaaggggcaaauuguguccgaagugcuuaaauuguaccgaucuggacguugcgcuagggcggcccaagugcacgggaaacaucccuuccgcuaaagugucuauucuccacgaaguccgcccagugacuucgggcuguuuucccaucaugcaugaucgaaccaagauacgucaacugccuaaucuucugagagguuacgagcacaucagguugucaacacauaacguaauuaaugccgaaaaagcaccagggggacccuauaagaucggcacuagcggcaguugcccuaacguuaccaaugggaacggauucuuugccacaauggcuugggcagugccgaaaaaugacaacaauaagaccgccacgaacucccucacuauugaggucccauacaucuguacagaaggugaggaucagauaaccguguggggcuuccacucugacaaugagacucagauggcuaagcuguauggggauagcaaaccccagaaguuuacauccucagccaacggagugaccacgcacuacgucagucaaauuggcgguuucccuaaccagaccgaagacgggggacugccacagagcggccggaucguuguggauuauaugguacagaaaucuggcaagacagggacuauuaccuaccaacgcggaauccucuuaccccagaaaguguggugcgcguccgguagaucaaaggucaucaaaggcagccugccucuuauuggggaggcagacuguuugcaugaaaaguauggaggccugaauaagaguaaaccauacuacacaggugagcacgccaaggcuauagggaacugccccaucugggugaaaacuccgcuaaagcucgccaauggcaccaaauauaggccucccgcaaagcugcuuaaggagcggggauuuuucggcgcuauugccggguuucuggaaggagguugggagggcaugaucgcgggguggcauggauacacaucucacggcgcccacgguguugcaguggcugccgauuugaaauccacccaggaagcuauaaacaagauuacuaaaaaucucaacagccugucggaguuagaagucaagaaucugcagcgccucucuggggccaugaacgagcuucauaaugagauccuggaauuggacgagaaaguggaugaccuacgagcagacacgaucuccucacaaauugaacuggccguacuccugaguaacgagggcaucauuaauagcgaagaugagcaccuucuggcuuuggagagaaagcucaagaaaaugcugggaccauccgcgguugaaauaggcaacggguguuucgagacaaagcauaaaugcaaucagaccugcuuagacaggaucgcagccggaacuuuugaugcuggugaguucucucugccuaccuuugacagccuaaacauuacagccgcaucacucaaugaugacggccuggauaaccacaccauccuuuuguauuacaguacugccgcuuccagccuggccgugacacucaugaucgcaauuuucgucguguauauggucucucgggacaacgugucauguaguauaugccuguga

SEQ ID NO: 155196 - RNA, 1758 nt, Artificial Sequence
  derived and/or modified CDS sequence (opt3) from hemagglutinin__InfluenzaB__AGX17554
augaaggccaucauugugcugcuccuugucguuaccagcaacgcugacagaauaugcacaggcaucacuuccucuaauucaccccacgugguaaaaacggcaacccagggggaagugaacgucacaggagugauuccucugacuaccacaccaaccaagagucauuucgccaauuugaaagguacuaagacaaggggcaaauuauguccgaagugccugaacuguaccgaucuagacguugcgcucgggcggcccaagugcacgggaaauaucccuagcgcuaaaguguccauucugcacgaaguccgcccagugacuucuggcuguuuucccaucaugcaugaucgaaccaagauacgucaacuuccuaaccuguugagagguuacgagcacaucaggcucucgacacauaauguaauuaacgccgaaaaagcaccagggggacccuauaagaucggcacuucaggcagcugcccuaauguuaccaacgggaauggauucuuugccacaauggcuugggcagugccaaagaacgacaauaacaagaccgccacgaauagucugacuauugaggucccguacaucuguacagaaggugaggaucagauaaccguguggggcuuccacuccgacaacgagacucagauggcuaagcuguauggggauucuaaaccccagaaguuuacaagcuccgccaacggagugaccacgcacuacgucucacaaauuggcgguuucccuaaucagaccgaagacgggggacucccacagaguggccggaucguuguggauuauaugguacagaaaagcggcaagacagggacuauuaccuaccaacgcggaaucuuacugccccagaaaguguggugcgcgucugguagauccaaggucaucaaaggcucacuuccuuugauuggggaggcagacugucugcaugaaaaguauggaggccuaaacaagagcaaaccauacuacacaggugagcacgccaaggcuauagggaauugccccaucugggugaaaacuccgcucaagcuggccaacggcaccaaauauaggccucccgcaaaacuucugaaggagcggggauuuuucggcgcuauugccggguuuuuggaaggagguugggagggcaugaucgcgggguggcauggauacacaagucacggcgcccacgguguugcaguggcugccgaucucaaaucuacccaggaagcuauaaauaagauuacuaaaaacuuaaauucccugagcgagcuggaagucaagaaccuccagcgccuuucgggggccauggacgagcugcauaaugagaucuuggaacuagaugagaaaguggacgaccugcgagcagauacgaucucuucccaaauugaacucgccguacugcuuucaaacgagggcaucauuaauagugaagacgagcaccuguuggcucucgagagaaagcugaagaaaauguuaggaccaagcgcgguugaaauaggcaacggguguuucgagacaaagcauaaaugcaaucagaccugccuggauaggaucgcagccggaacuuuugacgcuggugaguucucccuaccuaccuuugauucucucaacauuacagccgcaagccugaaugacgauggccuugacaaccacaccaucuugcuguauuacucaacugccgcuaguucccucgccgugacacugaugaucgcaauuuucgucguguauauggucagccgggauaacgugucuuguucaauaugccuuuga

SEQ ID NO: 155197 - RNA, 1755 nt, Artificial Sequence; identical to SEQ ID NO: 155071
  derived and/or modified CDS sequence (opt3) from hemagglutinin__InfluenzaB__AGX17565

SEQ ID NO: 155198 - RNA, 1758 nt, Artificial Sequence
  derived and/or modified CDS sequence (opt3) from hemagglutinin__InfluenzaB__AGX17576
augaaggccaucauugugcugcucauggucguuaccagcaacgcugacagaauaugcacaggcaucacuuccucuaauucaccccacgugguaaaaacggcaacccagggggaggugaacgucacaggagugauuccucuuacuaccacaccaaccaagagucauuucgccaaucugaaagguacuaagacaaggggcaaauuguguccgaagugcuuaaacuguaccgaucuggacguugcgcuagggcggcccaagugcacgggaaauaucccuagcgcugaaguguccauucuccacgagguccgcccagugacuucuggcuguuuucccaucaugcaugaucgaaccaaaauacgucaacugccuaaccuucugagagguuacgaacacaucagguugucgacacauaauguaauuaacgccgagaaggcaccagggggacccuauaaaaucggcacuucaggcagcugcccuaauguuaccaacgggaauggauucuuugccacaauggcuugggcagugccaaagaacgacaauaacaaaaccgccacgaauagucucacuauugaagucccguacaucuguacagagggugaggaucagauaaccauuuggggcuuccacuccgacaacgaaacucagauggcuaagcuguauggggauucuaagccccagaaauuuacaagcuccgccaacggagugaccacgcacuacgugucacaaaucggcgguuucccuaaucagaccgaggacgggggacugccacagaguggccggauugucguugauuauauggugcaaaagagcggcaaaacagggacuaucaccuaccagcgcggaauccucuuaccccagaagguauggugcgcgucugguagauccaaagugauuaagggcucacugccucuuauaggggaagcagacuguuugcaugagaaauauggaggccugaacaagagcaagccauacuacacaggugagcacgccaaagcuaucgggaauugccccauuugggucaagacuccgcuaaaacucgccaacggcaccaaguauaggccucccgcaaaacugcuuaaggaacggggauuuuucggcgcuaucgccggguuucuggagggagguugggaaggcaugauagcgggguggcauggauacacaagucacggcgcccacgguguggcaguugcugccgauuugaagucuacccaggaggcuauuaauaaaaucacuaagaaccucaauucccugagcgaauuagaggugaaaaaccugcagcgccucucgggggccauggacgagcuucauaaugaaauccuggaguuggaugaaaaggucgacgaccuacgagcagauacgauuucuucccaaaucgagcuggccgugcuccugucaaacgaaggcauuauaaauagugaggacgagcaccuucuggcuuuggaaagaaaacucaagaagaugcugggaccaagcgcgguagagaucggcaacggguguuucgaaacaaaacauaagugcaaucagaccugcuuagauaggauugcagccggaacuuuugacgcuggugaguucucccugccuaccuuugauucucuaaacaucacagccgcaagccucaaugacgauggccuggacaaccacaccauccuuuuguauuacucaacugccgcuaguucccuggccguuacacucaugauggcaauuuucguggucuauauggugagccgggauaacgucucuuguucaauaugccuguga

SEQ ID NO: 155199 - RNA, 1758 nt, Artificial Sequence; identical to SEQ ID NO: 154562
  derived and/or modified CDS sequence (opt3) from hemagglutinin__InfluenzaB__AGX17598

SEQ ID NO: 155200 - RNA, 1758 nt, Artificial Sequence
  derived and/or modified CDS sequence (opt3) from hemagglutinin__InfluenzaB__AGX17609
augaaggccaucauugugcugcucauggucguuaccagcaacgcugacagaauaugcacaggcaucacuuccucuaauucaccccacgugguaaaaacggcaacccagggggaggugaacgucacaggagugauuccucuuacuaccacaccaaccaagagucauuucgccaaucugaaagguacugaaacaaggggcaaguuguguccgaaaugcuuaaacuguaccgaucuggacguugcgcuagggcggcccaagugcacgggaaagaucccuagcgcucgcguguccauucuccacgagguccgaccagugacuucuggcuguuuucccaucaugcaugaucguaccaaaauaagacaacugccuaaucuucugagggguuacgaacacauccgguugucgacacauaacguaauuaaugccgagaacgcaccagggggacccuauaagaucggcacuucaggcagcugcccuaauguuaccaacgggaauggauucuuugccacaauggcuugggcagugccgaaaaacgacaauaacaagaccgccacgaauagucucacuauugaagucccauacaucuguacagagggugaggaucagauaaccguguggggcuuccacuccgacaacgaaacucagauggcuaaacuguauggggauucuaagccccagaaguuuacaagcuccgccaacggagugaccacgcacuacgucucacaaauuggcgguuucccuaaucagaccgaggacgggggacugccacagaguggccgcaucguuguggauuauaugguacagaaaagcggcaagacagggacuauuaccuaccaaagaggaauccucuuaccccagaaaguguggugcgcgucugguagguccaaggucaucaaaggcucacugccucuuauuggggaagcagacuguuugcaugagaaguauggaggccugaacaaaagcaagccauacuacacaggugagcacgccaaggcuauagggaauugccccaucugggugaaaacuccgcuaaagcucgccaacggcaccaaauaucggccucccgcaaagcugcuuaaagaacgcggauuuuucggcgcuauugccggguuucuggagggagguugggaaggcaugaucgcgggguggcauggauacacaagucacggcgcccacgguguugcaguggcugccgauuugaagucuacccaggaggcuauaaauaagauuacuaaaaaccucaauucccugagcgaauuagaggucaagaaccugcagcgacucucgggggccauggacgagcuucauaaugaaauccuggaguuggaugaaaaaguggacgaccuaagagcagauacgaucucuucccaaauugagcuggccguacuccugucaaacgaaggcaucauuaauagugaggacgagcaccuucuggcuuuggaaaggaagcucaaaaagaugcugggaccaagcgcgguugagauaggcaacggguguuucgaaacaaagcauaaaugcaaucagaccugcuuagaucggaucgcagccggaacuuuugacgcuggugaguucucccugccuaccuuugauucucuaaacauuacagccgcaagccucaaugacgauggccuggacaaccacaccauccuuuuguauuacucaacugccgcuaguucccuggccgugacacucaugaucgcaauuuucgucguguauauggucagccgugauaacgugucuuguucaauaugccuguga

SEQ ID NO: 155201 - RNA, 1758 nt, Artificial Sequence; identical to SEQ ID NO: 155029
  derived and/or modified CDS sequence (opt3) from hemagglutinin__InfluenzaB__AGX17620

SEQ ID NO: 155202 - RNA, 1758 nt, Artificial Sequence; identical to SEQ ID NO: 154562
  derived and/or modified CDS sequence (opt3) from hemagglutinin__InfluenzaB__AGX17631

SEQ ID NO: 155203 - RNA, 1758 nt, Artificial Sequence; identical to SEQ ID NO: 154686
  derived and/or modified CDS sequence (opt3) from hemagglutinin__InfluenzaB__AGX17642

SEQ ID NO: 155204 - RNA, 1758 nt, Artificial Sequence; identical to SEQ ID NO: 155029
  derived and/or modified CDS sequence (opt3) from hemagglutinin__InfluenzaB__AGX17653

SEQ ID NO: 155205 - RNA, 1758 nt, Artificial Sequence; identical to SEQ ID NO: 154562
  derived and/or modified CDS sequence (opt3) from hemagglutinin__InfluenzaB__AGX17664

SEQ ID NO: 155206 - RNA, 1758 nt, Artificial Sequence; identical to SEQ ID NO: 154686
  derived and/or modified CDS sequence (opt3) from hemagglutinin__InfluenzaB__AGX17675

SEQ ID NO: 155207 - RNA, 1758 nt, Artificial Sequence; identical to SEQ ID NO: 155029
  derived and/or modified CDS sequence (opt3) from hemagglutinin__InfluenzaB__AGX17686

SEQ ID NO: 155208 - RNA, 1758 nt, Artificial Sequence
  derived and/or modified CDS sequence (opt3) from hemagglutinin__InfluenzaB__AGX17697
augaaggccaucauugugcugcucauggucguuaccagcaacgcugacagaauaugcacaggcaucacuuccucuaauucaccccacgugguaaaaacggcaacccagggggaagugaacgucacaggagugauuccucuuacuaccacaccaaccaagagucauuucgccaaucugaaagguacugaaacaaggggcaaguuguguccgaaaugcuuaaacuguaccgaucuggacguugcgcuagggcggcccaagugcacgggagagaucccuagcgcucgcguguccauucuccacgaaguccgaccagugacuucuggcuguuuucccaucaugcaugaucguaccaagauaagacaacugccuaaucuucugagggguuacgagcacauccgguugucgacacauaacgccauuaaugcagaaaacgccccagggggacccuauaaaaucggcacuucaggcagcugcccuaauguaaccaacgggaauggauucuuugcuacaauggcaugggccguuccaaagaacgacaauaacaaaaccgcuacgaauagucucacuauugaggugccguacaucuguacagagggugaagaucagauaaccgucuggggcuuccacuccgacaacgagacucagauggccaagcuguauggggauucuaaaccccagaaguuuacaagcuccgcgaacggagugaccacgcacuacgugucacaaauuggcgguuucccuaaucagaccgaagacgggggacugccacagaguggccgcaucgucguugauuauauggugcaaaagagcggcaaaacagggacuauuaccuaccagagaggaauccucuuaccccagaagguauggugcgcaucugguagguccaaagugaucaagggcucacugccucuuauuggggaggccgacuguuugcaugagaaauauggaggccugaacaagagcaaaccauacuacacaggugaacacgcuaaggccauagggaauugccccaucugggucaagacuccgcuaaaacucgcaaacggcaccaaguaucggccucccgcuaaacugcuuaaggagcgcggauuuuucggcgccauugcgggguuucuggaaggagguugggagggcaugaucgccggguggcauggauacacaagucacggcgcacacgguguggcuguugccgcugauuugaaaucuacccaggaagccauaaauaagauuacuaagaaccucaauucccugagcgaguuagaggugaaaaaccugcagcgacucucgggggcaauggacgaacuucauaaugagauccuggaauuggaugagaaggucgacgaccuaagagccgauacgaucucuucccaaauugaacuggcugugcuccugucaaacgagggcaucauuaauagugaggacgaacaccuucuggcguuggagaggaaacucaagaaaaugcugggaccaagcgcaguagaaauaggcaacggguguuucgagacaaagcauaagugcaaucagaccugcuuagaucggaucgccgcuggaacuuuugacgccggugaguucucccugccuaccuuugauucucuaaacauuacagcagccagccucaaugacgauggccuggacaaccacaccauccuuuuguauuacucaacugcugccaguucccuggcaguuacacucaugaucgcgauuuucguggucuauauggugagccgugauaacgucucuuguucaauaugccuguga

SEQ ID NO: 155209 - RNA, 1758 nt, Artificial Sequence; identical to SEQ ID NO: 154686
  derived and/or modified CDS sequence (opt3) from hemagglutinin__InfluenzaB__AGX17708

SEQ ID NO: 155210 - RNA, 1758 nt, Artificial Sequence; identical to SEQ ID NO: 155029
  derived and/or modified CDS sequence (opt3) from hemagglutinin__InfluenzaB__AGX17719

SEQ ID NO: 155211 - RNA, 1758 nt, Artificial Sequence; identical to SEQ ID NO: 154686
  derived and/or modified CDS sequence (opt3) from hemagglutinin__InfluenzaB__AGX17730

SEQ ID NO: 155212 - RNA, 1758 nt, Artificial Sequence; identical to SEQ ID NO: 154562
  derived and/or modified CDS sequence (opt3) from hemagglutinin__InfluenzaB__AGX17741

SEQ ID NO: 155213 - RNA, 1758 nt, Artificial Sequence; identical to SEQ ID NO: 155029
  derived and/or modified CDS sequence (opt3) from hemagglutinin__InfluenzaB__AGX17752

SEQ ID NO: 155214 - RNA, 1758 nt, Artificial Sequence; identical to SEQ ID NO: 155029
  derived and/or modified CDS sequence (opt3) from hemagglutinin__InfluenzaB__AGX17774

SEQ ID NO: 155215 - RNA, 1758 nt, Artificial Sequence
  derived and/or modified CDS sequence (opt3) from hemagglutinin__InfluenzaB__AGX17785
augaaggccaucauugugcugcucauggucguuaccagcaacgcugacagaauaugcacaggcaucacuuccucuaauucaccccacgugguaaaaacggcaacccagggggaggugaacgucacaggagugauuccucuuacuaccacaccaaccaagagucauuucgccaaucugaaagguacuaagacaaggggcaaauuguguccgaagugcuuaaacuguaccgaucuggacguugcgcuagggcggcccaagugcacgggaaauaucccuagcgcugaaguguccauucuccacgagguccgcccagugacuucuggcuguuuucccaucaugcaugaucgaaccaaaauacgucaacugccuaaccuucugagagguuacgaacacguaagguugucgacacauaauguuaucaacgccgagaaggcaccagggggacccuauaaaauuggcacuucaggcagcugcccuaaugugaccaacgggaauggauucuuugccacaauggcuugggcagucccaaagaacgacaauaacaaaaccgccacgaauagucucacuaucgaagugccguacauuuguacagagggugaggaucagaucaccauauggggcuuccacuccgacaacgaaacucagauggcuaagcuguauggggauucuaagccccagaaauuuacaagcuccgccaacggagugaccacgcacuacgucucacaaauuggcgguuucccuaaucagaccgaggacgggggacugccacagaguggccggaucguuguggauuauaugguacaaaagagcggcaaaacagggacuauuaccuaccagcgcggaauccucuuaccccagaagguguggugcgcgucugguagauccaaagucaucaagggcucacugccucuuauuggggaagcagacuguuugcaugagaaauauggaggccugaacaagagcaagccauacuacacaggugagcacgccaaagcuauagggaauugccccaucugggugaagacuccgcuaaaacucgccaacggcaccaaguauaggccucccgcaaaacugcuuaaggaacggggauuuuucggcgcuauugccggguuucuggagggagguugggaaggcaugaucgcgggguggcauggauacacaagucacggcgcccacgguguugcaguggcugccgauuugaagucuacccaggaggcuauaaauaaaauuacuaagaaccucaauucccugagcgaauuagaggucaaaaaccugcagcgccucucgggggccauggacgagcuucauaaugaaauccuggaguuggaugaaaagguggacgaccuacgagcagauacgaucucuucccaaauugagcuggccguacuccugucaaacgaaggcaucauuaauagugaggacgagcaccuucuggcuuuggaaagaaaacucaagaagaugcugggaccaagcgcgguugagauaggcaacggguguuucgaaacaaaacauaagugcaaucagaccugcuuagauaggaucgcagccggaacuuuugacgcuggugaguucucccugccuaccuuugauucucuaaacauuacagccgcaagccucaaugacgauggccuggacaaccacaccauccuuuuguauuacucaacugccgcuaguucccuggccgugacacucaugaucgcaauuuucgucguguauauggucagccgggauaacgugucuuguucaauaugccuguga

SEQ ID NO: 155216 - RNA, 1758 nt, Artificial Sequence; identical to SEQ ID NO: 155029
  derived and/or modified CDS sequence (opt3) from hemagglutinin__InfluenzaB__AGX17796

SEQ ID NO: 155217 - RNA, 1758 nt, Artificial Sequence; identical to SEQ ID NO: 154613
  derived and/or modified CDS sequence (opt3) from hemagglutinin__InfluenzaB__AGX17807

SEQ ID NO: 155218 - RNA, 1758 nt, Artificial Sequence; identical to SEQ ID NO: 155200
  derived and/or modified CDS sequence (opt3) from hemagglutinin__InfluenzaB__AGX17818

SEQ ID NO: 155219 - RNA, 1758 nt, Artificial Sequence
  derived and/or modified CDS sequence (opt3) from hemagglutinin__InfluenzaB__AGX17829
augaaggccaucauugugcugcucauggucguuaccagcaacgcugacagaauaugcacaggcaucacuuccucuaauucaccccacgugguaaaaacggcaacccagggggaggugaacgucacaggagugauuccucuuacuaccacaccaaccaagagucauuucgccaaucugaaagguacugaaacaaggggcaaguuguguccgaaaugcuuaaacuguaccgaucuggacguugcgcuagggcggcccaagugcacgggaaagaucccuagcgcucgcguguccauucuccacgagguccgaccagugacuucuggcuguuuucccaucaugcaugaucguaccaaaauaagacaacugccuaaucuucugagggguuacgaacacauccgguugucgacacauaacguaauuaaugccgagaacgcaccagggggacccuauaagaucggcacuucaggcagcugcccuaauguuaccaacgggaauggauucuuugccacaauggcuugggcagugccgaaaaacgacaauaacaagaccgccacgaauagucucacuauugaagucccauacaucuguacagagggugaggaucagauaaccguguggggcuuccacuccgacaacgaaacucagauggcuaaacuguauggggauucuaagccccagaaguuuacaagcuccgccaacggagugaccacgcacuacgucucacaaauuggcgguuucccuaaucagaccgaggacgggggacugccacagaguggccgcaucguuguggauuauaugguacagaaaagcggcaagacagggacuauuaccuaccaaagaggaauccucuuaccccagaaaguguggugcgcgucugguagguccaaggucaucaaaggcucacugccucuuauuggggaagcagacuguuugcaugagaaguauggaggccugaacaaaagcaagccauacuacacaggugagcacgccaaggcuauagggaauugccccaucugggugaaaacuccgcuaaagcucgccaacggcaccaaauaucggccucccgcaaagcugcuuaaagaacgcggauuuuucggcgcuauugccggguuucuggagggagguugggaaggcaugaucgcgggguggcauggauacacaagucacggcgcccacgguguugcaguggcugccgauuugaagucuacccaggaggcugucaauaagauaacuaaaaaccucaauucccugagcgaauuagaggugaagaaccugcagcgacucucgggggccauggacgagcuucauaaugaaauucuggaguuggaugaaaaaguagacgaccuaagagcagauacgaucucuucccaaaucgagcuggccguucuccugucaaacgaaggcauuaucaauagugaggacgagcaccuucuggcuuuggaaaggaagcucaaaaagaugcugggaccaagcgcgguggagauuggcaacggguguuucgaaacaaagcauaaaugcaaucagaccugcuuagaucggauagcagccggaacuuuugacgcuggugaguucucccugccuaccuuugauucucuaaacaucacagccgcaagccucaaugacgauggccuggacaaccacaccauucuuuuguauuacucaacugccgcuaguucccuggccgucacacucaugaucgcaaucuucguggucuauauggugagccgugauaacguuucuuguucaauuugccuguga

SEQ ID NO: 155220 - RNA, 1758 nt, Artificial Sequence; identical to SEQ ID NO: 154686
  derived and/or modified CDS sequence (opt3) from hemagglutinin__InfluenzaB__AGX17840

SEQ ID NO: 155221 - RNA, 1758 nt, Artificial Sequence; identical to SEQ ID NO: 155029
  derived and/or modified CDS sequence (opt3) from hemagglutinin__InfluenzaB__AGX17851

SEQ ID NO: 155222 - RNA, 1758 nt, Artificial Sequence
  derived and/or modified CDS sequence (opt3) from hemagglutinin__InfluenzaB__AGX17862
augaaggccaucauugugcugcucauggucguuaccagcaacgcugacagaauaugcacaggcaucacuuccucuaauucaccccacgugguaaaaacggcaacccagggggaggugaacgucacaggagugauuccucuuacuaccacaccaaccaagagucauuucgccaaucugaaagguacuaagacaaggggcaaauuguguccgaagugcuuaaacuguaccgaucuggacguugcgcuagggcggcccaagugcacgggaaauaucccuagcgcugaaguguccauucuccacgagguccgcccagugacuucuggcuguuuucccaucaugcaugaucgaaccaaaauacgucaacugccuaaccuucugagagguuacgaacacaucagguugucgacacauaauguaauuaacgccgagaaggcaccagggggacccuauaaaaucggcacuucaggcagcugcccuaauguuaccaacgggaauggauucuuugccacaauggcuugggcagugccaaagaacgacaauaacaaaaccgccacgaauagucucacuauugaagucccguacaucuguacagagggugaggaucagauaaccauuuggggcuuccacuccgacaacgaaacucagauggcuaagcuguauggggauucuaagccccagaaauuuacaagcuccgccaacggagugaccacgcacuacgugucacaaaucggcgguuucccuaaucagaccgaggacgggggacugccacagaguggccggauugucguugauuauauggugcaaaagagcggcaaaacagggacuaucaccuaccagcgcggaauccucuuaccccagaagguauggugcgcgucugguagauccaaagugauuaagggcacacugccucuuauaggggaagcagacuguuugcaugagaaauauggaggccugaacaagucaaagccauacuacacuggugagcacgccaaagcuaucgggaauugccccauuugggucaagaccccgcuaaaacucgccaacggcacaaaguauaggccucccgcaaaacugcuuaaggaacggggauuuuucggcgcuaucgccggguuucuggagggagguugggaaggcaugauagcgggguggcauggauacaccagccacggcgcccacgguguggcaguugcugccgauuugaagaguacucaggaggcuauuaauaaaaucacgaagaaccucaauucucuguccgaauuagaggugaaaaaccugcagcgccucagcggggccauggacgagcuucauaaugaaauccuggaguuggaugaaaaggucgacgaccuacgagcagauacaauuucgucucaaaucgagcuggccgugcuccuguccaacgaaggcauuauaaauucagaggacgagcaccuucuggcuuuggaaagaaaacucaagaagaugcugggaccaagugcgguagagaucggcaacggguguuucgaaaccaaacauaagugcaaucagacuugcuuagauaggauugcagccggaaccuuugacgcuggugaguucagccugccuacauuugauucccuaaacaucaccgccgcaucucucaaugacgauggccuggacaaccacacuauccuuuuguauuacagcacagccgcuucaagucuggccguuacgcucaugauugcaauauucguggucuauauggugucccgggauaacgucagcuguucuaucugccuguga

SEQ ID NO: 155223 - RNA, 1758 nt, Artificial Sequence
  derived and/or modified CDS sequence (opt3) from hemagglutinin__InfluenzaB__AGX17873
augaaggccaucauugugcugcucauggucguuaccagcaacgcugacagaauaugcacaggcaucacuuccucuaauucaccccacgugguaaaaacggcaacccagggggaggugaacgucacaggagugauuccucuuacuaccacaccaaccaagagucauuucgccaaucugaaagguacugaaacaaggggcaaguuguguccgaaaugcuuagauuguaccgaccuggauguugcgcuagggcggcccaagugcacgggaaacaucccuagcgcucgcguguccauucuccacgagguccgaccagugacuucuggcuguuuucccaucaugcaugaccguaccaagauaagacaacugccuaaucuucugagggguuacgaacacauccgguugucgacacauaacguaauuaaugccgagaacgcaccagggggacccuauaaaaucggcacuucaggcagcugcccuaauguuaccaacgggaauggauucuuugccacaauggcuugggcagugccaaagaacgauaauaacaaaaccgccacgaauagucucacuauugaagucccguacaucuguacagagggugaggaccagauaaccguguggggcuuccacuccgauaacgaaacucagauggcuaagcuguauggggacucuaaaccccagaaguuuacaagcuccgccaacggagugaccacgcacuacgucucacaaauuggcgguuucccuaaucagaccgaggaugggggacugccacagaguggccgcaucguuguggacuauaugguacaaaagagcggcaaaacagggacuauuaccuaccagagaggaauccucuuaccccagaagguguggugcgcgucugguagguccaaagucaucaagggcucacugccucuuauuggggaagcagauuguuugcaugagaaauauggaggccugaacaagagcaaaccauacuacacaggugagcacgccaaggcuauagggaauugccccaucugggugaagacuccgcuaaaacucgccaacggcaccaaguaucggccucccgcaaaacugcuuaaggaacgcggauuuuucggcgcuauugccggguuucuggagggagguugggaaggcaugaucgcgggguggcauggauacacaagucacggcgcccacgguguugcaguggcugccgacuugaaaucuacccaggaggcuauaaauaagauuacuaagaaccucaauucccugagcgaauuagaggucaaaaaccugcagcgacucucgggggccauggaugagcuucauaaugaaauccuggaguuggacgaaaagguggacgaucuaagagcagacacgaucucuucccaaauugagcuggccguacuccugucaaacgaaggcaucauuaauagugaggaugagcaccuucuggcuuuggaaaggaaacucaagaaaaugcugggaccaagcgcgguugagauaggcaacggguguuucgaaacaaagcauaagugcaaucagaccugcuuagaccggaucgcagccggaacuuuugaugcuggugaguucucccugccuaccuuugacucucuaaacauuacagccgcaagccucaaugaugacggccuggauaaccacaccauccuuuuguauuacucaacugccgcuaguucccuggccgugacacucaugaucgcaauuuucgucguguauauggucagccgugacaacgugucuuguucaauaugccuguga

SEQ ID NO: 155224 - RNA, 1758 nt, Artificial Sequence; identical to SEQ ID NO: 154686
  derived and/or modified CDS sequence (opt3) from hemagglutinin__InfluenzaB__AGX17884

SEQ ID NO: 155225 - RNA, 1758 nt, Artificial Sequence
  derived and/or modified CDS sequence (opt3) from hemagglutinin__InfluenzaB__AGX17895
augaaggccaucauugugcugcucauggucguuaccagcaacgcugacagaauaugcacaggcaucacuuccucuaauucaccccacgugguaaaaacggcaacccagggggaggugaacgucacaggagugauuccucuuacuaccacaccaaccaagagucauuucgccaaucugaaagguacugaaacaaggggcaaguuguguccgaaaugcuuaaacuguaccgaucuggacguugcgcuagggcggcccaagugcacgggaaauaucccuagcgcucgcguguccauucuccacgagguccgaccagugacuucuggcuguuuucccaucaugcaugaucguaccaagauaagacaacugccuaaccuucugagggguuacgaacacauccgguugucgacacauaauguaauuaacgccgagaaugcaccagggggacccuauaaaaucggcacuucaggcagcugcccuaacguuaccaaugggaacggauucuuugccacaauggcuugggcagugccaaagaaugacaacaauaaaaccgccacgaacagucucacuauugaagucccguacaucuguacagagggugaggaucagauaaccguguggggcuuccacuccgacaacgaaaaucagauggcuaagcuguauggggauucuaaaccccagaaguuuacuagcuccgccaacggagugacaacccacuacgucucacaaauuggcgguuucccuaaucagacggaggacgggggacugccacagaguggccgcaucguuguggauuauaugguacaaaagagcggcaaaaccgggacaauuacuuaccagagaggaauccucuuaccccagaagguguggugcgcgucugguagguccaaagucaucaagggcucacugccucuuauuggggaagcagacuguuugcaugagaaauauggaggccugaacaagagcaaaccauacuacaccggugagcacgccaaggcuauagggaauugccccaucugggugaagacaccgcuaaaacucgccaacggcacuaaguaucggccucccgcaaaacugcuuaaggaacgcggauuuuucggcgcuauugccggguuucuggagggagguugggaaggcaugaucgcgggguggcauggauacaccagucacggcgcccacgguguugcaguggcugccgauuugaaaucuacacaggaggcuauaaauaagauuaccaagaaccucaauucccugagcgaauuagaggucaaaaaccugcagcgacucucgggggccauggacgagcuucauaaugaaauccuggaguuggaugaaaagguggacgaccuaagagcagauacuaucucuucccaaauugagcuggccguacuccugucaaacgaaggcaucauuaauagugaggacgagcaccuucuggcuuuggaaaggaaacucaagaaaaugcugggaccaagcgcgguugagauaggcaacggguguuucgaaacgaagcauaagugcaaucagacaugcuuagaucggaucgcagccggaaccuuugacgcuggugaguucucccugccuacuuuugauucucuaaacauuaccgccgcaagccucaacgacgauggccuggacaaucacacaauccuuuuguauuacucaaccgccgcuaguucccuggccgugacucucaugaucgcaauuuucgucguguauauggucagccgugauaacgugucuuguucaauaugccuguga

SEQ ID NO: 155226 - RNA, 1758 nt, Artificial Sequence; identical to SEQ ID NO: 154686
  derived and/or modified CDS sequence (opt3) from hemagglutinin__InfluenzaB__AGX17906

SEQ ID NO: 155227 - RNA, 1758 nt, Artificial Sequence; identical to SEQ ID NO: 154686
  derived and/or modified CDS sequence (opt3) from hemagglutinin__InfluenzaB__AGX17917

SEQ ID NO: 155228 - RNA, 1758 nt, Artificial Sequence
  derived and/or modified CDS sequence (opt3) from hemagglutinin__InfluenzaB__AGX17928
augaagaccaucauugugcugcucauggucguuacaagcaacgccgacagaauaugcacuggcaucacguccucuaauucaccccacgugguaaaaaccgcuacacagggggaggugaacgucacuggagugauuccucuuaccacaaccccaacuaagagucauuucgcaaaucugaaagguacaaagaccaggggcaaauuguguccgaagugcuuaaacuguacggaucuggacguugcccuagggcggcccaagugcacuggaaauaucccuagcgcggaaguguccauucuccacgagguccgcccagugaccucuggcuguuuucccaucaugcaugaucgaacaaaaauacgucaacugccuaaccuucugagagguuacgaacacaucagguugucgacucauaauguaauuaacgcugagaaggccccagggggacccuauaaaaucggcaccucaggcagcugcccuaauguuacaaacgggaauggauucuuugcaaccauggccugggcugugccaaagaacgacaauaacaaaacggcaacuaauagucucacaauugaagucccguacaucuguaccgagggugaggaucagauaacuauuuggggcuuccacuccgacaacgaaacacagauggccaagcuguauggggauucuaagccccagaaauuuaccagcuccgcuaacggagugacgacccacuacgugucacaaaucggcgguuucccuaaucagacagaggacgggggacugccacagaguggccggauugucguugauuauauggugcaaaagagcggcaaaacugggaccaucacauaccagcgcggaauccucuuaccccagaagguauggugcgccucugguagauccaaagugauuaagggcacucugccucuuauaggggaagcggacuguuugcaugagaaauauggaggccugaacaagucaaagccauacuacaccggugagcacgcaaaagccaucgggaauugccccauuugggucaagacaccgcuaaaacucgcuaacggcaccaaguauaggccucccgccaaacugcuuaaggaacggggauuuuucggcgcaaucgcuggguuucuggagggagguugggaaggcaugauagccggguggcauggauacacuagccacggcgcgcacgguguggccguugcagcugauuugaagaguacgcaggaggccauuaauaaaaucacaaagaaccucaauucucuguccgaauuagaggugaaaaaccugcagcgccucagcggggcuauggacgagcuucauaaugaaauccuggaguuggaugaaaaggucgacgaccuacgagccgauaccauuucgucucaaaucgagcuggcagugcuccuguccaacgaaggcauuauaaauucagaggacgagcaccuucuggccuuggaaagaaaacucaagaagaugcugggaccaagugcuguagagaucggcaacggguguuucgaaacuaaacauaagugcaaucagaccugcuuagauaggauugcggcaggaacauuugacgccggugaguucagccugccuaccuuugauucccuaaacaucacugcugccucucucaaugacgauggccuggacaaccacacaauccuuuuguauuacagcacggcagccucaagucuggcuguuacccucaugauugccauauucguggucuauauggugucccgggauaacgucagcuguucuaucugccuguga

SEQ ID NO: 155229 - RNA, 1758 nt, Artificial Sequence; identical to SEQ ID NO: 154562
  derived and/or modified CDS sequence (opt3) from hemagglutinin__InfluenzaB__AGX17939

SEQ ID NO: 155230 - RNA, 1758 nt, Artificial Sequence; identical to SEQ ID NO: 154562
  derived and/or modified CDS sequence (opt3) from hemagglutinin__InfluenzaB__AGX17950

SEQ ID NO: 155231 - RNA, 1758 nt, Artificial Sequence; identical to SEQ ID NO: 154562
  derived and/or modified CDS sequence (opt3) from hemagglutinin__InfluenzaB__AGX17961

SEQ ID NO: 155232 - RNA, 1758 nt, Artificial Sequence; identical to SEQ ID NO: 155029
  derived and/or modified CDS sequence (opt3) from hemagglutinin__InfluenzaB__AGX17972

SEQ ID NO: 155233 - RNA, 1758 nt, Artificial Sequence; identical to SEQ ID NO: 154562
  derived and/or modified CDS sequence (opt3) from hemagglutinin__InfluenzaB__AGX17983

SEQ ID NO: 155234 - RNA, 1758 nt, Artificial Sequence; identical to SEQ ID NO: 154686
  derived and/or modified CDS sequence (opt3) from hemagglutinin__InfluenzaB__AGX17994

SEQ ID NO: 155235 - RNA, 1758 nt, Artificial Sequence
  derived and/or modified CDS sequence (opt3) from hemagglutinin__InfluenzaB__AGX18005
augaaggccaucauugugcugcucauggucguuaccagcaacgcugacagaauaugcacaggcaucacuuccucuaauucaccccacgugguaaaaacggcaacccagggggaggugaacgucacaggagugauuccucuuacuaccacaccaaccaagagucauuucgccaaucugaaagguacugaaacaaggggcaaguuguguccgaaaugcuuaaacuguaccgaucuggacguugcgcuagggcggcccaagugcacgggaaauaucccuagcgcucgcguguccauucuccacgagguccgaccagugacuucuggcuguuuucccaucaugcaugaucguaccaagauaagacaacugccuaaccuucugagggguuacgaacacauccgguugucgacacauaauguaauuaacgccgagaaugcaccagggggacccuauaaaaucggcacuucaggcagcugcccuaacguuaccaaugggaacggauucuuugccacaauggcuugggcagugccaaagaaugacaacaauaaaaccgccacgaacagucucacuauugaagucccguacaucuguacagagggugaggaucagauaaccguguggggcuuccacuccgacaacgaaacucagauggcuaagcuguauggggauucuaaaccccagaaguuuacaagcuccgccaauggagugaccacgcacuacgucucacaaauuggcgguuucccuaaccagaccgaggacgggggacugccacagaguggccgcaucguuguggauuauaugguacaaaagagcggcaaaacagggacuauuaccuaccagagaggaauccucuuaccccagaagguguggugcgcgucugguagguccaaagucaucaagggcucacugccucuuauuggggaagcagacuguuugcaugagaaauauggaggccugaauaagagcaaaccauacuacacaggugagcacgccaaggcuauagggaacugccccaucugggugaagacuccgcuaaaacucgccaauggcaccaaguaucggccucccgcaaaacugcuuaaggaacgcggauuuuucggcgcuauugccggguuucuggagggagguugggaaggcaugaucgcgggguggcauggauacacaagucacggcgcccacgguguugcaguggcugccgauauaaaaucuacccaggaggcuauuaacaagaucacuaagaauuugaacucccucagcgaacuggaggucaaaaauuuacagcgacugucgggggccauggacgagcuccauaacgaaauccuugagcuggaugaaaagguggacgacuugagagcagauacgauuucuucccaaaucgagcuagccguacugcucucaaaugaaggcauuauaaacagugaggacgagcaucugcuugcucuggaaaggaaauugaagaaaaugcucggaccaagcgcgguugagaucggcaauggguguuucgaaacaaagcacaagugcaaccagaccugccuggaucggauugcagccggaacuuuugacgcuggugaguucuccuuaccuaccuuugauucucugaauaucacagccgcaagccuaaacgacgauggccucgacaaccacaccauccugcuuuauuacucaacugccgcuaguuccuuggccgugacacugaugauugcaauauucgucguguauauggucagccgugauaaugugucuuguucaaucugccucuga

SEQ ID NO: 155236 - RNA, 1758 nt, Artificial Sequence
  derived and/or modified CDS sequence (opt3) from hemagglutinin__InfluenzaB__AGX18016
augaaggccaucauugugcugcucauggucguuaccagcaacgcugacagaauaugcacaggcaucacuuccucuaauucaccccacgugguaaaaacggcaacccagggggaggugaacgucacaggagugauuccucuuacuaccacaccaaccaagagucauuucgccaaucugaaagguacugaaacaaggggcaaguuguguccgaaaugcuuaaacuguaccgaucuggacguugcgcuagggcggcccaagugcacgggaaauaucccuagcgcucgcguguccauucuccacgagguccgaccagugacuucuggcuguuuucccaucaugcaugaucguaccaagauaagacaacugccuaaccuucugagggguuacgaacacauccgguugucgacacauaauguaauuaacgccgagaaugcaccagggggacccuauaaaaucggcacuucaggcagcugcccuaacguuaccaaugggaacggauucuuugccacaauggcuugggcagugccaaagaaugacaacaauaaaaccgccacgaacagucucacuauugaagucccguacaucuguauagagggugaggaucagauuacaguguggggcuuccacuccgacaacgaaacccagauggcuaagcuguauggggauucuaaaccccagaaguuuacuagcuccgccaauggagugacaacccacuacgucucacaaaucggcgguuucccuaaccagacggaggacgggggacugccacagaguggccgcauuguuguggauuauaugguacaaaagagcggcaaaaccgggacaaucacuuaccagagaggaauccucuuaccccagaagguguggugcgcgucugguagguccaaagucauuaagggcucacugccucuuauaggggaagcagacuguuugcaugagaaauauggaggccugaauaagagcaaaccauacuacaccggugagcacgccaaggcuaucgggaacugccccauuugggugaagacaccgcuaaaacucgccaauggcacuaaguaucggccucccgcaaaacugcuuaaggaacgcggauuuuucggcgcuaucgccggguuucuggagggagguugggaaggcaugauagcgggguggcauggauacaccagucacggcgcccacgguguugcaguggcugccgauuugaaaucuacacaggaggcuauuaacaagaucaccaagaaucucaacucccugagcgaauuagaggucaaaaaucugcagcgacucucgggggccauggacgagcuucauaacgaaauccuggaguuggaugaaaagguggacgaccuaagagcagauacuauuucuucccaaaucgagcuggccguacuccugucaaaugaaggcauuauaaacagugaggacgagcaccuucuggcuuuggaaaggaaacucaagaaaaugcugggaccaagcgcgguugagaucggcaauggguguuucgaaacgaagcauaagugcaaccagacaugcuuagaucggauugcagccggaaccuuugacgcuggugaguucucccugccuacuuuugauucucuaaauaucaccgccgcaagccucaacgacgauggccuggacaaccacacaauccuuuuguauuacucaaccgccgcuaguucccuggccgugacucucaugauugcaauauucgucguguauauggucagccgugauaaugugucuuguucaaucugccuguga

SEQ ID NO: 155237 - RNA, 1758 nt, Artificial Sequence; identical to SEQ ID NO: 155200
  derived and/or modified CDS sequence (opt3) from hemagglutinin__InfluenzaB__AGX18027

SEQ ID NO: 155238 - RNA, 1758 nt, Artificial Sequence; identical to SEQ ID NO: 154686
  derived and/or modified CDS sequence (opt3) from hemagglutinin__InfluenzaB__AGX18038

SEQ ID NO: 155239 - RNA, 1758 nt, Artificial Sequence; identical to SEQ ID NO: 154686
  derived and/or modified CDS sequence (opt3) from hemagglutinin__InfluenzaB__AGX18049

SEQ ID NO: 155240 - RNA, 1758 nt, Artificial Sequence; identical to SEQ ID NO: 154686
  derived and/or modified CDS sequence (opt3) from hemagglutinin__InfluenzaB__AGX18060

SEQ ID NO: 155241 - RNA, 1758 nt, Artificial Sequence; identical to SEQ ID NO: 154562
  derived and/or modified CDS sequence (opt3) from hemagglutinin__InfluenzaB__AGX18071

SEQ ID NO: 155242 - RNA, 1758 nt, Artificial Sequence; identical to SEQ ID NO: 155222
  derived and/or modified CDS sequence (opt3) from hemagglutinin__InfluenzaB__AGX18082

SEQ ID NO: 155243 - RNA, 1758 nt, Artificial Sequence; identical to SEQ ID NO: 155222
  derived and/or modified CDS sequence (opt3) from hemagglutinin__InfluenzaB__AGX18093

SEQ ID NO: 155244 - RNA, 1758 nt, Artificial Sequence; identical to SEQ ID NO: 155029
  derived and/or modified CDS sequence (opt3) from hemagglutinin__InfluenzaB__AGX18104

SEQ ID NO: 155245 - RNA, 1758 nt, Artificial Sequence; identical to SEQ ID NO: 154686
  derived and/or modified CDS sequence (opt3) from hemagglutinin__InfluenzaB__AGX18115

SEQ ID NO: 155246 - RNA, 1758 nt, Artificial Sequence; identical to SEQ ID NO: 154686
  derived and/or modified CDS sequence (opt3) from hemagglutinin__InfluenzaB__AGX18126

SEQ ID NO: 155247 - RNA, 1758 nt, Artificial Sequence; identical to SEQ ID NO: 154562
  derived and/or modified CDS sequence (opt3) from hemagglutinin__InfluenzaB__AGX18137

SEQ ID NO: 155248 - RNA, 1758 nt, Artificial Sequence; identical to SEQ ID NO: 155222
  derived and/or modified CDS sequence (opt3) from hemagglutinin__InfluenzaB__AGX18148

SEQ ID NO: 155249 - RNA, 1758 nt, Artificial Sequence; identical to SEQ ID NO: 154562
  derived and/or modified CDS sequence (opt3) from hemagglutinin__InfluenzaB__AGX18159

SEQ ID NO: 155250 - RNA, 1758 nt, Artificial Sequence; identical to SEQ ID NO: 154562
  derived and/or modified CDS sequence (opt3) from hemagglutinin__InfluenzaB__AGX18170

SEQ ID NO: 155251 - RNA, 1758 nt, Artificial Sequence; identical to SEQ ID NO: 155222
  derived and/or modified CDS sequence (opt3) from hemagglutinin__InfluenzaB__AGX18181

SEQ ID NO: 155252 - RNA, 1758 nt, Artificial Sequence
  derived and/or modified CDS sequence (opt3) from hemagglutinin__InfluenzaB__AGX18192
augaaggccaucauugugcugcucauggucguuaccagcaacgcugacagaauaugcacaggcaucacuuccucuaauucaccccacgugguaaaaacggcaacccagggggaggugaacgucacaggagugauuccucuuacuaccacaccaaccaagagucauuucgccaaucugaaagguacuaagacaaggggcaaauuguguccgaagugcuuaaacuguaccgaucuggacguugcgcuagggcggcccaagugcacgggaaauaucccuagcgcugaaguguccauucuccacgagguccgcccagugacuucuggcuguuuucccaucaugcaugaucgaaccaaaauacgucaacugccuaaccuucugagagguuacgaacacaucagguugucgacacauaauguaauuaacgccgagaaggcaccagggggacccuauaaaaucggcacuucaggcagcugcccuaauguuaccaacgggaauggauucuuugccacaauggcuugggcagugccaaagaacgacaauaacaaaaccgccacgaauagucucacuauugaagucccguacaucuguacagagggugaggaucagauaaccauuuggggcuuccacuccgacaacgaaacucagauggcuaagcuguauggggauucuaagccccagaaauuuacaagcuccaccaacggagugacgacccacuacgugucacaaaucggcgguuucccuaaucagacagaggacgggggacugccacagaguggccggauugucguugauuauauggugcagaagcccggcaaaacugggaccaucacauaccaacgcggaauccucuuaccucagaagguauggugcgccagcgguagaucuaaagugauuaagggcucccugccacuuauaggggaagcggacuguuugcaugagaaauauggaggccugaacaagucaaagcccuacuacacuggugagcacgcaaaagccaucgggaauugcccgauuugggucaagaccccucuaaaacucgcuaacggcacaaaguauaggcccccagccaaacugcuuaaggaacggggauuuuucggcgcaaucgcuggguuucuggagggagguugggaaggcaugauagccggguggcauggauacaccagccacggcgcgcacgguguggccguugcagcugauuugaagaguacucaggaggccauuaauaaaaucacgaagaaccucaauucucuguccgaauuagaggugaaaaaccugcagcgccucagcucggcuauggacgagcuucauaaugaaauccuggaguuggaugaaaaggucgacgaccuacgagccgauacaauuucuucccaaaucgagcuggcagugcuccugucaaacgaagggauuauaaauagugaggacgagcaccuucuggccuuggaaagaaaacucaagaagaugcugggcccuagcgcuguagagaucggaaacggcuguuucgaaaccaaacauaagugcaaucagacuugcuuagauaggauugcggcagggaccuuugacgccggagaguucucccugcccacauuugauucucuaaacaucaccgcugccagccucaaugacgauggucuggacaaccacacuauccuuuuguauuacucaacagcagccaguucccuggcuguuacgcucaugauugccauauucguggucuauauggugagccgggauaacgucucuuguucaaucugccuguga

SEQ ID NO: 155253 - RNA, 1758 nt, Artificial Sequence; identical to SEQ ID NO: 155200
  derived and/or modified CDS sequence (opt3) from hemagglutinin__InfluenzaB__AGX18203

SEQ ID NO: 155254 - RNA, 1758 nt, Artificial Sequence
  derived and/or modified CDS sequence (opt3) from hemagglutinin__InfluenzaB__AGX18214
augaaggccaucauugugcugcucauggucguuaccagcaacgcugacagaauaugcacaggcaucacuuccucuaauucaccccacgugguaaaaacggcaacccagggggaggugaacgucacaggagugauuccucuuacuaccacaccaaccaagagucauuucgccaaucugaaagguacuaagacaaggggcaaauuguguccgaagugcuuaaacuguaccgaucuggacguugcgcuagggcggcccaagugcacgggaaauaucccuagcgcugaaguguccauucuccacgagguccgcccagugacuucuggcuguuuucccaucaugcaugaucgaaccaaaauacgucaacugccuaaccuucugagagguuacgaacacaucagguugucgacacauaauguaauuaacgccgagaaggcaccagggggacccuauaaaacuggcaccucaggcagcugcccuaauguuacaaacgggaauggauucuuugccaccauggcuugggcagugccaaagaacgacaauaacaaaacggccacuaauagucucacaaucgaagucccguacauuuguaccgagggugaggaucagaucacuauauggggcuuccacuccgacaacgaaacacagauggcuaagcuguauggggauucuaagccccagaaauuuaccagcuccgccaacggagugacgacccacuacgugucacaaauuggcgguuucccuaaucagacagaggacgggggacugccacagaguggccggaucgucguugauuauauggugcaaaagagcggcaaaacugggaccauuacauaccagcgcggaauccucuuaccccagaagguauggugcgcgucugguagauccaaagugaucaagggcucacugccucuuauuggggaagcagacuguuugcaugagaaauauggaggccugaacaagagcaagccauacuacacuggugagcacgccaaagcuauagggaauugccccaucugggucaagaccccgcuaaaacucgccaacggcacaaaguauaggccucccgcaaaacugcuuaaggaacggggauuuuucggcgcuauugccggguuucuggagggagguugggaaggcaugaucgcgggguggcauggauacaccagucacggcgcccacgguguggcaguugcugccgauuugaagucuacucaggaggcuauaaauaaaauuacgaagaaccucaauucccugagcgaauuagaggugaaaaaccugcagcgccucucgggggccauggacgagcuucauaaugaaauccuggaguuggaugaaaaggucgacgaccuacgagcagauacaaucucuucccaaauugagcuggccgugcuccugucaaacgaaggcaucauuaauagugaggacgagcaccuucuggcuuuggaaagaaaacucaagaagaugcugggaccaagcgcgguagagauaggcaacggguguuucgaaaccaaacauaagugcaaucagacuugcuuagauaggaucgcagccggaaccuuugacgcuggugaguucucccugccuacauuugauucucuaaacauuaccgccgcaagccucaaugacgauggccuggacaaccacaucauccuuuuguauuacucaacugccgcuaguucccuggccguuacacucaugauugcaauauucguggucuauauggugagccgggauaacgucucuuguucaaucugccuguga

SEQ ID NO: 155255 - RNA, 1758 nt, Artificial Sequence
  derived and/or modified CDS sequence (opt3) from hemagglutinin__InfluenzaB__AGX18225
augaaggccaucauugugcugcucauggucguuaccagcaacgcugacagaauaugcacaggcaucacuuccucuaauucaccccacgugguaaaaacggcaacccagggggaggugaacgucacaggagugauuccucuuacuaccacaccaaccaagagucauuucgccaaucugaaagguacuaagacaaggggcaaauuguguccgaagugcuuaaacuguaccgaucuggacguugcgcuagggcggcccaagugcacgggaaauaucccuagcgcugaaguguccauucuccacgagguccgcccagugacuucuggcuguuuucccaucaugcaugaucgaaccaaaauacgucaacugccuaaccuucugagagguuacgaacacaucagguugucgacacauaauguaauuaacgccgagaaggcaccagggggacccuauaaaaucggcacuucaggcagcugcccuaauguuaccaacgggaauggauucuuugccacaauggcuugggcagugccaaagaacgacaauaacaaaaccgccacgaauagucucacuauugaagucccguacaucuguacagagggugaggaucagauaaccauuuggggcuuccacuccgacaacgaaacucagauggcuaagcuguauggggauucuaagccccagaaauuuacaagcuccgccaacggagugaccacgcacuacgugucacaaaucggcgguuucccuaaucagaccgaggacgggggacugccacagaguggccggauugucguugauuauauggugcaaaagagcggcaaaacagggacuaucaccuaccagcgcggaauccucuuaccccagaagguauggugcgcgucugguagauccaaagugauuaagggcucacugccucuuauaggggaagcagacuguuugcaugagaaauauggaggccugaacaagagcaagccauacuacacaggugagcacgccaaagcuaucgggaauugccccauuugggucaagacuccgcuaaaacucgccaacggcaccaaguauaggccucccgcaaaacugcuuaaggaacggggauuuuucggcgcuaucgccggguuucuggagggagguugggaaggcaugauagcgggguggcauggauacacaagucacggcgcccacgguguggcaguugcugccgauuugaagucuacccaggaggcuauuaaucgcaucacuaaaaaccucaauucccugagcgaauuagaggugaagaaccugcagcgacucucgggggccauggacgagcuucauaaugaaauccuggaguuggaugaaaaagucgacgaccuaagagcagauacgauuucuucccaaaucgagcuggccgugcuccugucaaacgaaggcauuauaaauagugaggacgagcaccuucuggcuuuggaaaggaagcucaaaaagaugcugggaccaagcgcgguagagaucggcaacggguguuucgaaacaaagcauaaaugcaaucagaccugcuuagaucggauugcagccggaacuuuugacgcuggugaguucucccugccuaccuuugauucucuaaacaucacagccgcaagccucaaugacgauggccuggacaaccacaccauccuuuuguauuacucaacugccgcuaguucccuggccguuacacucaugauugcaauauucguggucuauauggugagccgugauaacgucucuuguucaaucugccuguga

SEQ ID NO: 155256 - RNA, 1758 nt, Artificial Sequence
  derived and/or modified CDS sequence (opt3) from hemagglutinin__InfluenzaB__AGX18236
augaaggccaucauugugcugcucauggucguuaccagcaacgcugacagaauaugcacaggcaucacuuccucuaauucaccccacgugguaaaaacggcaacccagggggaggugaacgucacaggagugauuccucuuacuaccacaccaaccaagagucauuucgccaaucugaaagguacuaagacaaggggcaaauuguguccgaagugcuuaaacuguaccgaucuggacguugcgcuagggcggcccaagugcacgggaaauaucccuagcgcugaaguguccauucuccacgagguccgcccagugacuucuggcuguuuucccaucaugcaugaucgaaccaaaauacgucaacugccuaaccuucugagagguuacgaacacaucagguugucgacacauaauguaauuaacgccgagaaggcaccagggggacccuauaaaaucggcacuucaggcagcugcccuaauguuaccaacgggaauggauucuuugccacaauggcuugggcagugccaaagaacgacaauaacaaaaccgccacgaauagucucacuauugaagucccguacaucuguacagagggugaggaucagauaaccauuuggggcuuccacuccgacaacgaaacucagauggcuaagcuguauggggauucuaagccccagaaauuuacaagcuccgccaacggagugaccacgcacuacgugucacaaaucggcgguuucccuaaucagaccgaggacgggggacugccacagaguggccggauugucguugauuauaugaugcaaaagagcggcaaaacagggacuaucaccuaccagcgcggaauccucuuaccccagaagguguggugcgcgucugguagauccaaaguaauuaagggcucacugccucuuauaggggaagcagacuguuugcaugagaaauauggaggccugaacaagagcaagccauacuacacaggugagcacgccaaagcuaucgggaauugccccauuugggugaagacuccgcuaaaacucgccaacggcaccaaguauaggccucccgcaaaacugcuuaaggaacggggauuuuucggcgcuaucgccggguuucuggagggagguugggaaggcaugauagcgggguggcauggauacacaagucacggcgcccacggugucgcaguggcugccgauuugaagucuacccaggaggcuauuaauaaaaucacuaagaaccucaauucccugagcgaauuagagguuaaaaaccugcagcgccucucgggggccauggacgagcuucauaaugaaauccuggaguuggaugaaaagguggacgaccuacgagcagauacgauuucuucccaaaucgagcuggccguccuccugucaaacgaaggcauuauaaauagugaggacgagcaccuucuggcuuuggaaagaaaacucaagaagaugcugggaccaagcgcgguggagaucggcaacggguguuucgaaacaaaacauaagugcaaucagaccugcuuagauaggauugcagccggaacuuuugacgcuggugaguucucccugccuaccuuugauucucuaaacaucacagccgcaagccucaaugacgauggccuggacaaccacaccauccuuuuguauuacucaacugccgcuaguucccuggccguaacacucaugauugcaauauucguuguguauauggucagccgggauaacgugucuuguucaaucugccuguga

SEQ ID NO: 155257 - RNA, 1758 nt, Artificial Sequence; identical to SEQ ID NO: 154613
  derived and/or modified CDS sequence (opt3) from hemagglutinin__InfluenzaB__AGX18247

SEQ ID NO: 155258 - RNA, 1758 nt, Artificial Sequence
  derived and/or modified CDS sequence (opt3) from hemagglutinin__InfluenzaB__AGX18258
augaaggccaucauugugcugcucauggucguuaccagcaacgcugacagaauaugcacaggcaucacuuccucuaauucaccccacgugguaaaaacggcaacccagggggaggugaacgucacaggagugauuccucuuacuaccacaccaaccaagagucauuucgccaaucugaaagguacuaagacaaggggcaaauuguguccgaagugcuuaaacuguaccgaucuggacguugcgcuagggcggcccaagugcacgggaaauaucccuagcgcugaaguguccauucuccacgagguccgcccagugacuucuggcuguuuucccaucaugcaugaucgaaccaaaauacgucaacugccuaaccuucugagagguuacgaacacaucagguugucgacacauaauguaauuaacgccgagaaggcaccagggggacccuauaaaaucggcacuucaggcagcugcccuaauguuaccaacgggaauggauucuuugccacaauggcuugggcagugccaaagaacgacaaaaauaagaccgccacgaacagucucacuauugaagucccguacaucuguacagagggugaggaucagauaaccauuuggggcuuccacuccgacaaugaaacucagauggcuaagcuguauggggauucuaaaccccagaaguuuacaagcuccgccaacggagugaccacgcacuacgugucacaaaucggcgguuucccuaaccagaccgaggacgggggacugccacagaguggccggauugucguugauuauauggugcagaaaagcggcaagacagggacuaucaccuaccaacgcggaauccucuuaccccagaaaguauggugcgcgucugguagauccaaggugauuaaaggcacacugccucuuauaggggaagcagacuguuugcaugagaaguauggaggccugaauaagucaaaaccauacuacacuggugagcacgccaaggcuaucgggaacugccccauuugggucaaaaccccgcuaaagcucgccaauggcacaaaauauaggccucccgcaaagcugcuuaaggaacggggauuuuucggcgcuaucgccggguuucuggagggagguugggaaggcaugauagcgggguggcauggauacaccagccacggcgcccacgguguggcaguugcugccgauuugaaaaguacucaggaggcuauuaacaagaucacgaaaaaucucaacucucuguccgaauuagaggugaagaaucugcagcgccucagcggggccauggacgagcuucauaacgaaauccuggaguuggaugaaaaagucgacgaccuacgagcagauacaauuucgucucaaaucgagcuggccgugcuccuguccaaugaaggcauuauaaacucagaggacgagcaccuucuggcuuuggaaagaaagcucaagaaaaugcugggaccaagugcgguagagaucggcaauggguguuucgaaaccaagcauaaaugcaaccagacuugcuuagauaggauugcagccggaaccuuugacgcuggugaguucagccugccuacauuugauucccuaaauaucaccgccgcaucucucaacgacgauggccuggacaaucacacuauccuuuuguauuacagcacagccgcuucaagucuggccguuacgcucaugauugcaauauucguggucuauauggugucccgggauaacgucagcuguucuaucugccuguga

SEQ ID NO: 155259 - RNA, 1758 nt, Artificial Sequence; identical to SEQ ID NO: 154562
  derived and/or modified CDS sequence (opt3) from hemagglutinin__InfluenzaB__AGX18280

SEQ ID NO: 155260 - RNA, 1758 nt, Artificial Sequence
  derived and/or modified CDS sequence (opt3) from hemagglutinin__InfluenzaB__AGX18291
augaaggccaucauugugcugcucauggucguuaccagcaacgcugacagaauaugcacaggcaucacuuccucuaauucaccccacgugguaaaaacggcaacccagggggaggugaacgucacaggagugauuccucuuacuaccacaccaaccaagagucauuucgccaaucugaaagguacuaagacaaggggcaaauuguguccgaagugcuuaaacuguaccgaucuggacguugcgcuagggcggcccaagugcacgggaaauaucccuagcgcugaaguguccauucuccacgagguccgcccagugacuucuggcuguuuucccaucaugcaugaucgaaccaaaauacgucaacugccuaaccuucugagagguuacgaacacaucagguugucgacacauaauguaauuaacgccgagaaggcaccagggggacccuauaaaaucggcacuucaggcagcugcccuaauguuaccaacgggaauggauucuuugccacaauggcuugggcagugccaaagaacgacaauaacaaaaccgccacgaauagucucacuauugaagucccguacaucuguacagagggugaggaucagauaaccauuuggggcuuccacuccgacaacgaaacucagauggcuaagcuguauggggauucuaagccccagaaauuuacaagcuccgccaacggagugaccacgcacuacgugucacaaaucggcgguuucccuaaucagaccgaggacgggggacugccacagaguggccggauugucguugauuauauggugcaaaagagcggcaaaacagggacuaucaccuaccagcgcggaauccucuuaccccagaagguauggugcgugucugguagauccaaagucauuaagggcucacugccucuuauaggggaagcggacuguuugcaugagaaauauggaggccugaacaagagcaagccauacuacacaggugagcacgcaaaagccaucgggaauugccccauuugggugaagacuccgcuaaaacucgcuaacggcaccaaguauaggccucccgccaaacugcuuaaggaacggggauuuuucggcgcaaucgcuggguuucuggagggagguugggaaggcaugauagccggguggcauggauacacaagucacggcgcgcacgguguugccguggcagcugauuugaagucuacccaggaggccauuaauaaaaucacuaagaaccucaauucccugagcgaauuagaggucaaaaaccugcagcgccucucgggggcuauggacgagcuucauaaugaaauccuggaguuggaugaaaagguggacgaccuacgagccgauacgauuucuucccaaaucgagcuggcaguacuccugucaaacgaaggcauuauaaauagugaggacgagcaccuucuggccuuggaaagaaaacucaagaagaugcugggaccaagcgcuguugagaucggcaacggguguuucgaaacaaaacauaagugcaaucagaccugcuuagauaggauugcggcaggaacuuuugacgccggugaguucucccugccuaccuuugauucucuaaacaucacagcugccagccucaaugacgauggccuggacaaccacaccauccuuuuguauuacucaacugcagccaguucccuggcugugacacucaugauugccauauucgucguguauauggucagccgggauaacgugucuuguucaaucugccuguga

SEQ ID NO: 155261 - RNA, 1758 nt, Artificial Sequence
  derived and/or modified CDS sequence (opt3) from hemagglutinin__InfluenzaB__AGX18302
augaaggccaucauugugcugcucauggucguuaccagcaacgcugacagaauaugcacaggcaucacuuccucuaauucaccccacgugguaaaaacggcaacccagggggaagugaacgucacaggagugauuccucuuacuaccacaccaaccaagagucauuucgccaaucugaaagguacuaagacaaggggcaaauuguguccgaagugcuuaaacuguaccgaucuggacguugcgcuagggcggcccaagugcacgggaaauaucccuagcgcugaaguguccauucuccacgagguccgcccagugacuucuggcuguuuucccaucaugcaugaucgaaccaaaauacgucaacugccuaaccuucugagagguuacaagcacaucagguugucgacacauaauguaauuaacgccgaaaaagcaccagggggacccuauaagaucggcacuucaggcagcugcccuaauguuaccaacgggaauggauucuuugccacaauggcuugggcagugccgaaaaacgacaauaacaagaccgccacgaauagucucacuauugaggucccauacaucuguacagaaggugaggaucagauaaccauuuggggcuuccacuccgacaacgagacucagauggcuaagcuguauggggauucuaaaccccagaaguuuacaagcuccgccaacggagugaccacgcacuacgugucacaaaucggcgguuucccuaaucagaccgaagacgggggacugccacagaguggccggauugucguugauuauauggugcagaaaagcggcaagacagggacuaucaccuaccaacgcggaauccucuuaccccagaaaguauggugcgcgucugguagauccaaggugauuaaaggcacacugccucuuauaggggaggcagacuguuugcaugaaaaguauggaggccugaacaagucaaaaccauacuacacuggugagcacgccaaggcuaucgggaauugccccauuugggucaaaaccccgcuaaagcucgccaacggcacaaaauauaggccucccgcaaagcugcuuaaggagcggggauuuuucggcgcuaucgccggguuucuggaaggagguugggagggcaugauagcgggguggcauggauacaccagccacggcgcccacgguguggcaguugcugccgauuugaaaaguacucaggaagcuauuaauaagaucacgaaaaaccucaauucucuguccgaguuagaagugaagaaccugcagcgccucagcggggccauggacgagcuucauaaugagauccuggaauuggaugagaaagucgacgaccuacgagcagauacaauuucgucucaaaucgaacuggccgugcuccuguccaacgagggcauuauaaauucagaagacgagcaccuucuggcuuuggagagaaagcucaagaaaaugcugggaccaagugcgguagaaaucggcaacggguguuucgagaccaagcauaaaugcaaucagacuugcuuagauaggauugcagccggaaccuuugacgcuggugaguucagccugccuacauuugauucccuaaacaucaccgccgcaucucucaaugacgauggccuggacaaccacacuauccuuuuguauuacagcacagccgcuucaagucuggccguuacgcucaugauugcaauauucguggucuauauggugucccgggauaacgucagcuguucuaucugccuguga

SEQ ID NO: 155262 - RNA, 1758 nt, Artificial Sequence; identical to SEQ ID NO: 154562
  derived and/or modified CDS sequence (opt3) from hemagglutinin__InfluenzaB__AGX18313

SEQ ID NO: 155263 - RNA, 1758 nt, Artificial Sequence
  derived and/or modified CDS sequence (opt3) from hemagglutinin__InfluenzaB__AGX18324
augaaggccaucauugugcugcucauggucguuaccagcaacgcugacagaauaugcacaggcaucacuuccucuaauucaccccacgugguaaaaacggcaacccagggggaggugaacgucacaggagugauuccucuuacuaccacaccaaccaagagucauuucgccaaucugaaagguacuaagacaaggggcaaauuguguccgaagugcuuaaacuguaccgaucuggacguugcgcuagggcggcccaagugcacgggaaauaucccuagcgcugaaguguccauucuccacgagguccgcccagugacuucuggcuguuuucccaucaugcaugaucgaaccaaaauacgucaacugccuaaccuucugagagguuacgaacacaucagguugucgacacauaauguaauuaacgccgagaaggcaccagggggacccuauaaaaucggcacuucaggcagcugcccuaauguuaccaacgggaauggauucuuugccacaauggcuugggcagugccaaagaacgacaauaacaaaaccgccacgaauagucucacuauugaagucccguacaucuguacagagggugaggaucagauaaccauuuggggcuuccacuccgacaacgaagcucagauggccaagcuguauggggauucuaagccccagaaauuuacuagcuccgcgaacggagugacaacccacuacgugucacaaaucggcgguuucccuaaucagacggaggacgggggacugccacagaguggccggauugucguugauuauauggugcaaaagagcggcaaaaccgggacaaucacuuaccagcgcggaauccucuuaccccagaagguauggugcgcaucugguagauccaaagugauuaagggcucacugccucuuauaggggaagccgacuguuugcaugagaaauauggaggccugaacaagagcaagccauacuacaccggugagcacgcuaaagccaucgggaauugccccauuugggucaagacaccgcuaaaacucgcaaacggcacuaaguauaggccucccgcuaaacugcuuaaggaacggggauuuuucggcgccaucgcgggguuucuggagggagguugggaaggcaugauagccggguggcauggauacaccagucacggcgcacacgguguggcuguugccgcugauuugaagucuacacaggaggccauuaauaaaaucaccaagaaccucaauucccugagcgaauuagaggugaaaaaccugcagcgccucucgggggcaauggacgagcuucauaaugaaauccuggaguuggaugaaaaggucgacgaccuacgagccgauacuauuucuucccaaaucgagcuggcugugcuccugucaaacgaaggcauuauaaauagugaggacgagcaccuucuggcguuggaaagaaaacucaagaagaugcugggaccaagcgcaguagagaucggcaacggguguuucgaaacgaaacauaagugcaaucagacaugcuuagauaggauugccgcuggaaccuuugacgccggugaguucucccugccuacuuuugauucucuaaacaucaccgcagccagccucaaugacgauggccuggacaaccacacaauccuuuuguauuacucaaccgcugccaguucccuggcaguuacucucaugauugcgauauucguggucuauauggugagccgggauaacgucucuuguucaaucugccuguga

SEQ ID NO: 155264 - RNA, 1758 nt, Artificial Sequence; identical to SEQ ID NO: 155222
  derived and/or modified CDS sequence (opt3) from hemagglutinin__InfluenzaB__AGX18335

SEQ ID NO: 155265 - RNA, 1758 nt, Artificial Sequence
  derived and/or modified CDS sequence (opt3) from hemagglutinin__InfluenzaB__AGX18346
augaaggccaucauugugcugcucauggucguuaccagcaacgcugacagaauaugcacaggcaucacuuccucuaauucaccccacgugguaaaaacggcaacccagggggaggugaacgucacaggagugauuccucuuacuaccacaccaaccaagagucauuucgccaaucugaaagguacuaagacaaggggcaaauuguguccgaagugcuuaaacuguaccgaucuggacguugcgcuagggcggcccaagugcacgggaaauaucccuagcgcugaaguguccauucuccacgagguccgcccagugacuucuggcuguuuucccaucaugcaugaucgaaccaaaauacgucaacugccuaaccuucugagagguuacgaacacaucagguugucgacacauaauguaauuaacgccgagaaggcaccagggggacccuauaaaaucggcacuucaggcagcugcccuaauguuaccaacgggaauggauucuuugccacaauggcuugggcagugccaaagaacgacaauaacaaaaccgccacgaauagucucacuauugaagucccguacaucuguacagagggugaggaucagauaaccauuuggggcuuccacuccgacaacgaaacucagauggcuaagcuguauggggauucuaagccccagaaauuuacaagcuccgccaacggagugaccacgcacuacgugucacaaaucggcgguuucccuaaucagaccgaggacgggggacugccacagaguggccggauugucguugauuauauggugcaaaagagcggcaaaacagggacuaucaccuaccagcgcggaauccucuuaccccagaagguauggugcgcgucugguagauccaaagugauuaagggcucacugccucuuauaggggaagcagacuguuugcaugagaaauauggaggccugaacaagagcaagccauacuacacaggugagcacgccaaagcuaucgggaauugccccauuugggucaagacuccgcuaaaacucgccaacggcaccaaguauaggccucccgcaaaacugcuuaaggaacggggauuuuucggcgcuaucgccggguuucuggagggagguugggaaggcaugauagcgggguggcauggauacacaagucacggcgcccacgguguggcaguugcugccgauuugaagucuacccaggaggcuauuaauaaaaucacuaagaaccucaauucccugagcgaauuagaggugaaaaaccugcagcgccucucgggggccauggacgagcuucauaaugaaauccuggaguuggaugaaaaggucgacgaccuacgagcagauacgauuucuucccaaaucgagcuggccgugcuccugucaaacgaaggcauuauaaauagugaggacgagcaccuucuggcuuuggaaagaaaacucaagaagaugcugggaccaagcgcgguagagaucggcaacggguguuucgaaacaaaacauaagugcaaucagaccugcuuagauaggauugcagccggaacuuuugacgcuggugaguucucccugccuaccuuugauucucuaaacaucacagccgcaagccucaaugaagacggccuggauaaccacaccauccuuuuguauuacucaacugccgcuaguucccuggccguuacacucaugauugcaauauucguggucuauauggugagccgggacaacgucucuuguucaaucugccuguga

SEQ ID NO: 155266 - RNA, 1758 nt, Artificial Sequence
  derived and/or modified CDS sequence (opt3) from hemagglutinin__InfluenzaB__AGX18357
augaaggccaucauugugcugcucauggucguuaccagcaacgcugacagaauaugcacaggcaucacuuccucuaauucaccccacgugguaaaaacggcaacccagggggaggugaacgucacaggagugauuccucuuacuaccgccccaacaaagagucauuucgcgaaucugaaagguaccaagacuaggggcaaauuguguccgaagugcuuaaacuguacagaucuggacguugcucuagggcggcccaagugcaccggaaauaucccuagcgccgaaguguccauucuccacgagguccgcccagugacgucuggcuguuuucccaucaugcaugaucgaacuaaaauacgucaacugccuaaccuucugagagguuacgaacacaucagguugucgacccauaauguaauuaacgcagagaaggccccagggggacccuauaaaaucggcacaucaggcagcugcccuaauguuacuaacgggaauggauucuuugcuaccauggcaugggccgugccaaagaacgacaauaacaaaacagcuaccaauagucucacgauugaagucccguacaucuguacugagggugaggaucagauaacaauuuggggcuuccacuccgacaaggaaacccagauggccaagcuguauggggauucuaaaccccagaaguuuacuagcuccgcgaacggagugacaacccacuacgugucacaaaucggcgguuucccuaaccagacggaggacgggggacugccacagaguggccggauugucguugauuauauggugcagaaacccggcaagaccgggacaaucacuuaccaacgcggaauccucuuaccucagaaaguauggugcgcaagcgguagaucuaaggugauuaaaggcucccugccacuuauaggggaagccgacuguuugcaugagaaguauggaggccugaauaagucaaaacccuacuacaccggugagcacgcuaaggccaucgggaacugcccgauuugggucaaaacaccucuaaagcucgcaaauggcacuaaauauaggcccccagcuaagcugcuuaaggaacggggauuuuucggcgccaucgcgggguuucuggagggagguugggaaggcaugauagccggguggcauggauacaccagccacggcgcacacgguguggcuguugccgcugauuugaaaaguacacaggaggccauuaacaagaucaccaaaaaucucaacucucuguccgaauuagaggugaagaaucugcagcgccucagcucggcaauggacgagcuucauaacgaaauccuggaguuggaugaaaaagucgacgaccuacgagccgauacuauuucuucccaaaucgagcuggcugugcuccugucaaaugaagggauuauaaacagugaggacgagcaccuucuggcguuggaaagaaagcucaagaaaaugcugggcccuagcgcaguagagaucggaaauggcuguuucgaaacgaagcauaaaugcaaccagacaugcuuagauaggauugccgcugggaccuuugacgccggagaguucucccugcccacuuuugauucucuaaauaucaccgcagccagccucaacgacgauggucuggacaaucacacaauccuuuuguauuacucaaccgcugccaguucccuggcaguuacucucaugauugcgauauucguggucuauauggugagccgggauaacgucucuuguucaaucugccuguga

SEQ ID NO: 155267 - RNA, 1758 nt, Artificial Sequence
  derived and/or modified CDS sequence (opt3) from hemagglutinin__InfluenzaB__AGX18368
augaaggccaucauugugcugcucauggucguuaccagcaacgcugacagaauaugcacaggcaucacuuccucuaauucaccccacgugguaaaaacggcaacccagggggaggugaacgucacaggagugauuccucuuacuaccgccccaacaaagagucauuucgcgaaucugaaagguaccaagacuaggggcaaauuguguccgaagugcuuaaacuguacagaucuggacguugcucuagggcggcccaagugcaccggaaauacgccuagcgccgaaguguccauccuccacgagguccgcccagugacuucuggcuguuuucccauuaugcaugaucgaaccaaaauccgucaacugccuaaccuucugagagguuacgaacacauaagguugucgaaucauaacguaaucaaugcagagaaggccccagggggacccuauaaaauuggcacaucaggcagcugcccuaacguuacuaaugggaacggauucuuugcuaccauggcaugggccgugccaaagaaugacaacaauaaaacagcuaccaacagucucacgaucgaagucccguacauuuguacugagggugaggaucagaucacaauauggggcuuccacuccgacaacgaaacccagauggccaagcuguauggggauucuaagccccagaaauuuacuagcuccgcgaauggagugacaacccacuacgugucacaaauuggcgguuucccuaaccagacggaggacgggggacugccacagaguggccggaucgucguugauuauauggugcagaagcccggcaaaaccgggacaauuacuuaccaacgcggaauccucuuaccucagaagguauggugcgcaagcgguagaucuaaagugaucaagggcucccugccacuuauuggggaagccgacuguuugcaugagaaauauggaggccugaauaagucaaagcccuacuacaccggugagcacgcuaaagccauagggaacugcccgaucugggucaagacaccucuaaaacucgcaaauggcacuaaguauaggcccccagcuaaacugcuuaaggaacggggauuuuucggcgccauugcgggguuucuggagggagguugggaaggcaugaucgccggguggcauggauacaccagccacggcgcacacgguguggcuguugccgcugauuugaagaguacacaggaggccauaaacaaaauuaccaagaaucucaacucucuguccgaauuagaggugaaaaaucugcagcgccucagcucggcaauggacgagcuucauaacgaaauccuggaguuggaugaaaaggucgacgaccuacgagccgauacuaucucuucccaaauugagcuggcugugcuccugucaaaugaagggaucauuaacagugaggacgagcaccuucuggcguuggaaagaaaacucaagaagaugcugggcccuagcgcaguagagauaggaaauggcuguuucgaaacgaaacauaagugcaaccagacaugcuuagauaggaucgccgcugggaccuuugacgccggagaguucucccugcccacuuuugauucucuaaauauuaccgcagccagccucaacgacgauggucuggacaaccacacaauccuuuuguauuacucaaccgcugccaguucccuggcaguuacucucaugaucgcgauuuucguggucuauauggugagccgggauaaugucucuuguucaauaugccuguga

SEQ ID NO: 155268 - RNA, 1758 nt, Artificial Sequence; identical to SEQ ID NO: 154686
  derived and/or modified CDS sequence (opt3) from hemagglutinin__InfluenzaB__AGX18379

SEQ ID NO: 155269 - RNA, 1758 nt, Artificial Sequence; identical to SEQ ID NO: 155222
  derived and/or modified CDS sequence (opt3) from hemagglutinin__InfluenzaB__AGX18390

SEQ ID NO: 155270 - RNA, 1758 nt, Artificial Sequence
  derived and/or modified CDS sequence (opt3) from hemagglutinin__InfluenzaB__AGX18401
augaaggccaucauugugcugcucauggucguuaccagcaacgcugacagaauaugcacaggcaucacuuccucuaauucaccccacgugguaaaaacggcaacccagggggaggugaacgucacaggagugauuccucuuacuaccgccccaacaaagagucauuucgcgaaucugaaagguaccaagacuaggggcaaauuguguccgaagugcuuaaacuguacagaucuggacguugcucuagggcggcccaagugcaccggaaauaucccuagcgccgaaguguccauucuccacgagguccgcccagugacgucuggcuguuuucccaucaugcaugaucgaacuaaaauacgucaacugccuaaccuucugagagguuacgaacacaucagguugucgacccauaauguaauuaacgcagagaaggccccagggggacccuauaaaaucggcacaucaggcagcugcccuaauguuacuaacgggaauggauucuuugcuaccauggcaugggccgugccaaagaacgacaauaacaaaacagcuaccaauagucucacgauugaagucccguacaucuguacugagggugaggaucagauaacaauuuggggcuuccacuccgacaacgaaauccagauggccaagcuguauggggauucuaagccccagaaauuuaccagcuccgcgaacggagugacuacacacuacgugucacaaauuggcgguuucccuaaucagaccgaggacgggggacugccacagaguggccggaucgucguugauuauauggugcagaagcccggcaaaacggggaccaucacauaccaacgcgguauucucuuaccucagaagguauggugcgcaagcggaagaucuaaagugauaaagggcucccugccacuuaucggggaagccgacuguuugcaugagaaauauggaggccugaacaagucaaagcccuacuacacuggugagcacgcuaaagccauugggaauugcccgaucugggucaagaccccucuaaaacucgcaaacggcacaaaguauaggcccccagcuaaacugcuuaaggaacggggauuuuucggcgccauagcgggguuucuggagggagguugggaaggcaugauugccggguggcauggauacacuagccacggcgcacacgguguggcuguugccgcugauuugaagaguacccaggaggccaucaauaaaaucacaaagaaccucaauucucuguccgaauuagaggugaaaaaccugcagcgccucagcucggcaauggacgagcuucauaaugaaauucuggaguuggaugaaaaggucgacgaccuacgagccgauaccaucucuucccaaauugagcuggcugugcuccugucaaacgaagggauaaucaauagugaggacgagcaccuucuggcguuggaaagaaaacucaagaagaugcugggcccuagcgcaguagagauuggaaacggcuguuucgaaacuaaacauaagugcaaucagacgugcuuagauaggaucgccgcugggacauuugacgccggagaguucucccugcccaccuuugauucucuaaacaucacugcagccagccucaaugacgauggucuggacaaccacaccauucuuuuguauuacucaacagcugccaguucccuggcaguuacccucaugauagcgaucuucguggucuauauggugagccgggauaacgucucuuguucaauuugccuguga

SEQ ID NO: 155271 - RNA, 1758 nt, Artificial Sequence
  derived and/or modified CDS sequence (opt3) from hemagglutinin__InfluenzaB__AGX18412
augaaggccaucauugugcugcucauggucguuaccagcaacgcugacagaauaugcacaggcaucacuuccucuaauucaccccacgugguaaaaacggcaacccagggggaggugaacgucacaggagugauuccucuuacuaccacaccaaccaagagucauuucgccaaucugaaagguacuaagacaaggggcaaauuguguccgaagugcuuaaacuguaccgaucuggacguugcgcuagggcggcccaagugcacgggaaauaucccuagcgcugaaguguccauucuccacgagguccgcccagugacuucuggcuguuuucccaucaugcaugaucgaaccaaaauacgucaacugccuaaccuucugagagguuacgaacacaucagguugucgaaucauaacguaauuaaugccgagaaggcaccagggggacccuauaaaaucggcacaucaggcagcugcccuaacguuacuaaugggaacggauucuuugccaccauggcuugggcagugccaaagaaugacaacaauaaaacagccaccaacagucucacgauugaagucccguacaucuguacugagggugaggaucagauaacaauuuggggcuuccacuccgacaacgaagcucagauggccaagcuguauggggauucuaagccccagaaauuuaccagcuccgcgaauggagugacuacacacuacgugucacaaaucggcgguuucccuaaccagaccgaggacgggggacugccacagaguggccggauugucguugauuauauggugcagaagaguggcaaaacggggaccaucacauaccaacgcggaauccucuuaccccagaagguauggugcgcaucugguagauccaaagugauuaagggcucacugccucuuauaggggaagccgacuguuugcaugagaaauauggaggccugaauaagagcaagccauacuacacuggugagcacgcuaaagccaucgggaacugccccauuugggucaagaccccgcuaaaacucgcaaauggcacaaaguauaggccucccgcuaaacugcuuaaggaacggggauuuuucggcgccaucgcgggguuucuggagggagguugggaaggcaugauagccggguggcauggauacacuagccacggcgcacacgguguggcuguugccgcugauuugaagucuacccaggaggccauuaacaaaaucacaaagaaucucaacucccugagcgaauuagaggugaaaaaucugcagcgccucucgggggcaauggacgagcuucauaacgaaauccuggaguuggaugaaaaggucgacgaccuacgagccgauaccauuucuucccaaaucgagcuggcugugcuccugucaaaugaaggcauuauaaacagugaggacgagcaccuucuggcguuggaaagaaaacucaagaagaugcugggaccaagcgcaguagagaucggcaauggguguuucgaaacuaaacauaagugcaaccagacgugcuuagauaggauugccgcuggaacauuugacgccggugaguucucccugccuaccuuugauucucuaaauaucacugcagccagccucaacgacgauggccuggacaaccacaccauccuuuuguauuacucaacagcugccaguucccuggcaguuacccucaugauugcgauauucguggucuauauggugagccgggauaaugucucuuguucaaucugccuguga

SEQ ID NO: 155272 - RNA, 1758 nt, Artificial Sequence; identical to SEQ ID NO: 155029
  derived and/or modified CDS sequence (opt3) from hemagglutinin__InfluenzaB__AGX18423

SEQ ID NO: 155273 - RNA, 1755 nt, Artificial Sequence
  derived and/or modified CDS sequence (opt3) from hemagglutinin__InfluenzaB__AGX18424
augaaggccaucauugugcugcucauggucguuaccagcaacgcugacagaauaugcacaggcaucacuuccucuaauucaccccacgugguaaaaacggcaacccagggggaggugaacgucacaggagugauuccucuuacuaccacaccaaucaagagucauuucgccaaucugaaagguaccaggacucggggcaaguuguguccggauugcuuaaacuguacagaccuggauguugcgcuagggcgccccaugugcgugggaaccacgccuagcgcuaaagccuccauucuccacgaaguccgaccagugacuucuggcuguuuucccaucaugcaugaccguaccaagauaagacaacugccuaaucuucugagggguuacgagaacauccgguugucgacacagaauguaauugaugcagaaaaggcccucgggggaccauaucgccugggcacuucaggcagcugccccaacgcuaccaguaaauccggguucuuugcaacaauggccugggcuguuccuaaggacaauaacaaaaaugccaccaacccacugacgguggaggucccguacaucuguacugaaggagaggaucagauuacagugugggguuuccacucugacgauaagacccagaugaaaaaucucuauggcgacagcaacccccaaaaguuuacuuccucagcgaauggggugacaacccauuacgucagucagaucggaggcuucccugaucagacggaggacgguggguuaccacagagcggaagaauaguuguggauuauaugguacaaaagcccggcaaaaccggcacaauuguguaccagcgcgggguccugcuuccucagaagguguggugcgcaucuggacgguccaaaguuaucaaggguucauugccacugauuggcgaagccgacugucuacacgagaaauaugggggacucaacaagagcaaacccuacuacacuggcgaacacgcuaaggccaucgguaacugcccgaucugggugaagaccccucugaaacuugcaaaugggacaaaguauaggcccccagcuaaacuguugaaggagcgaggcuuuuucggagccauugcgggcuuucucgaagggggaugggaagguaugauagccggcuggcauggguacaccagucacggagcacauggcgucgcuguggccgcugaccugaaaucuacucaggaggccaucaacaagauuacaaagaauuuaaacucccugagcgaacucgagguuaaaaaucuucaaagacugucgggugcaauggaugaauugcacaacgagauccuagagcuggacgaaaagguagaugaccucagggccgauaccauaucuucccagauugagcuggcugugcuucugucaaaugaagggaucaucaacagugaggacgaacacuugcucgcgcuggagcggaaauuaaagaaaaugcugggcccuagcgcagucgauauuggaaauggcuguuucgagacuaagcauaagugcaaccagacgugccuagaccguaucgccgcugggacauuuaaugccggagaguucucccuccccaccuuugauucucugaacauuacugcagccagccuuaaugacgaugguuuggacaaccacaccauacugcucuauuacucaacagcugccaguucccuggcagugacccuuaugcuggcgaucuucauugucuauauggugagccgcgacaauguuucuuguucaaucugcuuguga

SEQ ID NO: 155274 - RNA, 1758 nt, Artificial Sequence
  derived and/or modified CDS sequence (opt3) from hemagglutinin__InfluenzaB__AGX18435
augaaggccaucauugugcugcucauggucguuaccagcaacgcugacagaauaugcacaggcaucacuuccucuaauucaccccacgugguaaaaacggcaacccagggggaggugaacgucacaggagugauuccucuuacuaccacaccaaccaagagucauuucgccaaucugaaagguacuaagacaaggggcaaauuguguccgaagugcuuaaacuguaccgaucuggacguugcgcuagggcggcccaagugcacgggaaauaucccuagcgcugaaguguccauucuccacgagguccgcccagugacuucuggcuguuuucccaucaugcaugaucgaaccaaaauacgucaacugccuaaccuucugagagguuacgaacacaucagguugucgacacauaauguaauuaacgccgagaaggcaccagggggacccuauaaaaucggcacuucaggcagcugcccuaauguuaccaacgggaauggauucuuugccacaauggcuugggcagugccaaagaacgacaauaacaaaaccgccacgaauagucucacuauugaagucccguacaucuguacagagggugaggaucagauaaccauuuggggcuuccacuccgacaacgaaauccagauggcuaagcuguauggggauucuaagccccagaaauuuacuagcuccgccaacggagugacaacccacuacgugucacaaauuggcgguuucccuaaucagacggaggacgggggacugccacagaguggccggaucgucguugauuauauggugcaaaagagcggcaaaaccgggacaaucacuuaccagcgcgguauucucuuaccccagaagguauggugcgcgucuggaagauccaaagugauaaagggcucacugccucuuaucggggaagcagacuguuugcaugagaaauauggaggccugaacaagagcaagccauacuacaccggugagcacgccaaagcuauugggaauugccccaucugggucaagacaccgcuaaaacucgccaacggcacuaaguauaggccucccgcaaaacugcuuaaggaacggggauuuuucggcgcuauagccggguuucuggagggagguugggaaggcaugauugcgggguggcauggauacaccagucacggcgcccacgguguggcaguugcugccgauuugaagucuacacaggaggcuaucaauaaaaucaccaagaaccucaauucccugagcgaauuagaggugaaaaaccugcagcgccucucgggggccauggacgagcuucauaaugaaauucuggaguuggaugaaaaggucgacgaccuacgagcagauacuaucucuucccaaauugagcuggccgugcuccugucaaacgaaggcauaaucaauagugaggacgagcaccuucuggcuuuggaaagaaaacucaagaagaugcugggaccaagcgcgguagagauuggcaacggguguuucgaaacgaaacauaagugcaaucagacaugcuuagauaggaucgcagccggaaccuuugacgcuggugaguucucccugccuacuuuugauucucuaaacaucaccgccgcaagccucaaugacgauggccuggacaaccacacaauucuuuuguauuacucaaccgccgcuaguucccuggccguuacucucaugauagcaaucuucguggucuauauggugagccgggauaacgucucuuguucaauuugccuguga

SEQ ID NO: 155275 - RNA, 1758 nt, Artificial Sequence; identical to SEQ ID NO: 154686
  derived and/or modified CDS sequence (opt3) from hemagglutinin__InfluenzaB__AGX18446

SEQ ID NO: 155276 - RNA, 1758 nt, Artificial Sequence; identical to SEQ ID NO: 155222
  derived and/or modified CDS sequence (opt3) from hemagglutinin__InfluenzaB__AGX18457

SEQ ID NO: 155277 - RNA, 1758 nt, Artificial Sequence; identical to SEQ ID NO: 155029
  derived and/or modified CDS sequence (opt3) from hemagglutinin__InfluenzaB__AGX18468

SEQ ID NO: 155278 - RNA, 1758 nt, Artificial Sequence; identical to SEQ ID NO: 155222
  derived and/or modified CDS sequence (opt3) from hemagglutinin__InfluenzaB__AGX18479

SEQ ID NO: 155279 - RNA, 1758 nt, Artificial Sequence; identical to SEQ ID NO: 154562
  derived and/or modified CDS sequence (opt3) from hemagglutinin__InfluenzaB__AGX18490

SEQ ID NO: 155280 - RNA, 1758 nt, Artificial Sequence
  derived and/or modified CDS sequence (opt3) from hemagglutinin__InfluenzaB__AGX18512
augaaggccaucauugugcugcucauggucguuaccagcaacgcugacagaauaugcacaggcaucacuuccucuaauucaccccacgugguaaaaacggcaacccagggggaggugaacgucacaggagugauuccucuuacuaccacaccaaccaagagucauuucgccaaucugaaagguacugaaacaaggggccgguuguguccgaagugcuuaaacuguaccgaucuggacguugcgcuagggcgccccaaaugcacgggaaauaucccuagcgcucgaguguccauucuccacgagguccguccagugacuucuggcuguuuucccaucaugcaugauagaaccaagauaaggcaacugccuaaccuucugcgggguuacgaacacauccgcuugucgacacauaauguaauuaacgccgagaaugcaccagggggacccuauaagaucggcacuucaggcagcugcccuaacguuaccaaugggaacggauucuuugccacaauggcuugggcagugccaaagaaugacaacaauaagaccgccacgaacagucucacuauugaagucccguacaucuguacagagggugaggaucagauaaccguguggggcuuccacuccgacaacgaaacucagauggcuaaacuguauggggauucuaagccccagaaauuuacaagcuccgccaauggagugaccacgcacuacgucucacaaauuggcgguuucccuaaccagaccgaggacgggggacugccacagaguggcagaaucguuguggauuauaugguacagaaaagcggcaagacagggacuauuaccuaccaaaggggaauccucuuaccccagaaaguguggugcgcgucuggucgguccaaggucaucaaaggcucacugccucuuauuggggaagcagacuguuugcaugagaaguauggaggccugaauaaaagcaagccauacuacacaggugagcacgccaaagcuauagggaacugccccaucugggugaagacuccgcuaaagcucgccaauggcaccaaauaucgcccucccgcaaagcugcuuaaagaacgaggauuuuucggcgcuauugccggguuucuggagggagguugggaaggcaugaucgcgggguggcauggauacacaagucacggcgcccacgguguugcaguggcugccgauuugaagucuacccaggaggcuauaaacaaaauuacuaagaaucucaacucccugagcgaauuagaggucaagaaucugcagagacucucgggggccauggacgagcuucauaacgaaauccuggaguuggaugaaaaaguggacgaccuaagggcagauacgaucucuucccaaauugagcuggccguacuccugucaaaugaaggcaucauuaacagugaggacgagcaccuucuggcuuuggaacggaagcucaaaaagaugcugggaccaagcgcgguugagauaggcaauggguguuucgaaacaaaacauaagugcaaccagaccugcuuagaucguaucgcagccggaacuuuugacgcuggugaguucucccugccuaccuuugauucucuaaauauuacagccgcaagccucaacgacgauggccuggacaaccacaccauccuuuuguauuacucaacugccgcuaguucccuggccgugacacucaugaucgcaauuuucgucguguauauggucagccgcgauaaugugucuuguucaauaugccuguga

SEQ ID NO: 155281 - RNA, 1758 nt, Artificial Sequence; identical to SEQ ID NO: 154562
  derived and/or modified CDS sequence (opt3) from hemagglutinin__InfluenzaB__AGX18523

SEQ ID NO: 155282 - RNA, 1758 nt, Artificial Sequence; identical to SEQ ID NO: 154562
  derived and/or modified CDS sequence (opt3) from hemagglutinin__InfluenzaB__AGX18534

SEQ ID NO: 155283 - RNA, 1758 nt, Artificial Sequence; identical to SEQ ID NO: 154623
  derived and/or modified CDS sequence (opt3) from hemagglutinin__InfluenzaB__AGX18545

SEQ ID NO: 155284 - RNA, 1758 nt, Artificial Sequence; identical to SEQ ID NO: 154562
  derived and/or modified CDS sequence (opt3) from hemagglutinin__InfluenzaB__AGX18556

SEQ ID NO: 155285 - RNA, 1758 nt, Artificial Sequence; identical to SEQ ID NO: 154562
  derived and/or modified CDS sequence (opt3) from hemagglutinin__InfluenzaB__AGX18567

SEQ ID NO: 155286 - RNA, 1758 nt, Artificial Sequence
  derived and/or modified CDS sequence (opt3) from hemagglutinin__InfluenzaB__AGX18578
augaaggccaucauugugcugcucauggucguuaccagcaacgcugacagaauaugcacaggcaucacuuccucuaauucaccccacgugguaaaaacggcaacccagggggaggugaacgucacaggagugauuccucuuacuaccacaccaaccaagagucauuucgccaaucugaaagguacugaaacaaggggcaaguuguguccgaaaugcuuaaacuguaccgaucuggacguugcgcuagggcggcccaagugcacgggaaauaucccuagcgcucgcguguccauucuccacgagguccgaccagugacuucuggcuguuuucccaucaugcaugaucguaccaagauaagacaacugccuaaccuucugagggguuacgaacacauccgguugucgacacauaauguaauuaacgccgagaaugcaccagggggacccuauaaaaucggcacuucaggcagcugcccuaacguuaccaaugggaacggauucuuugccacaauggcuugggcagugccaaagaaugacaaaaacaagaccgccacgaauagucucacuauugaagucccguacaucuguacagagggugaggaucagauaaccguguggggcuuccacuccgacaacgaaacucagauggcuaaacuguauggggauucuaagccccagaaguuuacaagcuccgccaacggagugaccacgcacuacgucucacaaauuggcgguuucccuaaucagaccgaggacgggggacugccacagaguggccgcaucguuguggauuauaugguacagaaaagcggcaagacagggacuauuaccuaccaaagaggaauccucuuaccccagaaaguguggugcgcgucugguagguccaaggucaucaaaggcucacugccucuuauuggggaagcagacuguuugcaugagaaguauggaggccugaacaaaagcaagccauacuacacaggugagcacgccaaggcuauagggaauugccccaucugggugaaaacuccgcuaaagcucgccaacggcaccaaauaucggccucccgcaaagcugcuuaaagaacgcggauuuuucggcgcuauugccggguuucuggagggagguugggaaggcaugaucgcgggguggcauggauacacaagucacggcgcccacgguguugcaguggcugccgauuugaagucuacccaggaggcuauaaauaagauuacuaaaaaccucaauucccugagcgaauuagaggucaagaaccugcagcgacucucgggggccauggacgagcuucauaaagaaauccuggaguuggaugaaaagguggacgaccuaagagcagauacgaucucuucccaaauugagcuggccguacuccugucaaaugaaggcaucauuaacagugaggacgagcaccuucuggcuuuggaaaggaaacucaagaagaugcugggaccaagcgcgguugagauaggcaauggguguuucgaaacaaaacauaagugcaaccagaccugcuuagaucggaucgcagccggaacuuuugacgcuggugaguucucccugccuaccuuugauucucuaaauauuacagccgcaagccucaacgacgauggccuggacaaucacaccauccuuuuguauuacucaacugccgcuaguucccuggccgugacacucaugaucgcaauuuucgucguguauauggucagccgugauaacgugucuuguucaauaugccuguga

SEQ ID NO: 155287 - RNA, 1758 nt, Artificial Sequence
  derived and/or modified CDS sequence (opt3) from hemagglutinin__InfluenzaB__AGX18589
augaaggccaucauugugcugcucauggucguuaccagcaacgcugacagaauaugcacaggcaucacuuccucuaauucaccccacgugguaaaaacggcaacccagggggaggugaacgucacaggagugauuccucuuacuaccacaccaaccaagagucauuucgccaaucugaaagguacugaaacaaggggcaaguuguguccgaaaugcuuaaacuguaccgaucuggacguugcgcuagggcggcccaagugcacgggaaauaucccuagcgcucgcguguccauucuccacgagguccgaccagugacuucuggcuguuuucccaucaugcaugaucguaccaagauaagacaacugccuaaccuucugagggguuacgaacacauccgguugucgacacauaauguaauuaacgccgagaaugcaccagggggacccuauaaaaucggcacuucaggcagcugcccuaacguuaccaaugggaacggauucuuugccacaauggcuugggcagugccaaagaaugacaacaauaaaaccgccacgaacagucucacuauugaagucccguacaucuguacagagggugaggaucagauaaccguguggggcuuccacuccgacacugaaacacagauggcuaagcuguauggggauucuaaaccccagaaguuuaccagcuccgccaacggagugacgacccacuacgucucacaaauuggcgacuucccuaaucagacagaggauggugggcugccacagaguggacgcaucguuguggacuauaugguacaaaagagcggcaaaacuggcaccauuacauaccagagagggauccucuuaccccagaagguguggugcgcgucuggaagguccaaagucaucaaggguucacugccucuuauuggcgaagcagauuguuugcaugagaaauaugggggacugaacaagagcaaaccauacuacacuggcgagcacgccaaggcuauagguaauugccccaucugggugaagaccccgcuaaaacucgccaacgggacaaaguaucggccucccgcaaaacugcuuaaggaacgcggcuuuuucggagcuauugccggcuuucuggaagggggaugggaggguaugaucgcgggcuggcauggguacaccagucacggagcccacggcguugcaguggcugccgacuugaaaucuacucaggaggcuauaaauaagauuacgaagaaccucaauucccugagcgaauuagaggucaaaaaccugcagcgacucucgggugccauggaugagcuucauaaugaaauccuggaguuggacgaaaagguggacgaucuaagagcagacacaaucucuucccaaauugagcuggccguacuccugucaaacgaagggaucauuaauagugaggaugagcaccuucuggcuuuggaaaggaaacucaagaaaaugcugggcccaagcgcgguugagauaggaaacggcuguuucgaaaccaagcauaagugcaaucagacuugcuuagaccggaucgcagccgggaccuuugaugcuggagaguucucccugccuacauuugacucucuaaacauuaccgccgcaagccucaaugaugacggucuggauaaccacacuauccuuuuguauuacucaacagccgcuaguucccuggccgugacgcucaugaucgcaauuuucgucguguauauggucagccgugacaacgugucuuguucaauaugccuguga

SEQ ID NO: 155288 - RNA, 1758 nt, Artificial Sequence; identical to SEQ ID NO: 154562
  derived and/or modified CDS sequence (opt3) from hemagglutinin__InfluenzaB__AGX18600

SEQ ID NO: 155289 - RNA, 1758 nt, Artificial Sequence; identical to SEQ ID NO: 154562
  derived and/or modified CDS sequence (opt3) from hemagglutinin__InfluenzaB__AGX18611

SEQ ID NO: 155290 - RNA, 1758 nt, Artificial Sequence; identical to SEQ ID NO: 154562
  derived and/or modified CDS sequence (opt3) from hemagglutinin__InfluenzaB__AGX18622

SEQ ID NO: 155291 - RNA, 1758 nt, Artificial Sequence; identical to SEQ ID NO: 154562
  derived and/or modified CDS sequence (opt3) from hemagglutinin__InfluenzaB__AGX18633

SEQ ID NO: 155292 - RNA, 1758 nt, Artificial Sequence; identical to SEQ ID NO: 154562
  derived and/or modified CDS sequence (opt3) from hemagglutinin__InfluenzaB__AGX18644

SEQ ID NO: 155293 - RNA, 1758 nt, Artificial Sequence; identical to SEQ ID NO: 154562
  derived and/or modified CDS sequence (opt3) from hemagglutinin__InfluenzaB__AGX18655

SEQ ID NO: 155294 - RNA, 1758 nt, Artificial Sequence; identical to SEQ ID NO: 154562
  derived and/or modified CDS sequence (opt3) from hemagglutinin__InfluenzaB__AGX18666

SEQ ID NO: 155295 - RNA, 1758 nt, Artificial Sequence; identical to SEQ ID NO: 154562
  derived and/or modified CDS sequence (opt3) from hemagglutinin__InfluenzaB__AGX18677

SEQ ID NO: 155296 - RNA, 1758 nt, Artificial Sequence; identical to SEQ ID NO: 154562
  derived and/or modified CDS sequence (opt3) from hemagglutinin__InfluenzaB__AGX18688

SEQ ID NO: 155297 - RNA, 1758 nt, Artificial Sequence; identical to SEQ ID NO: 154562
  derived and/or modified CDS sequence (opt3) from hemagglutinin__InfluenzaB__AGX18699

SEQ ID NO: 155298 - RNA, 1758 nt, Artificial Sequence; identical to SEQ ID NO: 154562
  derived and/or modified CDS sequence (opt3) from hemagglutinin__InfluenzaB__AGX18710

SEQ ID NO: 155299 - RNA, 1758 nt, Artificial Sequence; identical to SEQ ID NO: 154562
  derived and/or modified CDS sequence (opt3) from hemagglutinin__InfluenzaB__AGX18721

SEQ ID NO: 155300 - RNA, 1758 nt, Artificial Sequence; identical to SEQ ID NO: 154562
  derived and/or modified CDS sequence (opt3) from hemagglutinin__InfluenzaB__AGX18732

SEQ ID NO: 155301 - RNA, 1758 nt, Artificial Sequence
  derived and/or modified CDS sequence (opt3) from hemagglutinin__InfluenzaB__AGX18743
augaaggccaucauugugcugcucauggucguuaccagcaacgcugacagaauaugcacaggcaucacuuccucuaauucaccccacgugguaaaaacggcaacccagggggaggugaacgucacaggagugauuccucuuacuaccacaccaaccaagagucauuucgccaaucugaaagguacugaaacaaggggcaaguuguguccgaaaugcuuaaacuguaccgaucuggacguugcgcuagggcggcccaagugcacgggaaauaucccuagcgcucgcguguccauucuccacgagguccgaccagugacuucuggcuguuuucccaucaugcaugaucguaccaagauaagacaacugccuaaccuucugagggguuacgaacacauccgguugucgaaucauaacguaauuaaugccgagaacgcaccagggggacccuauaaaaucggcacaucaggcagcugcccuaauguuacuaacgggaauggauucuuugccaccauggcuugggcagugccaaagaacgacaauaacaaaacagccaccaacagucucacgauugaagucccguacaucuguacugagggugaggaucagauaacaguguggggcuuccacuccgacaaugaaacccagauggcuaagcuguauggggauucuaaaccccagaaguuuacuagcuccgccaacggagugacaacccacuacgucucacaaauuggcgguuucccuaaucagacggaggacgggggacugccacagaguggccgcaucguuguggauuauaugguacaaaagagcggcaaaaccgggacaauuacuuaccagagaggaauccucuuaccccagaagguguggugcgcgucugguagguccaaagucaucaagggcucacugccucuuauuggggaagcagacuguuugcaugagaaauauggaggccugaacaagagcaaaccauacuacaccggugagcacgccaaggcuauagggaauugccccaucugggugaagacaccgcuaaaacucgccaacggcacuaaguaucggccucccgcaaaacugcuuaaggaacgcggauuuuucggcgcuauugccggguuucuggagggagguugggaaggcaugaucgcgggguggcauggauacaccagucacggcgcccacgguguugcaguggcugccgauuugaaaucuacacaggaggcuauaaauaagauuaccaagaaccucaauucccugagcgaauuagaggucaaaaaccugcagcgacucucgggggccauggacgagcuucauaaugaaauccuggaguuggaugaaaagguggacgaccuaagagcagauacuaucucuucccaaauugagcuggccguacuccugucaaacgaaggcaucauuaauagugaggacgagcaccuucuggcuuuggaaaggaaacucaagaaaaugcugggaccaagcgcgguugagauaggcaacggguguuucgaaacgaagcauaagugcaaucagacaugcuuagaucggaucgcagccggaaccuuugacgcuggugaguucucccugccuacuuuugauucucuaaacauuaccgccgcaagccucaacgacgauggccuggacaaucacacaauccuuuuguauuacucaaccgccgcuaguucccuggccgugacucucaugaucgcaauuuucgucguguauauggucagccgugauaacgugucuuguucaauaugccuguga

SEQ ID NO: 155302 - RNA, 1758 nt, Artificial Sequence; identical to SEQ ID NO: 154562
  derived and/or modified CDS sequence (opt3) from hemagglutinin__InfluenzaB__AGX18754

SEQ ID NO: 155303 - RNA, 1758 nt, Artificial Sequence; identical to SEQ ID NO: 154562
  derived and/or modified CDS sequence (opt3) from hemagglutinin__InfluenzaB__AGX18765

SEQ ID NO: 155304 - RNA, 1758 nt, Artificial Sequence; identical to SEQ ID NO: 154613
  derived and/or modified CDS sequence (opt3) from hemagglutinin__InfluenzaB__AGX18776

SEQ ID NO: 155305 - RNA, 1758 nt, Artificial Sequence; identical to SEQ ID NO: 154562
  derived and/or modified CDS sequence (opt3) from hemagglutinin__InfluenzaB__AGX18787

SEQ ID NO: 155306 - RNA, 1758 nt, Artificial Sequence; identical to SEQ ID NO: 154562
  derived and/or modified CDS sequence (opt3) from hemagglutinin__InfluenzaB__AGX18798

SEQ ID NO: 155307 - RNA, 1758 nt, Artificial Sequence
  derived and/or modified CDS sequence (opt3) from hemagglutinin__InfluenzaB__AGX18809
augaaggccaucauugugcugcucauggucguuaccagcaacgcugacagaauaugcacaggcaucacuuccucuaauucaccccacgugguaaaaacggcaacccagggggaggugaacgucacaggagugauuccucuuacuaccacaccaaccaagagucauuucgccaaucugaaagguacugaaacaaggggcaaguuguguccgaaaugcuuaaacuguaccgaucuggacguugcgcuagggcggcccaagugcacgggaaauaucccuagcgcucgcguguccauucuccacgagguccgaccagugacuucuggcuguuuucccaucaugcaugaucguaccaagauaagacaacugccuaaccuucugagggguuacgaacacauccgguugucgacacauaauguaauuaacgccgagaaugcaccagggggacccuauaaaaucggcacuucaggcagcugcccuaacguuaccaaugggaacggauucuuugccacaauggcuugggcagugccaaagaaugacaacaauaaaaccgccacgaacagucucacuauugaagucccguacaucuguacagagggugaggaucagauaaccguguggggcuuccacuccgacucugaaacucagauggcuaagcuguauggggauagcaaaccccagaaguuuacauccucagccaacggagugaccacgcacuacgucagucaaauuggcgguuucccuaaucagaccgaggacgggggacugccacagagcggccgcaucguuguggauuauaugaugcagaagucuggcaaaacagggacuauuaccuaccaaagaggaauccucuuaccccagaagguauggugcgcguccgguaggucaaaagugaucaagggcagccugccucuuauuggggaagcagacuguuugcaugagaaauauggaggccugaacaagaguaaaccauacuacacaggugagcacgccaaggcuauagggaauugccccaucugggucaagacuccgcuaaaacucgccaacggcaccaaguaucggccucccgcaaaacugcuuaaggaacgcggauuuuucggcgcuauugccggguuucuggagggagguugggaaggcaugaucgcgggguggcauggauacacaucucacggcgcccacgguguggcaguugcugccgauuugaaauccacccaggaggcuauaaauaagauuacuaagaaccucaauagccugucggaauuagaggugaaaaaccugcagcgacucucuggggccauggacgagcuucauaaugaaauccuggaguuggaugaaaaggucgacgaccuaagagcagauacgaucuccucacaaauugagcuggccgugcuccugaguaacgaaggcaucauuaauagcgaggacgagcaccuucuggcuuuggaaaggaaacucaagaaaaugcugggaccauccgcgguagagauaggcaacggguguuucgaaacaaagcauaagugcaaucagaccugcuuagaucggaucgcagccggaacuuuugacgcuggugaguucucucugccuaccuuugauagccuaaacauuacagccgcaucacucaaugacgauggccuggacaaccacaccauccuuuuguauuacaguacugccgcuuccagccuggccguuacacucaugaucgcaauuuucguggucuauauggugucucgugauaacgucucauguaguauaugccuguga

SEQ ID NO: 155308 - RNA, 1758 nt, Artificial Sequence; identical to SEQ ID NO: 155225
  derived and/or modified CDS sequence (opt3) from hemagglutinin__InfluenzaB__AGX18820

SEQ ID NO: 155309 - RNA, 1758 nt, Artificial Sequence; identical to SEQ ID NO: 154562
  derived and/or modified CDS sequence (opt3) from hemagglutinin__InfluenzaB__AGX18831

SEQ ID NO: 155310 - RNA, 1758 nt, Artificial Sequence; identical to SEQ ID NO: 154562
  derived and/or modified CDS sequence (opt3) from hemagglutinin__InfluenzaB__AGX18842

SEQ ID NO: 155311 - RNA, 1758 nt, Artificial Sequence; identical to SEQ ID NO: 154630
  derived and/or modified CDS sequence (opt3) from hemagglutinin__InfluenzaB__AGX18853

SEQ ID NO: 155312 - RNA, 1758 nt, Artificial Sequence
  derived and/or modified CDS sequence (opt3) from hemagglutinin__InfluenzaB__AGX18864
augaaggccaucauugugcugcucauggucguuaccagcaacgcugacagaauaugcacaggcaucacuuccucuaauucaccccacgugguaaaaacggcaacccagggggaggugaacgucacaggagugauuccucuuacuaccacaccaaccaagaguuacuucgccaaucugaaagguacugaaacaaggggcaaguuguguccgaaaugcuuaaacuguaccgaucuggacguugcgcuagggcggcccaagugcacgggaaauaucccuagcgcucgcguguccauucuccaugagguccgaccagugacuucuggcuguuuucccaucaugcacgaucguaccaagauaagacaacugccuaaccuucugagggguuaugaacauauccgguugucgaaucacaacguaauuaaugccgagaacgcaccagggggacccuacaaaaucggcacaucaggcagcugcccuaauguuacuaacgggaauggauucuuugccaccauggcuugggcagugccaaagaacgacaauaacaaaacagccaccaacagucucacgauugaagucccguauaucuguacugagggugaggaucagauaacaguguggggcuuccauuccgacaaugaagcucagauggccaagcuguacggggauucuaaaccccagaaguuuaccagcuccgcgaacggagugacuacacacuaugucucacaaauuggcgguuucccuaaucagaccgaggacgggggacugccacagaguggccgcaucguuguggauuacaugguacagaagaguggcaaaacggggaccauuacauaucaaagaggaauccucuuaccccagaagguguggugcgcaucugguagguccaaagucaucaagggcucacugccucuuauuggggaagccgacuguuugcacgagaaauacggaggccugaacaagagcaaaccauacuauacuggugagcaugcuaaggccauagggaauugccccaucugggugaagaccccgcuaaaacucgcaaacggcacaaaguaccggccucccgcuaaacugcuuaaggaacgcggauuuuucggcgccauugcgggguuucuggagggagguugggaaggcaugaucgccggguggcacggauauacuagccauggcgcacacgguguugcuguggccgcugauuugaaaucuacccaggaggccauaaauaagauuacaaagaaccucaauucccugagcgaauuagaggucaaaaaccugcagcgacucucgggggcaauggacgagcuucacaaugaaauccuggaguuggaugaaaagguggacgaccuaagagccgauaccaucucuucccaaauugagcuggcuguacuccugucaaacgaaggcaucauuaauagugaggacgagcaucuucuggcguuggaaaggaaacucaagaaaaugcugggaccaagcgcaguugagauaggcaacggguguuucgaaacuaagcacaagugcaaucagacgugcuuagaucggaucgccgcuggaacauuugacgccggugaguucucccugccuaccuuugauucucuaaacauuacugcagccagccucaacgacgauggccuggacaaucauaccauccuuuuguacuauucaacagcugccaguucccuggcagugacccucaugaucgcgauuuucgucguguacauggucagccgugauaacgugucuuguucaauaugccuguga

SEQ ID NO: 155313 - RNA, 1758 nt, Artificial Sequence
  derived and/or modified CDS sequence (opt3) from hemagglutinin__InfluenzaB__AGX18875
augaaggccaucauugugcugcucauggucguuaccagcaacgcugacagaauaugcacaggcaucacuuccucuaauucaccccacgugguaaaaacggcaacccagggggaggugaacgucacaggagugauuccucuuacuaccacaccaaccaagagucauuucgccaaucugaaagguacugaaacaaggggcaaguuguguccgaaaugcuuaaacuguaccgaucuggacguugcgcuagggcggcccaagugcacgggaaauaucccuagcgcucgcguguccauucuccacgagguccgaccagugacuucuggcuguuuucccaucaugcaugaucguaccaagauaagacaacugccuaaccuucugagggguuacgaacacauccgguugucgacacauaauguaauuaacgccgagaaugcaccagggggacccuauaaaaucggcacuucaggcagcugcccuaacguuaccaaucgcaacggguucuuugccacaauggcuugggcagugccaaagaaugacaacaauaaaaccgccacgaacagucucacuauugaagucccguacaucuguacagagggagaggaucagauaaccgugugggguuuccacuccgacaacgaaauucagauggcuaagcuguauggcgauucuaaaccccagaaguuuacuagcuccgccaauggggugacaacccacuacgucucacaaaucggaggcuucccuaaccagacggaggacggugggcugccacagaguggaagaauuguuguggauuauaugguacaaaagagcggcaaaaccggcacaaucacuuaccagagggggauccucuuaccccagaagguguggugcgcgucuggacgguccaaagucauuaaggguucacugccucuuauaggcgaagcagacuguuugcaugagaaauaugggggacugaauaagagcaaaccauacuacaccggcgagcacgccaaggcuaucgguaacugccccauuugggugaagacaccgcuaaaacucgccaaugggacuaaguaucgcccucccgcaaaacugcuuaaggaacgaggcuuuuucggagcuaucgccggcuuucuggaagggggaugggaggguaugauagcgggcuggcauggguacaccagucacggagcccacggcguugcaguggcugccgauuugaaaucuacacaggaggcuauuaacaagaucaccaagaaucucaacucccugagcgaauuagaggucaaaaaucugcagagacucucgggugccaucgacgagcuucauaacgaaauucuggaguuggaugaaaagguggacgaccuaagggcagauacuaucucuucccaaauugagcuggccguacuccugucaaaugaagggauaaucaacagugaggacgagcaccuucuggcuuuggaacggaaacucaagaaaaugcugggcccaagcgcgguugagauuggaaauggcuguuucgaaacgaagcauaagugcaaccagacaugcuuagaucguaucgcagccgggaccuuugacgcuggagaguucucccugccuacuuuugauucucuaaauaucaccgccgcaagccucaacgacgauggucuggacaaccacacaauucuuuuguauuacucaaccgccgcuaguucccuggccgugacucucaugauagcaaucuucgucguguauauggucagccgcgauaaugugucuuguucaauuugccuguga

SEQ ID NO: 155314 - RNA, 1758 nt, Artificial Sequence
  derived and/or modified CDS sequence (opt3) from hemagglutinin__InfluenzaB__AGX18886
augaaggccaucauugugcugcucauggucguuaccagcaacgcugacagaauaugcacaggcaucacuuccucuaauucaccccacgugguaaaaacggcaacccagggggaggugaacgucacaggagugauuccucuuacuaccacaccaaccaagagucauuucgccaaucugaaagguacugaaacaaggggcaaguuguguccgaaaugcuuaaacuguaccgaucuggacguugcgcuagggcggcccaagugcacgggaaauaucccuagcgcucgcguguccauucuccacgagguccgaccagugacuucuggcuguuuucccaucaugcaugaucguaccaagauaagacaacugccuaaccuucugagggguuacgaacacauccgguugucgacacauaauguaauuaacgccgagaaugcaccagggggacccuauaaaaucggcacuucaggcagcugcccuaacguuaccaaugggaacggauucuuugccacaauggcuugggcagugccaaagaaugacaacaauaaaaccgccacgaacagucucacuauugaagucccguacaucuguacagagggugaggaucagauaaccguguggggcuuccacuccgacaacgaaauucagauggcuaagcuguauggggauucuaaaccccagaaguuuacuagcuccgccaauggagugacaacccacuacgucucacaaaucggcgguuucccuaaccagacggaggacgggggacugccacagaguggccgcauuguuguggauuauaugguacaaaagagcggcaaaaccgggacaaucacuuaccagagaggaauccucuuaccccagaagguguggugcgcgucugguagguccaaagucauuaagggcucacugccucuuauaggggaagcagacuguuugcaugagaaauauggaggccugaauaagagcaaaccauacuacaccggugagcacgccaaggcuaucgggaacugccccauuugggugaagacaccgcuaaaacucgccaauggcacuaaguaucggccucccgcaaaacugcuuaaggaacgcggauuuuucggcgcuaucgccggguuucuggagggagguugggaaggcaugauagcgggguggcauggauacaccagucacggcgcccacgguguugcaguggcugccgauuugaaaucuacacaggaggcuauuaacaagaucaccaagaaucucaacucccugagcgaauuagaggucaaaaaucugcagcgacucucgggggccauggacgagcuucauaacgaaauccuggaguuggaugaaaagguggacgaccuaagagcagauacuauuucuucccaaaucgagcuggccguacuccugucaaaugaaggcauuauaaacagugaggacgagcaccuucuggcuuuggaaaggaaacucaagaaaaugcugggaccaagcgcgguugagaucggcaauggguguuucgaaacgaagcauaagugcaaccagacaugcuuagaucggauugcagccggaaccuuugacgcuggugaguucucccugccuacuuuugauucucuaaauaucaccgccgcaagccucaacgacaacggccuggauaaucacacaauccuuuuguauuacucaaccgccgcuaguucccuggccgugacucucauuauagcaaucuucgucguguauauggucagccgugacaacgugucuuguucaauuugccuguga

SEQ ID NO: 155315 - RNA, 1758 nt, Artificial Sequence; identical to SEQ ID NO: 155035
  derived and/or modified CDS sequence (opt3) from hemagglutinin__InfluenzaB__AGX18897

SEQ ID NO: 155316 - RNA, 1758 nt, Artificial Sequence; identical to SEQ ID NO: 154562
  derived and/or modified CDS sequence (opt3) from hemagglutinin__InfluenzaB__AGX18908

SEQ ID NO: 155317 - RNA, 1758 nt, Artificial Sequence; identical to SEQ ID NO: 154562
  derived and/or modified CDS sequence (opt3) from hemagglutinin__InfluenzaB__AGX18919

SEQ ID NO: 155318 - RNA, 1758 nt, Artificial Sequence
  derived and/or modified CDS sequence (opt3) from hemagglutinin__InfluenzaB__AGX18930
augaaggccaucauugugcugcucauggucguuaccagcaacgcugacagaauaugcacaggcaucacuuccucuaauucaccccacgugguaaaaacggcaacccagggggaggugaacgucacaggagugauuccucuuacuaccacaccaaccaagagucauuucgccaaucugaaagguacugaaacaaggggcaaguuguguccgaaaugcuuaaacuguaccgaucuggacguugcgcuagggcggcccaagugcacgggaaauaucccuagcgcucgcguguccauucuccacgagguccgaccagugacuucuggcuguuuucccaucaugcaugaucguaccaagauaagacaacugccuaaccuucugagggguuacgaacacauccgguugucgacacauaauguaauuaacgccgagaaugcaccagggggacccuauaaaaucggcacuucaggcagcugcccuaacguuaccaaugggaacggauucuuugccacaauggcuugggcagugccaaagaaugacaacaauaaaaccgccacgaacagucucacuauugaagucccguacaucuguacagagggugaggaucagauaaccguguggggcuuccacuccgacaacgaaacucagauggcuaagcuguauggggauucuaaaccccagaaguuuacaagcuccgccaauggagugaccacgcacuacgucucacaaauuggcgguuucccuaaccagaccgaggacgggggacugccacagaguggccgcaucguuguggauuauaugguacaaaagagcggcaaaacagggacuauuaccuaccagagaggaauccucuuaccccagaagguguggugcgcgucugguagguccaaagucaucaagggcucacugccucuuauuggggaagcagacuguuugcaugagaaauauggaggccugaauaagagcaaaccauacuacacaggugagcacgccaaggcuauagggaacugccccaucugggugaagacuccgcuaaaacucgccaauggcaccaaguaucggccucccgcaaaacugcuuaaggaacgcggauuuuucggcgcuauugccggguuucuggagggagguugggaaggcaugaucgcgggguggcauggauacacaagucacggcgcccacgguguugcaguggcugccgauuugaaaucuacccaggaggcuauaaacaagauuacuaagaaucucaacucccugagcgaauuagaggucaaaaaucugcagcgacucucgggggccauggacgagcuucauaacgaaauccuggaguuggaugaaaagguggacgaccuaagagcagauacgaucucuucccaaauugagcuggccguacuccugucaaaugaaggcaucauuaacagugaggacgagcaccuucuggcuuuggaaaggaaacucaagaaaaugcugggaccaagcgcgguugagauaggcaauggguguuucgaaacaaagcauaagugcaaccagaccugcaucgaucggauugcagccggaacuuuugacgcuggugaguucuccuuaccuaccuuugauucucugaauaucacagccgcaagccuaaacgacgauggccucgacaaccacaccauccugcuuuauuacucaacugccgcuaguuccuuggccgugacacugaugauugcaauauucgucguguauauggucagccgugauaaugugucuuguucaaucugccucuga

SEQ ID NO: 155319 - RNA, 1758 nt, Artificial Sequence; identical to SEQ ID NO: 154562
  derived and/or modified CDS sequence (opt3) from hemagglutinin__InfluenzaB__AGX18941

SEQ ID NO: 155320 - RNA, 1758 nt, Artificial Sequence; identical to SEQ ID NO: 154562
  derived and/or modified CDS sequence (opt3) from hemagglutinin__InfluenzaB__AGX18952

SEQ ID NO: 155321 - RNA, 1758 nt, Artificial Sequence; identical to SEQ ID NO: 154562
  derived and/or modified CDS sequence (opt3) from hemagglutinin__InfluenzaB__AGX18963

SEQ ID NO: 155322 - RNA, 1758 nt, Artificial Sequence
  derived and/or modified CDS sequence (opt3) from hemagglutinin__InfluenzaB__AGX18974
augaaggccaucauugugcugcucauggucguuaccagcaacgcugacagaauaugcacaggcaucacuuccucuaauucaccccacgugguaaaaacggcaacccagggggaggugaacgucacaggagugauuccucuuacuaccacaccaaccaagagucauuucgccaaucugaaagguacugaaacaaggggcaaguuguguccgaaaugcuuaaacuguaccgaucuggacguugcgcuagggcggcccaagugcacgggaaauaucccuagcgcucgcguguccauucuccacgagguccgaccagugacuucuggcuguuuucccaucaugcaugaucguaccaagauaagacaacugccuaaccuucugagggguuacgaacacauccgguugucgacacauaauguaauuaacgccgagaaugcaccagggggacccuauaaaaucggcacuucaggcagcugcccuaacguuaccaaugggaacggauucuuugccacaauggcuugggcagugccaaagaaugacaacaauaaaaccgccacgaacagucucacuauugaagucccguacaucuguacagagggugaggaucagauaaccguguggggcuuccacuccgacaacgaaacucagauggcuaagcuguauggggauucuaaaccccagaaguuuacaagcuccgccaauggagugaccacgcacuacgucucacaaauuggcgguuucccuaaccagaccgaggacgggggacugccacagaguggccgcaucguuguggauuauaugguacagaaaagcggcaaaacagggacuauuaccuaccaaagaggaauccucuuaccccagaagguguggugcgcgucugguagguccaaagucaucaagggcucacugccucuuauuggggaagcagacuguuugcaugagaaauauggaggccugaauaagagcaaaccauacuacacaggugagcacgccaaggcuauagggaacugccccaucugggugaagacuccgcuaaaacucgccaauggcaccaaguaucggccucccgcaaaacugcuuaaggaacgcggauuuuucggcgcuauugccggguuucuggagggagguugggaaggcaugaucgcgggguggcauggauacacaagucacggcgcccacgguguugcaguggcugccgauuugaaaucuacccaggaggcuauaaacaagauuacuaagaaucucaacucccugagcgaauuagaggucaaaaaucugcagcgacucucgggggccauggacgagcuucauaacgaaauccuggaguuggaugaaaagguggacgaccuaagagcagauacgaucucuucccaaauugagcuggccguacuccugucaaaugaaggcaucauuaacagugaggacgagcaccuucuggcuuuggaaaagaagcucaaaaagaugcugggaccaagcgcgguugagauaggcaauggguguuucgaaacaaagcauaaaugcaaccagaccugcuuagauaggaucgcagccggaacuuuugacgcuggugaguucucccugccuaccuuugauucucuaaauauuacagccgcaagccucaacgacgauggccuggacaaccacaccauccuuuuguauuacucaacugccgcuaguucccuggccgugacacucaugaucgcaauuuucgucguguauauggucagccgggauaaugugucuuguucaauaugccuguga

SEQ ID NO: 155323 - RNA, 1758 nt, Artificial Sequence; identical to SEQ ID NO: 154562
  derived and/or modified CDS sequence (opt3) from hemagglutinin__InfluenzaB__AGX18985

SEQ ID NO: 155324 - RNA, 1758 nt, Artificial Sequence
  derived and/or modified CDS sequence (opt3) from hemagglutinin__InfluenzaB__AGX18996
augaaggccaucauugugcugcucauggucguuaccagcaacgcugacagaauaugcacaggcaucacuuccucuaauucaccccacgugguaaaaacggcaacccagggggaagugaacgucacaggagugauuccucuuacuaccacaccaaccaagagucauuucgccaaucugaaagguacugaaacaaggggcaaguuguguccgaaaugcuuaaacuguaccgaucuggacguugcgcuagggcggcccaagugcacgggaaauacuccuagcgcucgcguguccauccuccacgagguccgaccagugaccucuggcuguuuucccauuaugcaugaucguacaaagaucagacaacugccuaaccuucugagggguuacgaacacauacgguugucgacucauaauguaaucaacgccgagaaugcaccagggggacccuauaaaauuggcaccucaggcagcugcccuaacguuacaaaugggaacggauucuuugccaccauggcuugggcagugccaaagaaugacaacaauaaaacggccacuaacagucucacaaucgaagucccguacauuuguaccgagggugaggaucagaucacuguguggggcuuccacuccgacaacgggacacagauggcuaagcuguauggagauucuaaaccccagaaguuuaccagcuccgccaauggcgugacgacccacuacgucucacaaauagguggguucccuaaccagacagaagacggaggccugccacagaguggccgcauuguuguggauuauaugguacaaaagagcgggaaaacuggaaccaucacauaccagagagguauucucuuaccccagaagguguggugcgcgucuggcagguccaaagucaucaaggggucacugccucuuaucggagaggcagacuguuugcaugaaaaauauggcggucugaauaagagcaaaccauacuacacuggggagcacgccaaggcuauuggcaacugccccauaugggugaagaccccgcuaaaacucgccaauggaacaaaguaucggccucccgcaaaacugcuuaaggagcgcggcuuuuucggggcuaucgccggauuucuggaagguggcugggaggggaugauugcgggauggcauggcuacaccagucacggugcccacgggguugcaguggcugccgauuugaaaucuacucaggaagcuaucaacaagauaacgaagaaucucaacucccugagcgaguuagaagucaaaaaucugcagcgacucucgggcgccauggacgagcuucauaacgagauucuggaauuggaugagaagguggacgaccuaagagcagauacaaucucuucccaaaucgaacuggccguacuccugucaaaugagggaauuaucaacagugaagacgagcaccuucuggcuuuggagaggaaacucaagaaaaugcugggcccaagcgcgguugaaauugggaauggauguuucgagaccaagcauaagugcaaccagacuugcuuagaucggauagcagccgguaccuuugacgcuggcgaguucucccugccuacauuugauucucuaaauaucaccgccgcaagccucaacgacgaugggcuggacaaccacacuauucuuuuguauuacucaacagccgcuaguucccuggccgugacgcucaugaucgcaaucuucgucguguauauggucagccgugauaaugugucuuguucaauuugccuguga

SEQ ID NO: 155325 - RNA, 1758 nt, Artificial Sequence; identical to SEQ ID NO: 154562
  derived and/or modified CDS sequence (opt3) from hemagglutinin__InfluenzaB__AGX19007

SEQ ID NO: 155326 - RNA, 1758 nt, Artificial Sequence
  derived and/or modified CDS sequence (opt3) from hemagglutinin__InfluenzaB__AGX19018
augaaggccaucauugugcugcucauggucguuaccagcaacgcugacagaauaugcacaggcaucacuuccucuaauucaccccacgugguaaaaacggcaacccagggggaggugaacgucacaggagugauuccucuuacuaccacaccaaccaagagucauuucgccaaucugaaagguacugaaacaaggggcaaguuguguccgaaaugcuuaaacuguaccgaucuggacguugcgcuagggcggcccaagugcacgggaaauaucccuagcgcucgcguguccauucuccacgagguccgaccagugacuucuggcuguuuucccaucaugcaugaucguaccaagauaagacaacugccuaacuuccuuagggguuacgaacacauccggcugucgacacauaauguaauuaacgccgagaaugcaccagggggacccuauaaaaucggcacuucaggcagcugcccuaacguuaccaaugggaacggauuuuucgccacaauggcuugggcagugccaaagaaugacaacaauaaaaccgccacgaacaguuugacuauugaagucccguacaucuguacagagggugaggaucagauaaccguguggggcuuucacuccgacucugaaacucagauggcuaagcucuauggggauagcaaaccccagaaguucacauccucagccaacggagugaccacgcacuacgucagucaaauuggcgguuuuccuaaucagaccgaggacgggggacugccacagagcggccgcaucguuguggauuauaugguacagaagucuggcaaaacagggacuauuaccuaccaaagaggaauccugcucccccagaagguguggugcgcguccgguaggucaaaagucaucaagggcagcuuaccucugauuggggaagcagacugucuucaugagaaauauggaggcuugaacaagaguaaaccauacuacacaggugagcacgccaaggcuauagggaauugccccaucugggugaagacuccgcugaaacuagccaacggcaccaaguaucggccucccgcaaaacuccugaaggaacgcggauucuuuggcgcuauugccggguuccuugagggagguugggaaggcaugaucgcgggguggcauggauacacaucucacggcgcccacgguguugcaguggcugccgaucugaaauccacccaggaggcuauaaauaagauuacuaagaacuugaauagccucucggaacuggaggucaaaaacuuacagcgacugucuggggccauggacgagcuccauaaugaaauccuugagcuggaugaaaagguggacgacuugagagcagauacgaucuccucacaaauugagcuagccguacugcucaguaacgaaggcaucauuaauagcgaggacgagcaucugcuugcucuggaaaggaaauugaagaaaaugcucggaccauccgcgguugagauaggcaacggguguuuugaaacaaagcacaagugcaaucagaccugccuggaucggaucgcagccggaacuuucgacgcuggugaguuuucuuuaccuaccuucgauagccugaacauuacagccgcaucacuaaaugacgauggccucgacaaccacaccauccugcuuuauuacaguacugccgcuuccagcuuggccgugacacugaugaucgcaauuuucgucguguauauggucucucgugauaacgugucauguaguauaugccucuga

SEQ ID NO: 155327 - RNA, 1758 nt, Artificial Sequence; identical to SEQ ID NO: 155225
  derived and/or modified CDS sequence (opt3) from hemagglutinin__InfluenzaB__AGX19029

SEQ ID NO: 155328 - RNA, 1758 nt, Artificial Sequence; identical to SEQ ID NO: 154562
  derived and/or modified CDS sequence (opt3) from hemagglutinin__InfluenzaB__AGX19040

SEQ ID NO: 155329 - RNA, 1758 nt, Artificial Sequence
  derived and/or modified CDS sequence (opt3) from hemagglutinin__InfluenzaB__AGX19051
augaaggccaucauugugcugcucauggucguuaccagcaacgcugacagaauaugcacaggcaucacuuccucuaauucaccccacgugguaaaaacggcaacccagggggaggugaacgucacaggagugauuccucuuacuaccacaccaaccaagagucauuucgccaaucugaaagguacugaaacaaggggcaaguuguguccgaaaugcuuaaacuguaccgaucuggacguugcgcuagggcggcccaagugcacgggaaauaucccuagcgcucgcguguccauucuccacgagguccgaccagugacuucuggcuguuuucccaucaugcaugaucguaccaagauaagacaacugccuaaccuucugagggguuacgaacacauccgguugucgacacauaauguaauuaacacugagaaugccccagggggacccuauaaaaucggcaccucaggcagcugcccuaacguuacaaaugggaacggauucuuugcaaccauggccugggcugugccaaagaaugacaacaauaaaacggcaacuaacagucucacaauugaagucccguacaucuguaccgagggugaggaucagauaacuguguggggcuuccacuccgacucugaaacacagauggccaagcuguauggggauagcaaaccccagaaguuuaccuccucagcuaacggagugacgacccacuacgucagucaaauuggcgguuucccuaaucagacagaggacgggggacugccacagagcggccgcaucguuguggauuauaugguacagaagucuggcaaaacugggaccauuacauaccaaagaggaauccucuuaccccagaagguguggugcgccuccgguaggucaaaagucaucaagggcagccugccucuuauuggggaagcggacuguuugcaugagaaauauggaggccugaacaagaguaaaccauacuacacuggugagcacgcaaaggccauagggaauugccccaucugggugaagaccccgcuaaaacucgcuaacggcacaaaguaucggccucccgccaaacugcuuaaggaacgcggauuuuucggcgcaauugcuggguuucuggagggagguugggaaggcaugaucgccggguggcauggauacaccucucacggcgcgcacgguguugccguggcagcugauuugaaauccacucaggaggccauaaauaagauuacgaagaaccucaauagccugucggaauuagaggucaaaaaccugcagcgacucucuggggcuauggacgagcuucauaaugaaauccuggaguuggaugaaaagguggacgaccuaagagccgauacaaucuccucacaaauugagcuggcaguacuccugaguaacgaaggcaucauuaauagcgaggacgagcaccuucuggccuuggaaaggaaacucaagaaaaugcugggaccauccgcuguugagauaggcaacggguguuucgaaaccaagcauaagugcaaucagacuugcuuagaucggaucgcggcaggaaccuuugacgccggugaguucucucugccuacauuugauagccuaaacauuaccgcugccucacucaaugacgauggccuggacaaccacacuauccuuuuguauuacaguacagcagccuccagccuggcugugacgcucaugaucgccauuuucgucguguauauggucucucgugauaacgugucauguaguauaugccuguga

SEQ ID NO: 155330 - RNA, 1758 nt, Artificial Sequence
  derived and/or modified CDS sequence (opt3) from hemagglutinin__InfluenzaB__AGX19062
augaaggccaucauugugcugcucauggucguuaccagcaacgcugacagaauaugcacaggcaucacuuccucuaauucaccccacgugguaaaaacggcaacccagggggaggugaacgucacaggagugauuccucuuacuaccacaccaaccaagagucauuucgccaaucugaaagguacugaaacaaggggcaaguuguguccgaaaugcuuaaacuguaccgaucuggacguugcgcuagggcggcccaagugcacgggaaauaucccuagcgcucgcguguccauucuccacgagguccgaccagugacuucuggcuguuuucccaucaugcaugaucguaccaagauaagacaacugccuaaccuucugagggguuacgaacacauccgguugucgacacauaauguaauuaacgccgagaaugcaccagggggacccuauaaaaucggcacuucaggcagcugcccuaacguuaccaaugggaacggauucuuugccacaauggcuugggcagugccaaagaaugacaacaauaaaaccgccacgaacagucucacuauugaagucccguacaucuguacagagggugaggaucagauaaccguguggggcuuccacuccgacaacgaaacucagauggcuaagcuguauggggauucuaaaccccagaaguuuacaagcuccgccaauggagugaccacgcacuacgucucacaaauuggcgguuucccuaaccagaccgaggacgggggacugccacagaguggccgcaucguuguggauuauaugguacaaaagagcggcaaaacagggacuauuaccuaccagagaggaauccucuuaccccagaagguguggugcgcgucugguagguccaaagucaucaagggcucacugccucuuauuggggaagcagacuguuugcaugagaaauauggaggccugaauaagagcaaaccauacuacacaggugagcacgccaaggcuauagggaacugccccaucugggugaagacuccgcuaaaacucgccaauggcaccaaguaucggccucccgcaaaacugcuuaaggaacgcggauuuuucggcgcuauugccggguuucuggagggagguugggaaggcaugaucgcgggguggcauggauacacaagucacggcgcccacgguguugcaguggcugccgauuugaaaucuacccaggaggcuauaaacaagauuacuaagaauuucaacucccucagcgaacuggaggucaaaaauuuacagcgacugucgggggccauggacgagcuccauaacgaaauccuugagcuggaugaaaagguggacgacuugagagcagauacgaucucuucccaaauugagcuagccguacugcucucaaaugaaggcaucauuaacagugaggacgagcaucugcuugcucuggaaaggaaauugaagaaaaugcucggaccaagcgcgguugagauaggcaauggguguuuugaaacaaagcacaagugcaaccagaccugccuggaucggaucgcagccggaacuuucgacgcuggugaguuuuccuuaccuaccuucgauucucugaauauuacagccgcaagccuaaacgacgauggccucgacaaccacaccauccugcuuuauuacucaacugccgcuaguuccuuggccgugacacugaugaucgcaauuuucgucguguauauggucagccgugauaaugugucuuguucaauaugccucuga

SEQ ID NO: 155331 - RNA, 1758 nt, Artificial Sequence; identical to SEQ ID NO: 154562
  derived and/or modified CDS sequence (opt3) from hemagglutinin__InfluenzaB__AGX19073

SEQ ID NO: 155332 - RNA, 1758 nt, Artificial Sequence
  derived and/or modified CDS sequence (opt3) from hemagglutinin__InfluenzaB__AGX19084
augaaggccaucauugugcugcucauggucguuaccagcaacgcugacagaauaugcacaggcaucacuuccucuaauucaccccacgugguaaaaacggcaacccagggggaggugaacgucacaggagugauuccucuuacuaccacaccaaccaagagucauuucgccaaucugaaagguacugaaacaaggggcaaguuguguccgaaaugcuuaaacuguaccgaucuggacguugcgcuagggcggcccaagugcacgggaaauaucccuagcgcucgcguguccauucuccacgagguccgaccagugacuucuggcuguuuucccaucaugcaugaucguaccaagauaagacaacugccuaaccuucugagggguuacgaacacaucaaauugucgacacauaauguaauuaacgccgagaaugcaccagggggacccuauaagaucggcacuucaggcagcugcccuaacguuaccaaugggaacggauucuuugccacaauggcuugggcagugccgaaaaaugacaacaauaagaccgccacgaacagucucacuauugaagucccauacaucuguacagagggugaggaucagauaaccguguggggcuuccacuccgacaacgaaaaucagauggcuaaacuguauggggauucuaagccccagaaguuuacuagcuccgccaacggagugacaacccacuacgucucacaaauuggcgguuucccuaaucagacggaggacgggggacugccacagaguggccggaucguuguggauuauaugguacagaaaagcggcaagaccgggacaauuacuuaccaacgcggaauccucuuaccccagaaaguguggugcgcgucugguagauccaaggucaucaaaggcucacugccucuuauuggggaagcagacuguuugcaugagaaguauggaggccugaacaaaagcaagccauacuacaccggugagcacgccaaggcuauagggaauugccccaucugggugaaaacaccgcuaaagcucgccaacggcacuaaauauaggccucccgcaaagcugcuuaaagaacggggauuuuucggcgcuauugccggguuucuggagggagguugggaaggcaugaucgcgggguggcauggauacaccagucacggcgcccacgguguugcaguggcugccgauuugaagucuacacaggaggcuauaaauaagauuaccaaaaaccucaauucccugagcgaauuagaggucaagaaccugcagcgccucucgggggccauggacgagcuucauaaugaaauccuggaguuggaugaaaaaguggacgaccuacgagcagauacuaucucuucccaaauugagcuggccguacuccugucaaacgaaggcaucauuaauagugaggacgagcaccuucuggcuuuggaaagaaagcucaaaaagaugcugggaccaagcgcgguugagauaggcaacggguguuucgaaacgaagcauaaaugcaaucagacaugcuuagauaggaucgcagccggaaccuuugacgcuggugaguucucccugccuacuuuugauucucuaaacauuaccgccgcaagccucaacgacgauggccuggacaaucacacaauccuuuuguauuacucaaccgccgcuaguucccuggccgugacucucaugaucgcaauuuucgucguguauauggucagccgggauaacgugucuuguucaauaugccuguga

SEQ ID NO: 155333 - RNA, 1758 nt, Artificial Sequence; identical to SEQ ID NO: 154562
  derived and/or modified CDS sequence (opt3) from hemagglutinin__InfluenzaB__AGX19095

SEQ ID NO: 155334 - RNA, 1758 nt, Artificial Sequence; identical to SEQ ID NO: 155225
  derived and/or modified CDS sequence (opt3) from hemagglutinin__InfluenzaB__AGX19106

SEQ ID NO: 155335 - RNA, 1758 nt, Artificial Sequence; identical to SEQ ID NO: 154562
  derived and/or modified CDS sequence (opt3) from hemagglutinin__InfluenzaB__AGX19117

SEQ ID NO: 155336 - RNA, 1758 nt, Artificial Sequence
  derived and/or modified CDS sequence (opt3) from hemagglutinin__InfluenzaB__AGX19128
augaaggccaucauugugcugcucauggucguuaccagcaacgcugacagaauaugcacaggcaucacuuccucuaauucaccccacgugguaaaaacggcaacccagggggaggugaacgucacaggagugauuccucuuacuaccacaccaaccaagagucauuucgccaaucugaaagguacugaaacaaggggcaaguuguguccgaaaugcuuaaacuguaccgaucuggacguugcgcuagggcggcccaagugcacgggaaauacuccuagcgcucgcguguccauccuccacgagguccgaccagugaccucuggcuguuuucccauuaugcaugaucguacaaagaucagacaacugccuaaccuucugagggguuacgaacacauacgguugucgacucauaauguaaucaacgccgagaaugcaccagggggacccuauaaaauuggcaccucaggcagcugcccuaacguuacaaaugggaacggauucuuugccaccauggcuugggcagugccaaagaaugacaacaauaaaacggccacuaacagucucacaaucgaagucccguacauuuguaccgagggugaggaucagaucacuguguggggcuuccacuccgacucugaaacacagauggcuaagcuguauggggauagcaaaccccagaaguuuaccuccucagccaacggagugacgacccacuacgucagucaaauaggcgguuucccuaaucagacagaggacgggggacugccacagagcggccgcauuguuguggauuauaugguacagaagucuggcaaaacugggaccaucacauaccaaagagguauucucuuaccccagaagguguggugcgcguccggaaggucaaaagucaucaagggcagccugccucuuaucggggaagcagacuguuugcaugagaaauauggaggccugaacaagaguaaaccauacuacacuggugagcacgccaaggcuauugggaauugccccauaugggugaagaccccgcuaaaacucgccaacggcacaaaguaucggccucccgcaaaacugcuuaaggaacgcggauuuuucggcgcuaucgccggguuucuggagggagguugggaaggcaugauugcgggguggcauggauacaccucucacggcgcccacgguguugcaguggcugccgauuugaaauccacucaggaggcuaucaauaagauaacgaagaaccucaauagccugucggaauuagaggucaaaaaccugcagcgacucucuggggccauggacgagcuucauaaugaaauucuggaguuggaugaaaagguggacgaccuaagagcagauacaaucuccucacaaaucgagcuggccguacuccugaguaacgaaggcauuaucaauagcgaggacgagcaccuucuggcuuuggaaaggaaacucaagaaaaugcugggaccauccgcgguugagauuggcaacggguguuucgaaaccaagcauaagugcaaucagacuugcuuagaucggauagcagccggaaccuuugacgcuggugaguucucucugccuacauuugauagccuaaacaucaccgccgcaucacucaaugacgauggccuggacaaccacacuauucuuuuguauuacaguacagccgcuuccagccuggccgugacgcucaugaucgcaaucuucgucguguauauggucucucgugauaacgugucauguaguauuugccuguga

SEQ ID NO: 155337 - RNA, 1758 nt, Artificial Sequence; identical to SEQ ID NO: 154562
  derived and/or modified CDS sequence (opt3) from hemagglutinin__InfluenzaB__AGX19139

SEQ ID NO: 155338 - RNA, 1758 nt, Artificial Sequence; identical to SEQ ID NO: 155035
  derived and/or modified CDS sequence (opt3) from hemagglutinin__InfluenzaB__AGX19150

SEQ ID NO: 155339 - RNA, 1758 nt, Artificial Sequence; identical to SEQ ID NO: 154562
  derived and/or modified CDS sequence (opt3) from hemagglutinin__InfluenzaB__AGX19161

SEQ ID NO: 155340 - RNA, 1758 nt, Artificial Sequence; identical to SEQ ID NO: 155035
  derived and/or modified CDS sequence (opt3) from hemagglutinin__InfluenzaB__AGX19172

SEQ ID NO: 155341 - RNA, 1758 nt, Artificial Sequence
  derived and/or modified CDS sequence (opt3) from hemagglutinin__InfluenzaB__AGX19183
augaaggccaucauugugcugcucauggucguuaccagcaacgcugacagaauaugcacaggcaucacuuccucuaauucaccccacgugguaaaaacggcaacccagggggaggugaacgucacaggagugauuccucuuacuaccacaccaaccaagagucauuucgccaaucugaaagguacugaaacaaggggcaaguuguguccgaaaugcuuaaacuguaccgaucuggacguugcgcuagggcggcccaagugcacgggaaauaucccuagcgcucgcguguccauucuccacgagguccgaccagugacuucuggcuguuuucccaucaugcaugaucguaccaagauaagacaacugccuaaccuucugagggguuacgaacacauccgguugucgacacauaauguaauuaacgccgagaaugcaccagggggacccuauaaaaucggcacuucaggcagcugcccuaacguuaccaaugggaacggauucuuugccacaauggcuugggcagugccaaagaaugacaacaauaaaaccgccacgaacagucucacuauugaagucccguacaucuguacagagggugaggaucagauaaccguguggggcuuccacuccgacacugaaacacagauggcuaagcuguauggggauucuaaaccccagaaguuuaccagcuccgccaacggagugacgacccacuacgucucacaaauuggcgguuucccuaaucagacagaggacgggggacugccacagaguggccgcaucguuguggauuauaugguacaaaagagcggcaaaacugggaccauuacauaccagagaggaauccucuuaccccagaagguguggugcgcgucugguagguccaaagucaucaagggcucacugccucuuauuggggaagcagacuguuugcaugagaaauauggaggccugaacaagagcaaaccauacuacacuggugagcacgccaaggcuauagggaauugccccaucugggugaagaccccgcuaaaacucgccaacggcacaaaguaucggccucccgcaaaacugcuuaaggaacgcggauuuuucggcgcuauugccggguuucuggagggagguugggaaggcaugaucgcgggguggcauggauacaccagucacggcgcccacgguguugcaguggcugccgauuugaaaucuacucaggaggcuauaaauaagauuacgaagaaccucaauucccugagcgaauuagaggucaaaaaccugcagcgacucucgggggccauggacgagcuucauaaugaaauccuggaguuggaugaaaagguggacgaccuaagagcagauacaaucucuucccaaauugagcuggccguacuccugucaaacgaaggcaucauuaauagugaggacgagcaccuucuggcuuuggaaaggaaacucaagaaaaugcugggaccaagcgcgguugagauaggcaacggguguuucgaaaccaagcauaagugcaaucagacuugcuuagaucggaucgcagccggaaccuuugacgcuggugaguucucccugccuacauuugauucucuaaacauuaccgccgcaagccucaaugacgauggccuggacaaccacacuauccuuuuguauuacucaacagccgcuaguucccuggccgugacgcucaugaucgcaauuuucgucguguauauggucagccgugauaacgugucuuguucaauaugccuguga

SEQ ID NO: 155342 - RNA, 1758 nt, Artificial Sequence; identical to SEQ ID NO: 154562
  derived and/or modified CDS sequence (opt3) from hemagglutinin__InfluenzaB__AGX19194

SEQ ID NO: 155343 - RNA, 1758 nt, Artificial Sequence
  derived and/or modified CDS sequence (opt3) from hemagglutinin__InfluenzaB__AGX19205
augaaggccaucauugugcugcucauggucguuaccagcaacgcugacagagugugcacaggcauaacuuccucuaauucaccccacguagugaaaacggcaacccagggggaggucaacgugacaggaguuaucccucuuacuaccacaccaaccaagagucauuucgccaaucugaaagguacugaaacaaggggcaaguuguguccgaaaugcuuaaacuguaccgaucuggacguggcgcuagggcggcccaagugcacgggaaauauuccuagcgcucgcgucuccauccuccacgaggugcgaccaguaacuucuggcuguuuucccauuaugcaugaucguaccaagaucagacaacugccuaaccuucugagggguuacgaacacauacgguugucgacacauaauguuaucaacgccgagaaugcaccagggggacccuauaaaauuggcacuucaggcagcugcccuaacgugaccaaugggaacggauucuuugccacaauggcuugggcagucccaaagaaugacaacaauaaaaccgccacgaacagucucacuaucgaagugccguacauuuguacagagggugaggaucagaucaccguguggggcuuccacuccgacaacgaaacucagauggcuaagcuguauggggauucuaaaccccagaaguuuacaagcuccgccaauggagucaccacgcacuacguuucacaaauaggcgguuucccuaaccagaccgaggacgggggacugccacagaguggccgcauugugguagauuauauggugcaaaagagcggcaaaacagggacuaucaccuaccagagagguauucucuuaccccagaaggucuggugcgcgucuggaagguccaaagugaucaagggcucacugccucuuaucggggaagcagacuguuugcaugagaaauauggaggccugaauaagagcaaaccauacuacacaggugagcacgccaaggcuauugggaacugccccauauggguuaagacuccgcuaaaacucgccaauggcaccaaguaucggccucccgcaaaacugcuuaaggaacgcggauuuuucggcgcuaucgccggguuucuggagggagguugggaaggcaugauugcgggguggcauggauacacaagucacggcgcccacgguguggcagucgcugccgauuugaaaucuacccaggaggcuaucaacaagauaacuaagaaucucaacucccugagcgaauuagaggugaaaaaucugcagcgacucucgggggccauggacgagcuucauaacgaaauucuggaguuggaugaaaagguagacgaccuaagagcagauacgaucucuucccaaaucgagcuggccguucuccugucaaaugaaggcauuaucaacagugaggacgagcaccuucuggcuuuggaaaggaaacucaagaaaaugcugggaccaagcgcgguggagauuggcaauggguguuucgaaacaaagcauaagugcaaccagaccugcuuagaucggauagcagccggaacuuuugacgcuggugaguucucccugccuaccuuugauucucuaaauaucacagccgcaagccucaacgacgauggccuggacaaccacaccauucuuuuguauuacucaacugccgcuaguucccuggccgucacacucaugaucgcaaucuucguggucuauauggugagccgugauaauguuucuuguucaauuugccuguga

SEQ ID NO: 155344 - RNA, 1758 nt, Artificial Sequence
  derived and/or modified CDS sequence (opt3) from hemagglutinin__InfluenzaB__AGX19216
augaaggccaucauugugcugcucauggucguuaccagcaacgcugacagaauaugcacaggcaucacuuccucuaauucaccccacgugguaaaaacggcaacccagggggaggugaacgucacaggagugauuccucuuacuaccacaccaaccaagagucauuucgccaaucugaaagguacugaaacaaggggcaaguuguguccgaaaugcuuaaacuguaccgaucuggacguugcgcuagggcggcccaagugcacgggaaauaucccuagcgcucgcguguccauucuccacgagguccgaccagugacuucuggcuguuuucccaucaugcaugaucguaccaagauaagacaacugccuaaccuucugagggguuacgaacacauccgguugucgacacauaauguaauuaacgccgagaaugcaccagggggacccuauaaaaucggcacuucaggcagcugcccuaacguuaccaaugggaacggauucuuugccacaauggcuugggcagugccaaagaaugacaacaauaaaaccgccacgaacagucucacuauugaagucccguacaucuguacagagggugaggaucagauaaccguguggggcuuccacuccgacaacgaaacucagauggcuaagcuguauggggauucuaaaccccagaaguuuacaagcuccgccaauggagugaccacgcacuacgucucacaaauuggcgguuucccuaaccagaccgaggacgggggacugccacagaguggccgcaucguuguggauuauaugguacaaaagagcggcaaacccgggacaauuacuuaccagagaggaauccucuuaccucagaagguguggugcgcgucugguagguccaaagucaucaagggcucacugccacuuauuggggaagcagacuguuugcaugagaaauauggaggccugaauaagagcaaacccuacuacaccggugagcacgccaaggcuauagggaacugcccgaucugggugaagacaccucuaaaacucgccaauggcacuaaguaucggcccccagcaaaacugcuuaaggaacgcggauuuuucggcgcuauugccggguuucuggagggagguugggaaggcaugaucgcgggguggcauggauacaccagucacggcgcccacgguguugcaguggcugccgauuugaaaucuacacaggaggcuauaaacaagauuaccaagaaucucaacucccugagcgaauuagaggucaaaaaucugcagcgacucucgggggccauggacgagcuucauaacgaaauccuggaguuggaugaaaagguggacgaccuaagagcagauacuaucucuucccaaauugagcuggccguacuccugucaaaugaaggcaucauuaacagugaggacgagcaccuucuggcuuuggaaaggaaacucaagaaaaugcugggaccuagcgcgguugagauaggcaauggguguuucgaaacgaagcauaagugcaaccagacaugcuuagaucggaucgcagccggaaccuuugacgcuggugaguucucccugcccacuuuugauucucuaaauauuaccgccgcaagccucaacgacgauggccuggacaaccacacaauccuuuuguauuacucaaccgccgcuaguucccuggccgugacucucaugaucgcaauuuucgucguguauauggucagccgugauaaugugucuuguucaauaugccuguga

SEQ ID NO: 155345 - RNA, 1758 nt, Artificial Sequence
  derived and/or modified CDS sequence (opt3) from hemagglutinin__InfluenzaB__AGX19227
augaaggccaucauugugcugcucauggucguuaccagcaacgcugacagaauaugcacaggcaucacuuccucuaauucaccccacgugguaaaaacggcaacccagggggaggugaacgucacaggagugauuccucuuacuaccacaccaaccaagagucauuucgccaaucugaaagguacugaaacaaggggcaaguuguguccgcaaugcuuaaacuguaccgaucuggacguugcgcuagggcggcccaaaugcacgggaaauaucccuagcgcucgcguguccauucuccacgagguccgaccagugacuucuggcuguuuucccaucaugcaugaucguaccaagauaagacagcugccuaaccuucugagggguuacgaacacauccgguugucgacacauaauguaauuaacgccgagaaugcaccagggggacccuauaagaucggcacuucaggcagcugcccuaacguuaccaaugggaacggauucuuugccacaauggcuugggcagugccaaaaagugacaauaacaagaccgccacuaauucccucacgauugaagucccguacaucuguacagagggugaggaucagauaaccguguggggcuuccacucugacaacgaaacucagauggcuaaacuguauggggauagcaagccccaaaaauuuacauccucagccaacggagugaccacgcacuacgucagucagauuggcgguuucccuaaucagaccgaggacgggggacugccacagagcggccgcaucguuguggauuauaugguacaaaagucuggcaagacagggacuauuaccuaccagagaggaauccucuuaccccagaaaguguggugcgcguccgguaggucaaaggucaucaaaggcagccugccucuuauuggggaagcagacuguuugcaugagaaguauggaggccugaacaaaaguaagccauacuacacaggugagcacgccaaagcuauagggaauugccccaucugggugaagacuccgcuaaagcucgccaacggcaccaaauaucggccucccgcaaagcugcuuaaagaacgcggauuuuucggcgcuauugccggguuucuggagggagguugggaaggcaugaucgcgggguggcauggauacacaucucacggcgcccacgguguugcaguggcugccgauuugaaguccacccaggaggcuauaaauaaaauuacuaagaaccucaauagccugucggaauuagaggucaagaaccugcaacgacucucuggggccauggacgagcuucauaaugaaauccuggaguuggaugaaaaaguggacgaccuaagagcagauacgaucuccucacagauugagcuggccguacuccugaguaacgaaggcaucauuaauagcgaggacgagcaccuucuggcuuuggaaaggaagcucaaaaagaugcugggaccauccgcgguugagauaggcaacggguguuucgaaacaaaacauaagugcaaucagaccugcuuagaucggaucgcagccggaacuuuugacgcuggugaguucucucugccuaccuuugauagccuaaacauuacagccgcaucacucaaugacgauggccuggacaaccacaccauccuuuuguauuacaguacugccgcuuccagccuggccgugacacucaugaucgcaauuuucgucguguauauggucucucgugauaacgugucauguaguauaugccuguga

SEQ ID NO: 155346 - RNA, 1758 nt, Artificial Sequence
  derived and/or modified CDS sequence (opt3) from hemagglutinin__InfluenzaB__AGX19238
augaaggccaucauugugcugcucauggucguuaccagcaacgcugacagaauaugcacaggcaucacuuccucuaauucaccccacgugguaaaaacggcaacccagggggaggugaacgucacaggagugauuccucuuacuaccacaccaaccaagagucauuucgccaaucugaaagguacugaaacaaggggcaaguuguguccgaaaugcuuaaacuguaccgaucuggacguugcgcuagggcggcccaagugcacgggaaauaucccuagcgcucgcguguccauucuccacgagguccgaccagugacuucuggcuguuuucccaucaugcaugaucguaccaagauaagacaacugccuaaccuucugagggguuacgaacacauccgguugucgacacauaauguaauuaacgccgagaaugcaccagggggacccuauaaaaucggcacuucaggcagcugcccuaacguuaccaaugggaacggauucuuugccacaauggcuugggcagugccaaagaaugacaaaaacaagaccgccacgaauagucucacuauugaagucccguacaucuguacagagggugaggaucagauaaccguguggggcuuccacuccgacaacgaaacucagauggcuaaacuguauggggauucuaagccccagaaguuuacaagcuccgccaacggagugaccacgcacuacgucucacaaauuggcgguuucccuaaucagaccgaggacgggggacugccacagaguggccgcaucguuguggauuauaugguacagaaaagcggcaagacagggacuauuaccuaccaaagaggaauccucuuaccccagaaaguguggugcgcgucugguagguccaaggucaucaaaggcucacugccucuuauuggggaagcagacuguuugcaugagaaguauggaggccugaacaaaagcaagccauacuacacaggugagcacgccaaggcuauagggaauugccccaucugggugaaaacuccgcuaaagcucgccaacggcaccaaauaucggccucccgcaaagcugcuuaaagaacgcggauuuuucggcgcuauugccggguuucuggagggagguugggaaggcaugaucgcgggguggcauggauacacaagucacggcgcccacgguguugcaguggcugccgauuugaagucuacccaggaggcuauaaauaagauuacuaaaaaccucaauucccugagcgaauuagaggucaagaaccugcagcgacucucgggggccauggacgagcuucauaaugaaauccuggaguuggaugaaaaaguggacgaccuaagagcagauacgaucucuucccaaauugagcuggccguacuccugucaaacgaaggcaucauuaauagugaggacgagcaccuucuggcuuuggaaaggaagcucaaaaagaugcugggaccaagcgcgguugagauaggcaacggguguuucgaaacaaagcauaaaugcaaucagaccugcuuagaucggaucgcagccggaacuuuugacgcuggugaguucucccugccuaccuuugauucucuaaacauuacagccgcaagccucaaugacgauggccuggacaaccacaccauccuuuuguauuacucaacugccgcuaguucccuggccgugacacucaugaucgcaauuuucgucguguauauggucagccgugauaacgugucuuguucaauaugccuguga

SEQ ID NO: 155347 - RNA, 1758 nt, Artificial Sequence; identical to SEQ ID NO: 155346
  derived and/or modified CDS sequence (opt3) from hemagglutinin__InfluenzaB__AGX19249

SEQ ID NO: 155348 - RNA, 1758 nt, Artificial Sequence; identical to SEQ ID NO: 154562
  derived and/or modified CDS sequence (opt3) from hemagglutinin__InfluenzaB__AGX19260

SEQ ID NO: 155349 - RNA, 1758 nt, Artificial Sequence; identical to SEQ ID NO: 154562
  derived and/or modified CDS sequence (opt3) from hemagglutinin__InfluenzaB__AGX19271

SEQ ID NO: 155350 - RNA, 1758 nt, Artificial Sequence
  derived and/or modified CDS sequence (opt3) from hemagglutinin__InfluenzaB__AGX19282
augaaggccaucauugugcugcucauggucguuaccagcaacgcugacagaauaugcacaggcaucacuuccucuaauucaccccacgugguaaaaacggcaacccagggggaggugaacgucacaggagugauuccucuuacuaccacaccaaccaagagucauuucgccaaucugaaagguacugaaacaaggggcaaguuguguccgaaaugcuuaaacuguaccgaucuggacguugcgcuagggcggcccaagugcacgggaaauaucccuagcgcucgcguguccauucuccacgagguccgaccagugacuucuggcuguuuucccaucaugcaugaucguaccaagauaagacaacugccuaaccuucugagggguuacgaacacauccgguugucgacacauaauguaauuaacgccgagaaugcaccagggggacccuauaaaaucggcacuucaggcagcugcccuaacguuaccaaugggaacggauucuuugccacaauggcuugggcagugccaaagaaugacaacaauaaaaccgccacgaacagucucacuauugaagucccguacaucuguacagagggugaggaucagauaaccguguggggcuuccacuccgacaacgaaacucagauggcuaagcuguauggggauucuaaaccccagaaguuuacaagcuccgccaauggagugaccacgcacuacgucucacaaauuggcgguuucccuaaccagaccgaggacgggggacugccacagaguggccgcaucguuguggauuauaugguacaaaagagcggcaaaacagggacuauuaccuaccagagaggaauccucuuaccccagaagguguggugcacaucugguagguccaaagucaucaagggcucacugccucuuauuggggaagcggacuguuugcaugagaaauauggaggccugaauaagagcaaaccauacuacacuggugagcacgcaaaggccauagggaacugccccaucugggugaagaccccgcuaaaacucgcuaauggcacaaaguaucggccucccgccaaacugcuuaaggaacgcggauuuuucggcgcaauugcuggguuucuggagggagguugggaaggcaugaucgccggguggcauggauacaccagucacggcgcgcacgguguugccguggcagcugauuugaaaucuacucaggaggccauaaacaagauuacgaagaaucucaacucccugagcgaauuagaggucaaaaaucugcagcgacucucgggggcuauggacgagcuucauaacgaaauccuggaguuggaugaaaagguggacgaccuaagagccgauacaaucucuucccaaauugagcuggcaguacuccugucaaaugaaggcaucauuaacagugaggacgagcaccuucuggccuuggaaaggaaacucaagaaaaugcugggaccaagcgcuguugagauaggcaauggguguuucgaaaccaagcauaagugcaaccagacuugcuuagaucggaucgcggcaggaaccuuugacgccggugaguucucccugccuacauuugauucucuaaauauuaccgcugccagccucaacgacgauggccuggacaaccacacuauccuuuuguauuacucaacagcagccaguucccuggcugugacgcucaugaucgccauuuucgucguguauauggucagccgugauaaugugucuuguucaauaugccuguga

SEQ ID NO: 155351 - RNA, 1758 nt, Artificial Sequence
  derived and/or modified CDS sequence (opt3) from hemagglutinin__InfluenzaB__AGX19304
augaaggccaucauugugcugcucauggucguuaccagcaacgcugacagaauaugcacaggcaucacuuccucuaauucaccccacgugguaaaaacggcaacccagggggaggugaacgucacaggagugauuccucuuacuaccacaccaaccaagagucauuucgccaaucugaaagguacugaaacaaggggcaaguuguguccgaaaugcuuaaacuguaccgaucuggacguugcgcuagggcggcccaagugcacgggaaauaucccuagcgcucgcguguccauucuccacgagguccgaccagugacuucuggcuguuuucccaucaugcaugaucguaccaagauaagacaacugccuaaccuucugagggguuacgaacacauccgguugucgacacauaauguaauuaacgccgagaaugcaccagggggacccuauaaaaucggcacuucaggcagcugcccuaacguuaccaaugggaacggauucuuugccacaauggcuugggcagugccaaagaaugacaacaauaaaaccgccauuaacagucucacgaucgaagucccguacauauguacugagggugaggaucagauuacaguguggggcuuccacuccgacaacgaaacccagauggcuaagcuguauggggauucuaaaccccagaaguuuacuagcuccgccaauggagugacaacccacuacgucucacaaaucggcgguuucccuaaccagacggaggacgggggacugccacagaguggccgcauuguuguggauuauaugguacaaaagagcggcaaaaccgggacaaucacuuaccagagaggaauccucuuaccccagaagguguggugcgcgucugguagguccaaagucauuaagggcucacugccucuuauaggggaagcagacuguuugcaugagaaauauggaggccugaauaagagcaaaccauacuacaccggugagcacgccaaggcuaucgggaacugccccauuugggugaagacaccgcuaaaacucgccaauggcacuaaguaucggccucccgcaaaacugcuuaaggaacgcggauuuuucggcgcuaucgccggguuucuggagggagguugggaaggcaugauagcgggguggcauggauacaccagucacggcgcccacgguguugcaguggcugccgauuugaaaucuacacaggaggcuauuaacaagaucaccaagaaucucaacucccugagcgaauuagaggucaaaaaucugcagcgacucucgggggccauggacgagcuucauaacgaaauccuggaguuggaugaaaagguggacgaccuaagagcagauacuauuucuucccaaaucgagcuggccguacuccugucaaaugaaggcauuauaaacagugaggacgagcaccuucuggcuuuggaaaggaaacucaagaaaaugcugggaccaagcgcgguugagaucggcaauggguguuucgaaacgaagcauaagugcaaccagacaugcuuagaucggauugcagccggaaccuuugacgcuggugaguucucccugccuacuuuugauucucuaaauaucaccgccgcaagccucaacgacgauggccuggacaaccacacaauccuuuuguauuacucaaccgccgcuaguucccuggccgugacucucaugauugcaauauucgucguguauauggucagccgugauaaugugucuuguucaaucugccuguga

SEQ ID NO: 155352 - RNA, 1758 nt, Artificial Sequence; identical to SEQ ID NO: 155351
  derived and/or modified CDS sequence (opt3) from hemagglutinin__InfluenzaB__AGX19315

SEQ ID NO: 155353 - RNA, 1758 nt, Artificial Sequence; identical to SEQ ID NO: 155350
  derived and/or modified CDS sequence (opt3) from hemagglutinin__InfluenzaB__AGX19326

SEQ ID NO: 155354 - RNA, 1758 nt, Artificial Sequence; identical to SEQ ID NO: 155350
  derived and/or modified CDS sequence (opt3) from hemagglutinin__InfluenzaB__AGX19337

SEQ ID NO: 155355 - RNA, 1758 nt, Artificial Sequence
  derived and/or modified CDS sequence (opt3) from hemagglutinin__InfluenzaB__AGX19348
augaaggccaucauugugcugcucauggucguuaccagcaacgcugacagaauaugcacaggcaucacuuccucuaauucaccccacgugguaaaaacggcaacccagggggaggugaacgucacaggagugauuccucuuacuaccacaccaaccaagagucauuucgccaaucugaaagguacugaaacaaggggcaaguuguguccgaaaugcuuaaacuguaccgaucuggacguugcgcuagggcggcccaagugcacgggaaauaucccuagcgcucgcguguccauucuccacgagguccgaccagugacuucuggcuguuuucccaucaugcaugaucguaccaagauaagacaacugccuaaccuucugagggguuacgaacacauccgguugucgacacauaauguaauuaacgccgagaaugcaccagggggacccuauaaaaucggcacuucaggcagcugcccuaacguuaccaaugggaacggauucuuugccacaauggcuugggcagugccaaagaaugacaacaauaaaaccgccacgaacagucucacuauugaagucccguacaucuguacagagggugaggaucagauaaccguguggggcuuccacuccgacaacgaagcucagauggccaagcuguauggggauucuaaaccccagaaguuuacuagcuccgcgaauggagugacaacccacuacgucucacaaauuggcgguuucccuaaccagacggaggacgggggacugccacagaguggccgcaucguuguggauuauaugguacaaaagagcggcaaaaccgggacaauuacuuaccagagaggaauccucuuaccccagaagguguggugcaccucugguagguccaaagucaucaagggcucacugccucuuauuggggaagcagacuguuugcaugagaaauauggaggccugaauaagagcaaaccauacuacacaggugagcacgccaaggcuauagggaacugccccaucugggugaagacuccgcuaaaacucgccaauggcaccaaguaucggccucccgcaaaacugcuuaaggaacgcggauuuuucggcgcuauugccggguuucuggagggagguugggaaggcaugaucgcgggguggcauggauacacaagucacggcgcccacgguguugcaguggcugccgauuugaaaucuacccaggaggcuauaaacaagauuacuaagaaucucaacucccugagcgaauuagaggucaaaaaucugcagcgacucucgggggccauggacgagcuucauaacgaaauccuggaguuggaugaaaagguggacgaccuaagagcagauacgaucucuucccaaauugagcuggccguacuccugucaaaugaaggcaucauuaacagugaggacgagcaccuucuggcuuuggaaaggaaacucaagaaaaugcugggaccaagcgcgguugagauaggcaauggguguuucgaaacaaagcauaagugcaaccagaccugcuuagaucggaucgcagccggaacuuuugacgcuggugaguucucccugccuaccuuugauucucuaaauauuacagccgcaagccucaacgacgauggccuggacaaccacaccauccuuuuguauuacucaacugccgcuaguucccuggccgugacacucaugaucgcaauuuucgucguguauauggucagccgugauaaugugucuuguucaauaugccuguga

SEQ ID NO: 155356 - RNA, 1758 nt, Artificial Sequence; identical to SEQ ID NO: 155350
  derived and/or modified CDS sequence (opt3) from hemagglutinin__InfluenzaB__AGX19359

SEQ ID NO: 155357 - RNA, 1755 nt, Artificial Sequence; identical to SEQ ID NO: 154779
  derived and/or modified CDS sequence (opt3) from hemagglutinin__InfluenzaB__AGX19370

SEQ ID NO: 155358 - RNA, 1758 nt, Artificial Sequence; identical to SEQ ID NO: 154613
  derived and/or modified CDS sequence (opt3) from hemagglutinin__InfluenzaB__AGX19381

SEQ ID NO: 155359 - RNA, 1758 nt, Artificial Sequence; identical to SEQ ID NO: 155350
  derived and/or modified CDS sequence (opt3) from hemagglutinin__InfluenzaB__AGX19392

SEQ ID NO: 155360 - RNA, 1758 nt, Artificial Sequence; identical to SEQ ID NO: 155350
  derived and/or modified CDS sequence (opt3) from hemagglutinin__InfluenzaB__AGX19403

SEQ ID NO: 155361 - RNA, 1758 nt, Artificial Sequence; identical to SEQ ID NO: 155037
  derived and/or modified CDS sequence (opt3) from hemagglutinin__InfluenzaB__AGX19414

SEQ ID NO: 155362 - RNA, 1755 nt, Artificial Sequence
  derived and/or modified CDS sequence (opt3) from hemagglutinin__InfluenzaB__AGX19425
augaagaccaucauugugcugcucauggucguuacaagcaacgccgacagaauaugcacuggcaucacguccucuaauucaccccacgugguaaaaaccgcuacacagggggaggugaacgucacuggagugauuccucuuaccacaaccccaacuaagaguuacuucgcaaaucugaaagguacaaggacccggggcaaguuguguccggauugcuuaaacuguacggaccuggauguugcccuagggcgccccaugugcgugggaacuaccccuagcgcgaaagcuagcauccuccaugaaguccgaccagugacaucuggcuguuuucccauuaugcacgaccguacuaagaucagacaacugccuaaucuucugagggguuaugagaacauacgguugucgacccagaauguaaucgaugccgaaaaggcaccagggggacccuaccgccucggcacaucaggcagcugcccuaacgccaccaguaaauccggguucuuugcuacgauggcaugggccguuccaaaggacaauaacaaaaaugcuacuaacccgcugacaguggagguccccuauauuuguaccgaaggagaggaucagaucacugugugggguuuccauucugacaauaagacacagaugagaaaccuguacggcgauagcaauccucaaaaauuuaccuccucagccaacggggugacgacccacuaugucagucagauuggauccuucccagaccagacagaggauggcggucucccccagucugggaggaucguuguggacuacaugaugcaaaagccuggaaagacuggcaccauaguauaucagcggggcguguuacugccacagcgcgucuggugcgcguccgggcgaucaaaagugauuaagggagcacuucccuugaucggugaagccgauugucugcaugagaaauacggcgggcuaaacaagagcaaaccguacuauacaggagaacacgcuaaggccauuggcaauugcccuaucuggguuaaaacuccccucaagcuggcaaacgguaccaaguacagaccuccagcuaaacuucugaaggagaggggguuuuucggcgccaucgcgggauuuuuggagggcgggugggaaggaaugauugccgguuggcacggcuauacaagucauggggcacacggaguggcugucgccgcugaccucaaaucuacccaggaggccauaaauaagaucacuaaaaacuuaaauucccugagcgaacuggaggugaagaaccuccaacggcuuucgggcgcaauggacgaacugcauaaugagauuuuggagcuagaugaaaagguagacgaucugcgugccgacacgaucucuucccagauagagcucgcuguucugcuuucaaacgaagguauuaucaauagugaggaugaacaccuguuggcgcucgagcgcaaacugaagaaaauguuagggcccagcgcaguggagaucggcaacggauguuucgaaacaaagcacaaaugcaaucagaccugccuggacagaauugccgcuggcacuuuuaacgccggggaguucucccuaccaaccuuugauucucucaauaucacagcagccagccugaacgacgauggacuugacaaucauaccauuuugcuguacuauucaacugcugccaguucccucgcagucacacugaugcuugcgauauucaucguguacauggucagcagggauaacgugucuuguucaauuugccuguga

SEQ ID NO: 155363 - RNA, 1758 nt, Artificial Sequence; identical to SEQ ID NO: 154562
  derived and/or modified CDS sequence (opt3) from hemagglutinin__InfluenzaB__AGX19436

SEQ ID NO: 155364 - RNA, 1758 nt, Artificial Sequence; identical to SEQ ID NO: 155225
  derived and/or modified CDS sequence (opt3) from hemagglutinin__InfluenzaB__AGX19447

SEQ ID NO: 155365 - RNA, 1755 nt, Artificial Sequence; identical to SEQ ID NO: 155104
  derived and/or modified CDS sequence (opt3) from hemagglutinin__InfluenzaB__AGX19458

SEQ ID NO: 155366 - RNA, 1755 nt, Artificial Sequence; identical to SEQ ID NO: 155104
  derived and/or modified CDS sequence (opt3) from hemagglutinin__InfluenzaB__AGX19469

SEQ ID NO: 155367 - RNA, 1758 nt, Artificial Sequence; identical to SEQ ID NO: 155037
  derived and/or modified CDS sequence (opt3) from hemagglutinin__InfluenzaB__AGX19480

SEQ ID NO: 155368 - RNA, 1758 nt, Artificial Sequence; identical to SEQ ID NO: 154630
  derived and/or modified CDS sequence (opt3) from hemagglutinin__InfluenzaB__AGX19491

SEQ ID NO: 155369 - RNA, 1758 nt, Artificial Sequence
  derived and/or modified CDS sequence (opt3) from hemagglutinin__InfluenzaB__AGX19502
augaaggccaucauugugcugcucauggucguuaccagcaacgcugacagaauaugcacaggcaucacuuccucuaauucaccccacgugguaaaaacggcaacccagggggaggugaacgucacaggagugauuccucuuacuaccacaccaaccaagagucauuucgccaaucugaaagguacugaaacaaggggcaaguuguguccgaaaugcuuaaacuguaccgaucuggacguugcgcuagggcggcccaagugcacgggaaagaucccuagcgcucgcguguccauucuccacgagguccgaccagugacuucuggcuguuuucccaucaugcaugaucguaccaaaauaagacaacugccuaaucuucugagggguuacgaacacauccgguugucgacacauaacguaauuaaugccgagaacgcaccagggggacccuauaagaucggcacuucaggcagcugcccuaauauuaccaacgggaauggauucuuugccacaauggcuugggcaguuccaaagaacgacaagaauaaaaccgccacgaacccgcucacuaucgaagugcccuacauauguacagagggugaggaucagauuaccgucuggggcuuccacagugacuccgaaacucagauggcuaagcuguauggggauucuaagccucagaaauuuacaagcuccgccaauggagugaccacgcacuacgugucacaaaucggcgguuucccaaaccagaccgaggacgggggacugccccagaguggccgcauugucguugauuauauggugcagaaaagcggcaaaacagggacuaucaccuaccaaagaggaauccucuuaccucagaagguauggugcgcgucugguagguccaaagugauuaagggcucacugccacuuauaggggaagcagacuguuugcaugagaaauauggaggccugaacaagagcaagcccuacuacacaggugagcacgccaaagcuaucgggaauugcccgauuugggucaagacuccucuaaaacucgccaacggcaccaaguaucggcccccagcaaaacugcuuaaggaacgcggauuuuucggcgcuaucgccggguuucuggagggagguugggaaggcaugauagcgggguggcauggauacacaagucacggcgcccacgguguggcaguugcugccgauuugaagucuacccaggaggcuauuaauaaaaucacuaagaaccucaauucccugagcgaauuagaggugaaaaaccugcagcgacucucgggggccauggacgagcuucauaaugaaauccuggaguuggaugaaaaggucgacgaccuaagagcagauacgauuucuucccaaaucgagcuggccgugcuccugucaaacgaaggcauuauaaauagugaggacgagcaccuucuggcuuuggaaaggaaacucaagaagaugcugggaccuagcgcgguagagaucggcaacggguguuucgaaacaaaacauaagugcaaucagaccugcuuagaucggauugcagccggaacuuuugacgcuggugaguucucccugcccaccuuugauucucuaaacaucacagccgcaagccucaaugacgauggccuggacaaccacaccauccuuuuguauuacucaacugccgcuaguucccuggccguuacacucaugauugcaauauucguggucuauauggugagccgugauaaugucucuuguucaaucugccuguga

SEQ ID NO: 155370 - RNA, 1758 nt, Artificial Sequence
  derived and/or modified CDS sequence (opt3) from hemagglutinin__InfluenzaB__AGX19513
augaaggccaucauugugcugcucauggucguuaccagcaacgcugacagaauaugcacaggcaucacuuccucuaauucaccccacgugguaaaaacggcaacccagggggaggugaacgucacaggagugauuccucuuacuaccacaccaaccaagagucauuucgccaaucugaaagguacugaaacaaggggcaaguuguguccgaaaugcuuaaacuguaccgaucuggacguugcgcuagggcggcccaagugcacgggaaagaucccuagcgcucgcguguccauucuccacgagguccgaccagugacuucuggcuguuuucccaucaugcaugaucguaccaaaauaagacaacugccuaaucuucugagggguuacgaacacauccgguugucgacacauaacguaauuaaugccgagaacgcaccagggggacccuauaagaucggcacuucaggcagcugcccuaauauuaccaacgggaauggauucuuugccacaauggcuugggcaguuccgaaaaacgacaagaauaaaaccgccacgaacccacucacuaucgaagugcccuacauauguacagagggugaggaucagauuaccgucuggggcuuccacagugacaaugaaacucagauggcuaagcuguauggggauuccaagccucagaaauuuacaucuagcgccaacggagugaccacgcacuacaucucccaaauuggcgguuucccaaaccagaccgaggacgggggacugccccagucaggccgcaucguggucgauuauaugguucagaagaguggcaaaacagggacuaucaccuaccaaagagguauucucuuaccucagaagguguggugcgcgagcggaaggucuaaaguaauaaagggcucccugccacuuaucggggaagcagacuguuugcaugagaaauauggaggccugaauaagucaaagcccuacuacacaggugagcacgccaaagcuauugggaacugcccgaucugggugaagacuccucuaaaacucgccaauggcaccaaguaucggcccccagcaaaacugcuuaaggaacgcggauuuuucggcgcuauagccggguuucuggagggagguugggaaggcaugauugcgggguggcauggauacacaagccacggcgcccacggugucgcaguggcugccgauuugaagaguacccaggaggcuaucaacaaaaucacuaagaaucucaacucucuguccgaauuagagguuaaaaaucugcagcgacucagcggggccauggacgagcuucauaacgaaauucuggaguuggaugaaaagguggacgaccuaagagcagauacgaucucgucucaaauugagcuggccguccuccuguccaaugaaggcauaaucaacucagaggacgagcaccuucuggcuuuggaaaggaaacucaagaagaugcugggaccuagugcgguggagauuggcaauggguguuucgaaacaaaacauaagugcaaccagaccugcuuagaucggaucgcagccggaacuuuugacgcuggugaguucagccugcccaccuuugauucccuaaauaucacagccgcaucucucaacgacgauggccuggacaaucacaccauucuuuuguauuacagcacugccgcuucaagucuggccguaacacucaugauagcaaucuucguuguguauauggucucccgugauaacgugagcuguucuauuugccuguga

SEQ ID NO: 155371 - RNA, 1758 nt, Artificial Sequence; identical to SEQ ID NO: 155370
  derived and/or modified CDS sequence (opt3) from hemagglutinin__InfluenzaB__AGX19524

SEQ ID NO: 155372 - RNA, 1758 nt, Artificial Sequence
  derived and/or modified CDS sequence (opt3) from hemagglutinin__InfluenzaB__AGX19535
augaaggccaucauugugcugcucauggucguuaccagcaacgcugacagaauaugcacaggcaucacuuccucuaauucaccccacgugguaaaaacggcaacccagggggaggugaacgucacaggagugauuccucuuacuaccacaccaaccaagagucauuucgccaaucugaaagguacugaaacaaggggcaaguuguguccgaaaugcuuaaacuguaccgaucuggacguugcgcuagggcggcccaagugcacgggaaauaucccuagcgcucgcguguccauucuccacgagguccgaccagugacuucuggcuguuuucccaucaugcaugaucguaccaagauaagacaacugccuaaccuucugagggguuacgaacacauccgguugucgacacauaauguaauuaacgccgagaaugcaccagggggacccuauaaaaucggcacuucaggcagcugcccuaacguuaccaaugggaacggauucuuugccacaauggcuugggcagugccaaagaaugacaacaauaaaaccgccacgaacagucucacuauugaagucccguacaucuguacagagggugaggaucagauaaccguguggggcuuccacuccgacgaugaaacucagauggcuaagcuguauggggacucuaaaccccagaaguuuacaagcuccgccaacggagugaccacgcacuacgucucacaaauuggcgguuucccuaaucagaccgaggaugggggacugccacagaguggccgcaucguuguggacuauaugguacaaaagagcggcaaaacagggacuauuaccuaccagagaggaauccucuuaccccagaagguguggugcgcgucugguagguccaaagucaucaagggcucacugccucuuauuggggaagcagauuguuugcaugagaaauauggaggccugaacaagagcaaaccauacuacacaggugagcacgccaaggcuauagggaauugccccaucugggugaagacuccgcuaaaacucgccaacggcaccaaguaucggccucccgcaaaacugcuuaaggaacgcggauuuuucggcgcuauugccggguuucuggagggagguugggaaggcaugaucgcgggguggcauggauacacaagucacggcgcccacgguguugcaguggcugccgacuugaaaucuacccaggaggcuauaaauaagauuacuaagaaccucaauucccugagcgaauuagaggucaaaaaccugcagcgacucucgggggccauggaugagcuucauaaugaaauccuggaguuggacgaaaagguggacgaucuaagagcagacacgaucucuucccaaauugagcuggccguacuccugucaaacgaaggcaucauuaauagugaggaugagcaccuucuggcuuuggaaaggaaacucaagaaaaugcugggaccaagcgcgguugagauaggcaacggguguuucgaaacaaagcauaagugcaaucagaccugcuuagaccggaucgcagccggaacuuuugaugcuggugaguucucccugccuaccuuugacucucuaaacauuacagccgcaagccucaaugaugacggccuggauaaccacaccauccuuuuguauuacucaacugccgcuaguucccuggccgugacacucaugaucgcaauuuucgucguguauauggucagccgugacaacgugucuuguucaauaugccuguga

SEQ ID NO: 155373 - RNA, 1758 nt, Artificial Sequence
  derived and/or modified CDS sequence (opt3) from hemagglutinin__InfluenzaB__AGX19546
augaaggccaucauugugcugcucauggucguuaccagcaacgcugacagaauaugcacaggcaucacuuccucuaauucaccccacgugguaaaaacggcaacccagggggaggugaacgucacaggagugauuccucuuacuaccacaccaaccaagagucauuucgccaaucugaaagguacugaaacaaggggcaaguuguguccgaaaugcuuaaacuguaccgaucuggacguugcgcuagggcggcccaagugcacgggaaauaucccuagcgcucgcguguccauucuccacgagguccgaccagugacuucuggcuguuuucccaucaugcaugaucguaccaagauaagacaacugccuaaccuucugagggguuacgaacacauccgguugucgacacauaauguaauuaacgccgagaaugcaccagggggacccuauaaaaucggcacuucaggcagcugcccuaacguuaccaaugggaacggauucuuugccacaauggcuugggcagugccaaagaaugacaacaauaaaaccgccacgaacagucucacuauugaagucccguacaucuguacagagggugaggaucagauaaccguguggggcuuccacuccgacaaggaaacucagauggcuaaacuguauggggauucuaagccccagaaguuuacaagcuccgccaacggagugaccacgcacuacgucucacaaauuggcgguuucccuaaucagaccgaggacgggggacugccacagaguggccgcaucguuguggauuauaugguacagaaaagcggcaagacagggacuauuaccuaccaaagaggaauccucuuaccccagaaaguguggugcgcgucugguagguccaaggucaucaaaggcucacugccucuuauuggggaagcagacuguuugcaugagaaguauggaggccugaacaaaagcaagccauacuacacaggugagcacgccaaggcuauagggaauugccccaucugggugaaaacuccgcuaaagcucgccaacggcaccaaauaucggccucccgcaaagcugcuuaaagaacgcggauuuuucggcgcuauugccggguuucuggagggagguugggaaggcaugaucgcgggguggcauggauacacaagucacggcgcccacgguguugcaguggcugccgauuugaagucuacccaggaggcuauaaauaagauuacuaaaaaccucaauucccugagcgaauuagaggucaagaaccugcagcgacucucgggggccauggacgagcuucauaaugaaauccuggaguuggaugaaaaaguggacgaccuaagagcagauacgaucucuucccaaauugagcuggccguacuccugucaaacgaaggcaucauuaauagugaggacgagcaccuucuggcuuuggaaaggaagcucaaaaagaugcugggaccaagcgcgguugagauaggcaacggguguuucgaaacaaagcauaaaugcaaucagaccugcuuagaucggaucgcagccggaacuuuugacgcuggugaguucucccugccuaccuuugauucucuaaacauuacagccgcaagccucaaugacgauggccuggacaaccacaccauccuuuuguauuacucaacugccgcuaguucccuggccgugacacucaugaucgcaauuuucgucguguauauggucagccgugauaacgugucuuguucaauaugccuguga

SEQ ID NO: 155374 - RNA, 1758 nt, Artificial Sequence
  derived and/or modified CDS sequence (opt3) from hemagglutinin__InfluenzaB__AGX19557
augaaggccaucauugugcugcucauggucguuaccagcaacgcugacagaauaugcacaggcaucacuuccucuaauucaccccacgugguaaaaacggcaacccagggggaagugaacgucacaggagugauuccucuuacuaccacaccaaccaagagucauuucgccaaucugaaagguacugaaacaaggggcaaguuguguccgaaaugcuuaaacuguaccgaucuggacguugcgcuagggcggcccaagugcacgggaaauaucccuagcgcucgcguguccauucuccacgagguccgaccagugacuucuggcuguuuucccaucaugcaugaucguaccaagauaagacaacugccuaaccuucugagggguuacgaacacauccgguugucgacacauaauguaauuaacgccgagaaugcaccagggggacccuauaaaaucggcacuucaggcagcugcccuaacguuaccaaugggaacggauucuuugccacaauggcuugggcagugccaaagaaugacaacaauaaaaccgccacgaacagucucacuauugaagucccguacaucuguacagguggcgaggaucagauaaccguguggggguuccacuccgacaacgagacucagauggcuaagcuguauggagauucuaaaccccagaaguuuacaagcuccgccaauggcgugaccacgcacuacgucucacaaauugguggguucccuaaccagaccgaagacggaggccugccacagaguggccgcaucguuguggauuauaugguacaaaagagcgggaaaacaggaacuauuaccuaccagagagguauccucuuaccccagaagguguggugcgcgucuggcagguccaaagucaucaaggggucacugccucuuauuggagaggcagacuguuugcaugaaaaauauggcggucugaauaagagcaaaccauacuacacaggggagcacgccaaggcuauaggcaacugccccaucugggugaagacuccgcuaaaacucgccaauggaaccaaguaucggccucccgcaaaacugcuuaaggagcgcggcuuuuucggggcuauugccggauuucuggaagguggcugggaggggaugaucgcgggauggcauggcuacacaagucacggugcccacgggguugcaguggcugccgauuugaaaucuacccaggaagcuauaaacaagauuacuaagaaucucaacucccugagcgaguuagaagucaaaaaucugcagcgacucucgggcgccauggacgagcuucauaacgagauccuggaauuggaugagaagguggacgaccuaagagcagauacgaucucuucccaaauugaacuggccguacuccugucaaaugagggaaucauuaacagugaagacgagcaccuucuggcuuuggagaggaaacucaagaaaaugcugggcccaagcgcgguugaaauagggaauggauguuucgagacaaagcauaagugcaaccagaccugcuuagaucggaucgcagccgguacuuuugacgcuggcgaguucucccugccuaccuuugauucucuaaauauuacagccgcaagccucaacgacgaugggcuggacaaccacaccauccuuuuguauuacucaacugccgcuaguucccuggccgugacacucaugaucgcaauuuucgucguguauauggucagccgugauaaugugucuuguucaauaugccuguga

SEQ ID NO: 155375 - RNA, 1758 nt, Artificial Sequence; identical to SEQ ID NO: 155037
  derived and/or modified CDS sequence (opt3) from hemagglutinin__InfluenzaB__AGX19568

SEQ ID NO: 155376 - RNA, 1758 nt, Artificial Sequence; identical to SEQ ID NO: 155370
  derived and/or modified CDS sequence (opt3) from hemagglutinin__InfluenzaB__AGX19579

SEQ ID NO: 155377 - RNA, 1758 nt, Artificial Sequence; identical to SEQ ID NO: 155037
  derived and/or modified CDS sequence (opt3) from hemagglutinin__InfluenzaB__AGX19590

SEQ ID NO: 155378 - RNA, 1758 nt, Artificial Sequence; identical to SEQ ID NO: 155037
  derived and/or modified CDS sequence (opt3) from hemagglutinin__InfluenzaB__AGX19601

SEQ ID NO: 155379 - RNA, 1758 nt, Artificial Sequence; identical to SEQ ID NO: 155037
  derived and/or modified CDS sequence (opt3) from hemagglutinin__InfluenzaB__AGX19612

SEQ ID NO: 155380 - RNA, 1758 nt, Artificial Sequence
  derived and/or modified CDS sequence (opt3) from hemagglutinin__InfluenzaB__AGX19623
augaaggccaucauugugcugcucauggucguuaccagcaacgcugacagaauaugcacaggcaucacuuccucuaauucaccccacgugguaaaaacggcaacccagggggaggugaacgucacaggagugauuccucuuacuaccacaccaaccaagagucauuucgccaaucugaaagguacugaaacaaggggcaaguuguguccgaaaugcuuaaacuguaccgaucuggacguugcgcuagggcggcccaagugcacgggaaauaucccuagcgcucgcguguccauucuccacgagguccgaccagugacuucuggcuguuuucccaucaugcaugaucguaccaagauaagacaacugccuaaccuucugagggguuacgaacacauccgguugucgacacauaauguaauuaacgccgagaaugcaccagggggacccuauaaaaucggcacuucaggcagcugcccuaacguuaccaaugggaacggauucuuugccacaauggcuugggcagugccaaagaaugacaacaauaaaaccgccacgaacagucucacuauugaagucccguacaucuguacagagggugaggaucagauaaccguguggggcuuccacuccgacaacgaaacucagauggcuaagcuguauggggauucuaaaccccagaaguuuacaagcuccgccaauggagugaccacgcacuacgucucacaaauuggcgguuucccuaaccagaccgaggacgggggacugccacagaguggccgcaucguuguggauuauaugguacaaaagagcggcaaaacagggacuauuaccuaccagagaggaauccucuuaccccagaagguguggugcgcgucugguagguccaaagucaucaagggcucacugccucuuauuggggaagcagacuguuugcaugagaaauauggaggccugaauaagagcaaaccauacuacacaggugagcacgccaaggcuauagggaacugccccaucugggugaagacuccgcuaaaacucgccaauggcaccaaguaucggccucccgcaaaacugcuuaaggaacgcggauuuuucggcgcuauugccggguuucuggagggagguugggaaggcaugaucgcgggguggcauggauacacaagucacggcgcccacgguguugcaguggcugccgauuugaaaucuacccaggaggcuauaaacaagauuacuaagaaucucaacucccugagcgaauuagaggucaaaaaucugcagcgacucucgggggccauggacgagcuucauaacgaaauccuggaguuggaugaaaagguggacgaccuaagagcagauacgaucucuucccaaauugagcuggccguacuccugucaaaugaaggcaucauuaacagugaggacgagcaccuucuggcuuuggaaaggaaacucaagaaaaugcugggaccaagcgcgguugagauaggcaauggguguuucgaaacaaagcauaagugcaaccagaccugcuuagaucggaucgcagccggaacuuuugacgcuggugaguucucccugccuaccuuugauucucuaaauauuacagccgcaagccucaacgacgauggccuggacaaccacaccauccuuuuguauuacucaacugccgcuaguucccuggccguggcacucaugaucgcgauuuucgucguguauauggucagccgugauaaugugucuuguucaauaugccuguga

SEQ ID NO: 155381 - RNA, 1758 nt, Artificial Sequence; identical to SEQ ID NO: 155037
  derived and/or modified CDS sequence (opt3) from hemagglutinin__InfluenzaB__AGX19634

SEQ ID NO: 155382 - RNA, 1758 nt, Artificial Sequence; identical to SEQ ID NO: 154562
  derived and/or modified CDS sequence (opt3) from hemagglutinin__InfluenzaB__AGX19645

SEQ ID NO: 155383 - RNA, 1758 nt, Artificial Sequence; identical to SEQ ID NO: 154613
  derived and/or modified CDS sequence (opt3) from hemagglutinin__InfluenzaB__AGX19656

SEQ ID NO: 155384 - RNA, 1758 nt, Artificial Sequence
  derived and/or modified CDS sequence (opt3) from hemagglutinin__InfluenzaB__AGX19667
augaaggccaucauugugcugcucauggucguuaccagcaacgcugacagaauaugcacaggcaucacuuccucuaauucaccccacgugguaaaaacggcaacccagggggaggugaacgucacaggagugauuccucuuacuaccacaccaaccaagagucauuucgccaaucugaaagguacugaaacaaggggcaaguuguguccgaaaugcuuaaacuguaccgaucuggacguugcgcuagggcggcccaagugcacgggaaagaucccuagcgcucgcguguccauucuccacgagguccgaccagugacuucuggcuguuuucccaucaugcaugaucguaccaaaauaagacaacugccuaaucuucugagggguuacgaacacauccgguugucgacacauaacguaauuaaugccgagaacgcaccagggggacccuauaagaucggcacuucaggcagcugcccuaauauuaccaacgggaauggauucuuugccacaauggcuugggcaguuccgaaaaacgacaagaauaaaaccgccacgaacccacucacuaucgaagugcccuacauauguacagagggugaggaucagauuaccgucuggggcuuccacagugacaaugaaacucagauggcuaagcuguauggggauuccaagccucagaaauuuacaucuagcgccaacggagugaccacgcacuacgugucccaaaucggcgguuucccaaaccagaccgaggacgggggacugccccagucaggccgcauugucguugauuauauggugcagaagaguggcaaaacagggacuaucaccuaccaaagaggaauccucuuaccucagaagguauggugcgcgagcgguaggucuaaagugauuaagggcucccugccacuuauaggggaagcagacuguuugcaugagaaauauggaggccugaauaagucaaagcccuacuacacaggugagcacgccaaagcuaucgggaacugcccgauuugggucaagacuccucuaaaacucgccaauggcaccaaguaucggcccccagcaaaacugcuuaaggaacgcggauuuuucggcgcuaucgccggguuucuggagggagguugggaaggcaugauagcgggguggcauggauacacaagccacggcgcccacgguguggcaguugcugccgauuugaagaguacccaggaggcuauuaacaaaaucacuaagaaucucaacucucuguccgaauuagaggugaaagaccugcagcgacucagcggggccauggaugagcuucauaaugaaauccuggaguuggacgaaaaggucgacgaucuaagagcagacacgauuucgucucaaaucgagcuggccgugcuccuguccaacgaaggcauuauaaauucagaggaugagcaccuucuggcuuuggaaaggaaacucaagaagaugcugggaccuagugcgguagagaucggcaacggguguuucgaaacaaaacauaagugcaaucagaccugcuuagaccggauugcagccggaacuuuugaugcuggugaguucagccugcccaccuuugacucccuaaacaucacagccgcaucucucaaugaugacggccuggauaaccacaccauccuuuuguauuacagcacugccgcuucaagucuggccguuacacucaugauugcaauauucguggucuauauggugucccgugacaaugucagcuguucuaucugccuguga

SEQ ID NO: 155385 - RNA, 1758 nt, Artificial Sequence; identical to SEQ ID NO: 155037
  derived and/or modified CDS sequence (opt3) from hemagglutinin__InfluenzaB__AGX19678

SEQ ID NO: 155386 - RNA, 1758 nt, Artificial Sequence; identical to SEQ ID NO: 154562
  derived and/or modified CDS sequence (opt3) from hemagglutinin__InfluenzaB__AGX19700

SEQ ID NO: 155387 - RNA, 1758 nt, Artificial Sequence
  derived and/or modified CDS sequence (opt3) from hemagglutinin__InfluenzaB__AGX19711
augaaggccaucauugugcugcucauggucguuaccagcaacgcugacagaauaugcacaggcaucacuuccucuaauucaccccacgugguaaaaacggcaacccagggggaggugaacgucacaggagugauuccucuuacuaccacaccaaccaagagucauuucgccaaucugaaagguacugaaacaaggggcaaguuguguccgaaaugcuuaaacuguaccgaucuggacguugcgcuagggcggcccaagugcacgggaaauaucccuagcgcucgcguguccauucuccacgagguccgaccagugacuucuggcuguuuucccaucaugcaugaucguaccaagauaagacaacugccuaaccuucugagggguuacgaacacauccgguugucgacacauaauguaauuaacgccgagaaugcaccagggggacccuauaaaaucggcacuucaggcagcugcccuaacguuaccaaugggaacggauucuuugccacaauggcuugggcagugccaaagaaugacaaaaacaagaccgccacgaauagucucacuauugaagucccguacaucuguaaagagggugaggaucagauaacaguguggggcuuccacuccgacaacgaaacccagauggcuaagcuguauggggauucuaagccccagaaauuuacuagcuccgccaacggagugacaacccacuacgucucacaaauuggcgguuucccuaaucagacggaggacgggggacugccacagaguggccgcaucguuguggauuauaugguacaaaagagcggcaaaaccgggacaauuacuuaccagagaggaauccucuuaccccagaagguguggugcgcgucugguagguccaaagucaucaagggcucacugccucuuauuggggaagcagacuguuugcaugagaaauauggaggccugaacaagagcaagccauacuacaccggugagcacgccaaagcuauagggaauugccccaucugggugaagacaccgcuaaaacucgccaacggcacuaaguaucggccucccgcaaaacugcuuaaggaacgcggauuuuucggcgcuauugccggguuucuggagggagguugggaaggcaugaucgcgggguggcauggauacaccagucacggcgcccacgguguugcaguggcugccgauuugaagucuacacaggaggcuauaaauaaaauuaccaagaaccucaauucccugagcgaauuagaggucaaaaaccugcagcgacucucgggggccauggacgagcuucauaaugaaauccuggaguuggaugaaaagguggacgaccuaagagcagauacuaucucuucccaaauugagcuggccguacuccugucaaacgaaggcaucauuaauagugaggacgagcaccuucuggcuuuggaaaggaaacucaagaagaugcugggaccaagcgcgguugagauaggcaacggguguuucgaaacgaaacauaagugcaaucagacaugcuuagaucggaucgcagccggaaccuuugacgcuggugaguucucccugccuacuuuugauucucuaaacauuaccgccgcaagccucaaugacgauggccuggacaaccacacaauccuuuuguauuacucaaccgccgcuaguucccuggccgugacucucaugaucgcaauuuucgucguguauauggucagccgugauaacgugucuuguucaauaugccuguga

SEQ ID NO: 155388 - RNA, 1758 nt, Artificial Sequence; identical to SEQ ID NO: 155037
  derived and/or modified CDS sequence (opt3) from hemagglutinin__InfluenzaB__AGX19722

SEQ ID NO: 155389 - RNA, 1758 nt, Artificial Sequence; identical to SEQ ID NO: 155037
  derived and/or modified CDS sequence (opt3) from hemagglutinin__InfluenzaB__AGX19733

SEQ ID NO: 155390 - RNA, 1758 nt, Artificial Sequence; identical to SEQ ID NO: 155037
  derived and/or modified CDS sequence (opt3) from hemagglutinin__InfluenzaB__AGX19744

SEQ ID NO: 155391 - RNA, 1758 nt, Artificial Sequence; identical to SEQ ID NO: 154562
  derived and/or modified CDS sequence (opt3) from hemagglutinin__InfluenzaB__AGX19755

SEQ ID NO: 155392 - RNA, 1758 nt, Artificial Sequence; identical to SEQ ID NO: 155037
  derived and/or modified CDS sequence (opt3) from hemagglutinin__InfluenzaB__AGX19766

SEQ ID NO: 155393 - RNA, 1758 nt, Artificial Sequence; identical to SEQ ID NO: 155370
  derived and/or modified CDS sequence (opt3) from hemagglutinin__InfluenzaB__AGX19788

SEQ ID NO: 155394 - RNA, 1758 nt, Artificial Sequence; identical to SEQ ID NO: 155037
  derived and/or modified CDS sequence (opt3) from hemagglutinin__InfluenzaB__AGX19799

SEQ ID NO: 155395 - RNA, 1758 nt, Artificial Sequence; identical to SEQ ID NO: 155037
  derived and/or modified CDS sequence (opt3) from hemagglutinin__InfluenzaB__AGX19810

SEQ ID NO: 155396 - RNA, 1758 nt, Artificial Sequence
  derived and/or modified CDS sequence (opt3) from hemagglutinin__InfluenzaB__AGX19821
augaaggccaucauugugcugcucauggucguuaccagcaacgcugacagaauaugcacaggcaucacuuccucuaauucaccccacgugguaaaaacggcaacccagggggaggugaacgucacaggagugauuccucuuacuaccacaccaaccaagagucauuucgccaaucugaaagguacugaaacaaggggcaaguuguguccgaaaugcuuaaacuguaccgaucuggacguugcgcuagggcggcccaagugcacgggaaauaucccuagcgcucgcguguccauucuccacgagguccgaccagugacuucuggcuguuuucccaucaugcaugaucguaccaagauaagacaacugccuaaccuucugagggguuacgaacacauccgguugucgacacauaauguaauuaacgccgagaaugcaccagggggacccuauaaaaucggcacuucaggcagcugcccuaacguuaccaaugggaacggauucuuugccacaauggcuugggcagugccaaagaaugacaacaauaaaaccgccacgaacagucucacuauugaagucccguacaucuguacagagggugaggaucagauaaccguguggggcuuccacuccgacaacgaaacucagauggcuaagcuguauggggauucuaaaccccagaaguuuacaagcuccgccaauggagugaccacgcacuacgucucacaaauuggcgguuucccuaaccagaccgaggacgggggacugccacagaguggccgcaucguuguggauuauaugguacaaaagagcggcaaaacagggacuauuaccuaccagagaggaauccucuuaccccagaagguguggugcgcgucugguagguccaaagucaucaagggcucacugccucuuauuggggaagcagacuguuugcaugagaaauauggaggccugaauaagagcaaaccauacuacacaggugagcacgccaaggcuauagggaacugccccaucugggugaagacuccgcuaaaacucgccaauggcaccaaguaucggccucccgcaaaacugcuuaaggaacgcggauuuuucggcgcuauugccggguuucuggagggagguugggaaggcaugaucgcgggguggcauggauacacaagucacggcgcccacgguguugcaguggcugccgauuugaaaucuacccaggaggcuauaaacaagauuacuaagaaucucaacucccugagcgaauuagaggucaaaaaucugcagcgacucucggggucuauggacgagcuucauaacgaaauccuggaguuggaugaaaagguggacgaccuaagagccgauacgaucuccucacaaauugagcuggcaguacuccugaguaaugaaggcaucauuaacagcgaggacgagcaccuucuggccuuggaaaggaaacucaagaaaaugcugggaccauccgcuguugagauaggcaauggguguuucgaaacaaagcauaagugcaaccagaccugcuuagaucggaucgcggcaggaacuuuugacgccggugaguucucucugccuaccuuugauagccuaaauauuacagcugccucacucaacgacgauggccuggacaaccacaccauccuuuuguauuacaguacugcagccuccagccuggcugugacacucaugaucgccauuuucgucguguauauggucucucgugauaaugugucauguaguauaugccuguga

SEQ ID NO: 155397 - RNA, 1758 nt, Artificial Sequence; identical to SEQ ID NO: 155370
  derived and/or modified CDS sequence (opt3) from hemagglutinin__InfluenzaB__AGX19832

SEQ ID NO: 155398 - RNA, 1758 nt, Artificial Sequence; identical to SEQ ID NO: 155037
  derived and/or modified CDS sequence (opt3) from hemagglutinin__InfluenzaB__AGX19843

SEQ ID NO: 155399 - RNA, 1758 nt, Artificial Sequence; identical to SEQ ID NO: 155037
  derived and/or modified CDS sequence (opt3) from hemagglutinin__InfluenzaB__AGX19854

SEQ ID NO: 155400 - RNA, 1758 nt, Artificial Sequence; identical to SEQ ID NO: 155037
  derived and/or modified CDS sequence (opt3) from hemagglutinin__InfluenzaB__AGX19865

SEQ ID NO: 155401 - RNA, 1758 nt, Artificial Sequence; identical to SEQ ID NO: 155370
  derived and/or modified CDS sequence (opt3) from hemagglutinin__InfluenzaB__AGX19876

SEQ ID NO: 155402 - RNA, 1758 nt, Artificial Sequence; identical to SEQ ID NO: 155037
  derived and/or modified CDS sequence (opt3) from hemagglutinin__InfluenzaB__AGX19887

SEQ ID NO: 155403 - RNA, 1758 nt, Artificial Sequence
  derived and/or modified CDS sequence (opt3) from hemagglutinin__InfluenzaB__AGX19898
augaaggccaucauugugcugcucauggucguuaccagcaacgcugacagaauaugcacaggcaucacuuccucuaauucaccccacgugguaaaaacggcaacccagggggaagugaacgucacaggagugauuccucuuacuaccacaccaaccaagagucauuucgccaaucugaaagguacugaaacaaggggcaaguuguguccgaaaugcuuaaacuguaccgaucuggacguugcgcuagggcggcccaagugcacgggaaagaucccuagcgcucgcguguccauucuccacgagguccgaccagugacuucuggcuguuuucccaucaugcaugaucguaccaaaauaagacaacugccuaaucuucugagggguuacgaacacauccgguugucgacacauaacguaauuaaugccgagaacgcaccagggggacccuauaagaucggcacuucaggcagcugcccuaauauuaccaacgaaaauggguucuuugccacaauggcuugggcaguuccgaaaaacgacaagaauaaaaccgccacgaacccacucacuaucgaggugcccuacauauguacagagggagaagaucagauuaccgucugggguuuccacagugacaaugagacucagauggcuaagcuguauggcgauuccaagccucagaaauuuacaucuagcgccaacggggugaccacgcacuacgugucccaaaucggaggcuucccaaaccagaccgaagacggugggcugccccagucaggacgcauugucguugauuauauggugcagaagaguggcaaaacaggcacuaucaccuaccaaagagggauccucuuaccucagaagguauggugcgcgagcggaaggucuaaagugauuaaggguucccugccacuuauaggcgaggcagacuguuugcaugagaaauaugggggacugaauaagucaaagcccuacuacacaggcgaacacgccaaagcuaucgguaacugcccgauuugggucaagacuccucuaaaacucgccaaugggaccaaguaucggcccccagcaaaacugcuuaaggagcgcggcuuuuucggagcuaucgccggcuuucuggaagggggaugggaggguaugauagcgggcuggcauggguacacaagccacggagcccacggcguggcaguugcugccgauuugaagaguacccaggaagcuauuaacaaaaucacuaagaaucucaacucucuguccgaguuagaggugaaaaaucugcagcgacucagcggugccauggacgaacuucauaacgagauccuggaauuggaugagaaggucgacgaccuaagagcagauacgauuucgucucaaaucgaacuggccgugcuccuguccaaugaggggauuauaaacucagaggacgaacaccuucuggcuuuggagaggaaacucaagaagaugcugggcccuagugcgguagaaaucggaaauggcuguuucgagacaaaacauaagugcaaccagaccugcuuagaucggauugcagccgggacuuuugacgcuggagaguucagccugcccaccuuugauucccuaaauaucacagccgcaucucucaacgacgauggucuggacaaucacaccauccuuuuguauuacagcacugccgcuucaagucuggccguuacacucaugauugcaauauucguggucuauauggugucccgugauaacgucagcuguucuaucugccuguga

SEQ ID NO: 155404 - RNA, 1758 nt, Artificial Sequence; identical to SEQ ID NO: 154562
  derived and/or modified CDS sequence (opt3) from hemagglutinin__InfluenzaB__AGX19909

SEQ ID NO: 155405 - RNA, 1758 nt, Artificial Sequence; identical to SEQ ID NO: 155037
  derived and/or modified CDS sequence (opt3) from hemagglutinin__InfluenzaB__AGX19920

SEQ ID NO: 155406 - RNA, 1758 nt, Artificial Sequence; identical to SEQ ID NO: 155403
  derived and/or modified CDS sequence (opt3) from hemagglutinin__InfluenzaB__AGX19931

SEQ ID NO: 155407 - RNA, 1758 nt, Artificial Sequence; identical to SEQ ID NO: 155370
  derived and/or modified CDS sequence (opt3) from hemagglutinin__InfluenzaB__AGX19942

SEQ ID NO: 155408 - RNA, 1758 nt, Artificial Sequence; identical to SEQ ID NO: 155037
  derived and/or modified CDS sequence (opt3) from hemagglutinin__InfluenzaB__AGX19953

SEQ ID NO: 155409 - RNA, 1758 nt, Artificial Sequence; identical to SEQ ID NO: 154795
  derived and/or modified CDS sequence (opt3) from hemagglutinin__InfluenzaB__AGX19964

SEQ ID NO: 155410 - RNA, 1758 nt, Artificial Sequence; identical to SEQ ID NO: 154562
  derived and/or modified CDS sequence (opt3) from hemagglutinin__InfluenzaB__AGX19975

SEQ ID NO: 155411 - RNA, 1758 nt, Artificial Sequence
  derived and/or modified CDS sequence (opt3) from hemagglutinin__InfluenzaB__AGX19986
augaaggccaucauugugcugcucauggucguuaccagcaacgcugacagaauaugcacaggcaucacuuccucuaauucaccccacgugguaaaaacggcaacccagggggaggugaacgucacaggagugauuccucuuacuaccacaccaaccaagagucauuucgccaaucugaaagguacugaaacaaggggcaaguuguguccgaaaugcuuaaacuguaccgaucuggacguugcgcuagggcggcccaagugcacgggaaagaucccuagcgcucgcguguccauucuccacgagguccgaccagugacuucuggcuguuuucccaucaugcaugaucguaccaaaauaagacaacugccuaaucuucugagggguuacgaacacauccgguugucgacacauaacguaauuaaugccgagaacgcaccagggggacccuauaagaucggcacuucaggcagcugcccuaauauuaccaacgggaauggauucuuugccacaauggcuugggcaguuccgaaaaacgacaagaauaaaaccgccacgaacccacucacuaucgaagugcccuacauauguacagagggugaggaucagauuaccgucuggggcuuccacagugacaaugaaacucagauggcuaagcuguauggggauuccaagccucagaaauuuacaucuagcgccaacggagugaccacgcacuacgugucccaaaucggcgguuucccaaaccagaccgaggacgggggacugccccagucaggccgcauugucguugauuauauggugcagaagaguggcaaaacagggacuaucaccuaccaaagaggaauccucuuaccucagaagguauggugcgugagcgguaggucuaaagucauuaagggcucccugccacuuauaggggaagcggacuguuugcaugagaaauauggaggccugaauaagucaaagcccuacuacacaggugagcacgcaaaagccaucgggaacugcccgauuugggugaagacuccucuaaaacucgcuaauggcaccaaguaucggcccccagccaaacugcuuaaggaacgcggauuuuucggcgcaaucgcuggguuucuggagggagguugggaaggcaugauagccggguggcauggauacacaagccacggcgcgcacgguguugccguggcagcugauuugaagaguacccaggaggccauuaacaaaaucacuaagaaucucaacucucuguccgaauuagaggucaaaaaucugcagcgacucagcggggcuauggacgagcuucauaacgaaauccuggaguuggaugaaaagguggacgaccuaagagccgauacgauuucgucucaaaucgagcuggcaguacuccuguccaaugaaggcauuauaaacucagaggacgagcaccuucuggccuuggaaaggaaacucaagaagaugcugggaccuagugcuguugagaucggcaauggguguuucgaaacaaaacauaagugcaaccagaccugcuuagaucggauugcggcaggaacuuuugacgccggugaguucagccugcccaccuuugauucccuaaauaucacagcugccucucucaacgacgauggccuggacaaucacaccauccuuuuguauuacagcacugcagccucaagucuggcugugacacucaugauugccauauucgucguguauauggucucccgugauaacgugagcuguucuaucugccuguga

SEQ ID NO: 155412 - RNA, 1758 nt, Artificial Sequence
  derived and/or modified CDS sequence (opt3) from hemagglutinin__InfluenzaB__AGX19997
augaaggccaucauugugcugcucauggucguuaccagcaacgcugacagaauaugcacaggcaucacuuccucuaauucaccccacgugguaaaaacggcaacccagggggaggugaacgucacaggagugauuccucuuacuaccacaccaaccaagagucauuucgccaaucugaaagguacugaaacaaggggcaaguuguguccgaaaugcuuaaacuguaccgaucuggacguugcgcuagggcggcccaagugcacgggaaagaucccuagcgcucgcguguccauucuccacgagguccgaccagugacuucuggcuguuuucccaucaugcaugaucguaccaaaauaagacaacugccuaaucuucugagggguuacgaacacauccgguugucgacacauaacguaauuaaugccgagaacgcaccagggggacccuauaagaucggcacuucaggcagcugcccuaauauuaccaacgggaauggauucuuugccacaauggcuugggcaguuccgaaaaacgacaagaauaaaaccgccacgaacccacucacuaucgaagugcccuacauauguacagagggugaggaucagauuaccgucuggggcuuccacagugacaaugaaacucagauggcuaagcuguauggggauuccaagccucagaaauuuacaucuagcgccaacggagugaccacgcacuacgugucccaaaucggcgguuucccaaaccagauugaggacgggggacugccccagucaggccgcaucgucguugauuauauggugcagaagaguggcaaaaccgggacaaucacuuaccaaagagguauucucuuaccucagaagguauggugcgcgagcggaaggucuaaagugauaaagggcucccugccacuuaucggggaagcagacuguuugcaugagaaauauggaggccugaauaagucaaagcccuacuacaccggugagcacgccaaagcuauugggaacugcccgaucugggucaagacaccucuaaaacucgccaauggcacuaaguaucggcccccagcaaaacugcuuaaggaacgcggauuuuucggcgcuauagccggguuucuggagggagguugggaaggcaugauugcgggguggcauggauacaccagccacggcgcccacgguguggcaguugcugccgauuugaagaguacacaggaggcuaucaacaaaaucaccaagaaucucaacucucuguccgaauuagaggugaaaaaucugcagcgacucagcggggccauggacgagcuucauaacgaaauucuggaguuggaugaaaaggucgacgaccuaagagcagauacuaucucgucucaaauugagcuggccgugcuccuguccaaugaaggcauaaucaacucagaggacgagcaccuucuggcuuuggaaaggaaacucaagaagaugcugggaccuagugcgguagagauuggcaauggguguuucgaaacgaaacauaagugcaaccagacaugcuuagaucggaucgcagccggaaccuuugacgcuggugaguucagccugcccacuuuugauucccuaaauaucaccgccgcaucucucaacgacgauggccuggacaaucacacaauucuuuuguauuacagcaccgccgcuucaagucuggccguuacucucaugauagcaaucuucguggucuauauggugucccgugauaacgucagcuguucuauuugccuguga

SEQ ID NO: 155413 - RNA, 1758 nt, Artificial Sequence; identical to SEQ ID NO: 155037
  derived and/or modified CDS sequence (opt3) from hemagglutinin__InfluenzaB__AGX20008

SEQ ID NO: 155414 - RNA, 1758 nt, Artificial Sequence; identical to SEQ ID NO: 155037
  derived and/or modified CDS sequence (opt3) from hemagglutinin__InfluenzaB__AGX20019

SEQ ID NO: 155415 - RNA, 1758 nt, Artificial Sequence; identical to SEQ ID NO: 155037
  derived and/or modified CDS sequence (opt3) from hemagglutinin__InfluenzaB__AGX20030

SEQ ID NO: 155416 - RNA, 1758 nt, Artificial Sequence
  derived and/or modified CDS sequence (opt3) from hemagglutinin__InfluenzaB__AGX20041
augaaggccaucauugugcugcucauggucguuaccagcgacgcugauagaauaugcacaggcaucacuuccucuaacucaccccacgugguaaaaacggcaacccagggggaggugaaugucacaggagugauuccucuuacuaccacaccaaccaagagucauuucgccaaccugaaagguaaggaaacuaggggcaaauuguguccgaagugcuuaaauuguacagaccuggauguugcgcuagggcggcccaagugcaccggaaaaaucccuagcgcucgcguguccauucuccacgagguccgaccagugacgucuggcuguuuucccaucaugcaugaccguacuaagauaagacaacugccuaaccuucugagggguuacgaacacauccgguugucgacccauaauguaauuaacgccgagaaugcaccagggggacccuauaaaaucggcacaucaggcagcugcccuaacauuacuaaugggaacggauucuuugccaccauggcuugggcaguuccaaagaaugauaaaaacaagacagccaccaauccgcucacgaucgaagugcccuacauauguacugagggugaggaccagauuacagucuggggcuuccacagugauaacgaaacccagauggcuaagcuguauggggacuccaaaccucagaaguuuacuucuagcgccaauggagugacaacccacuacgugucccaaaucggcgguuucccaaaccagacggaggaugggggacugccccagucaggccgcauugucguugacuauauggugcagaaaaguggcaagaccgggacaaucacuuaccaaagaggaauccucuuaccucagaaaguauggugcgcgagcgguaggucuaaggugauuaaaggcucccugccacuuauaggggaagcagauuguuugcaugagaaguauggaggccugaacaagucaaaacccuacuacaccggugagcacgccaaggcuaucgggaauugcccgauuugggucaaaacaccucuaaagcucgccaacggcacuaaauaucggcccccagcaaagcugcuuaaggaacgcggauuuuucggcgcuaucgccggguuucuggagggagguugggaaggcaugauagcgggguggcauggauacaccagccacggcgcccacgguguggcaguugcugccgacuugaaaaguacacaggaggcuauuaauaagaucaccaaaaaccucaauucucuguccgaauuagaggugaagaaccugcagcgacucagcggggccauggaugagcuucauaaugaaauccuggaguuggacgaaaaagucgacgaucuaagagcagacacuauuucgucucaaaucgagcuggccgugcuccuguccaacgaaggcauuauaaauucagaggaugagcaccuucuggcuuuggaaaggaagcucaagaaaaugcugggaccuagugcgguagagaucggcaacggguguuucgaaacgaagcauaaaugcaaucagacaugcuuagaccggauugcagccggaaccuuugaugcuggugaguucagccugcccacuuuugacucccuaaacaucaccgccgcaucucucaaugaugacggccuggauaaccacacaauccuuuuguauuacagcaccgccgcuucaagucuggccguuacucucaugauugcaauauucguggucuauauggugucccgugacaaugucagcuguucuaucugccuguga

SEQ ID NO: 155417 - RNA, 1758 nt, Artificial Sequence; identical to SEQ ID NO: 155037
  derived and/or modified CDS sequence (opt3) from hemagglutinin__InfluenzaB__AGX20052

SEQ ID NO: 155418 - RNA, 1758 nt, Artificial Sequence; identical to SEQ ID NO: 155037
  derived and/or modified CDS sequence (opt3) from hemagglutinin__InfluenzaB__AGX20063

SEQ ID NO: 155419 - RNA, 1758 nt, Artificial Sequence
  derived and/or modified CDS sequence (opt3) from hemagglutinin__InfluenzaB__AGX20074
augaaggccaucauugcucugcucaugguggucaccagcaacgcagacagaauaugcacaggcaucacuuccucuaauucaccccacguugugaaaacggccacccagggggagguaaacgugacaggagucauuccucuuacuaccacaccaaccaagagucauuucgcgaaucugaaagguacugaaacaaggggcaaguuguguccgaaaugcuuaaacuguaccgaucuggacguggcucuagggcggcccaagugcacgggaaagaucccuagcgcccgcguuuccauucuccacgaggugcgaccagucacuucuggcuguuuucccaucaugcaugaucguaccaaaauaagacaacugccuaaucuucugagggguuacgaacacauccgguugucgacacauaacgugauuaaugcagagaacgccccagggggacccuauaagaucggcacuucaggcagcugcccuaauauuaccaacgggaauggauucuuugcuacaauggcaugggccguaccgaaaaacgacaagaauaaaaccgcuacgaacccacucacuaucgaaguucccuacauauguacagagggugaggaucagauuaccguguggggcuuccacagugacaaugaaacucagauggccaagcuguauggggauuccaagccucagaaauuuacaucuagcgcgaacggagucaccacgcacuacgugucccaaaucggcgguuucccaaaccagaccgaggacgggggacugccccagucaggccgcauuguggucgauuauaugguucagaagaguggcaaaacagggacuaucaccuaccaaagaggaauccucuuaccucagaagguguggugcgcaagcgguaggucuaaaguaauuaagggcucccugccacuuauaggggaagccgacuguuugcaugagaaauauggaggccugaauaagucaaagcccuacuacacaggugagcacgcuaaagccaucgggaacugcccgauuugggugaagacuccucuaaaacucgcaaauggcaccaaguaucggcccccagcuaaacugcuuaaggaacgcggauuuuucggcgccaucgcgggguuucuggagggagguugggaaggcaugauagccggguggcauggauacacaagccacggcgcacacggugucgcuguggccgcugauuugaagaguacccaggaggccauuaacaaaaucacuaagaaucucaacucucuguccgaauuagagguuaaaaaucugcagcgacucagcggggcaauggacgagcuucauaacgaaauccuggaguuggaugaaaagguggacgaccuaagagccgauacgauuucgucucaaaucgagcuggcuguccuccuguccaaugaaggcauuauaaacucagaggacgagcaccuucuggcguuggaaaggaaacucaagaagaugcugggaccuagugcaguggagaucggcaauggguguuucgaaacaaaacauaagugcaaccagaccugcuuagaucggauugccgcuggaacuuuugacgccggugaguucagccugcccaccuuugauucccuaaauaucacagcagccucucucaacgacgauggccuggacaaucacaccauccuuuuguauuacagcacugcugccucaagucuggcaguaacacucaugauugcgauauucguuguguauauggucucccgugauaacgugagcuguucuaucugccuguga

SEQ ID NO: 155420 - RNA, 1758 nt, Artificial Sequence
  derived and/or modified CDS sequence (opt3) from hemagglutinin__InfluenzaB__AGX20085
augaaggccaucauugugcugcucauggucguuaccagcaacgcugacagaauaugcacaggcaucacuuccucuaauucaccccacgugguaaaaacggcaacccagggggaggugaacgucacaggagugauuccucuuacuaccacaccaaccaagagucauuucgccaaucugaaagguacugaaacaaggggcaaguuguguccgaaaugcuuaaacuguaccgaucuggacguugcgcuagggcggcccaagugcacgggaaagaucccuagcgcucgcguguccauucuccacgagguccgaccagugacuucuggcuguuuucccaucaugcaugaucguaccaaaauaagacaacugccuaaucuucugagggguuacgaacacauccgguugucgacacauaacguaauuaaugccgagaacgcaccagggggacccuauaagaucggcacuucaggcagcugcccuaauauuaccaacgggaauggauucuuugccacaauggcuugggcaguuccgaaaaacgacaagaauaaaaccgccacgaacccacucacuaucgaagugcccuacauauguacagagggugaggaucagauuaccaucuggggcuuccacagugacaaugaaacucagauggcuaagcuguauggggauuccaagccucagaaauuuacaucuagcgccaacggagucaccacgcacuacgugucccaaauuggcgguuucccaaaccagaccgaggacgggggacugccccagucaggccgcaucguggucgauuauaugguucagaagaguggcaaaacagggacuaucaccuaccaaagagguauucucuuaccucagaagguguggugcgcgagcggaaggucuaaaguaauaaagggcucccugccacuuaucggggaagcagacuguuugcaugagaaauauggaggccugaauaagucaaagcccuacuacacaggugagcacgccaaagcuauugggaacugcccgaucugggugaagacuccucuaaaacucgccaauggcaccaaguaucggcccccagcaaaacugcuuaaggaacgcggauuuuucggcgcuauagccggguuucuggagggagguugggaaggcaugauugcgggguggcauggauacacaagccacggcgcccacggugucgcaguggcugccgauuugaagaguacccaggaggcuaucaacaaaaucacuaagaaucucaacucucuguccgaauuagagguuaaaaaucugcagcgacucagcggggccauggacgagcuucauaacgaaauucuggaguuggaugaaaagguggacgaccuaagagcagauacgaucucgucucaaauugagcuggccguccuccuguccaaugaaggcauaaucaacucagaggacgagcaccuucuggcuuuggaaaggaaacucaagaagaugcugggaccuagugcgguggagauuggcaauggguguuucgaaacaaaacauaagugcaaccagaccugcuuagaucggaucgcagccggaacuuuugacgcuggugaguucagccugcccaccuuugauucccuaaauaucacagccgcaucucucaacgacgauggccuggacaaucacaccauucuuuuguauuacagcacugccgcuucaagucuggccguaacacucaugauagcaaucuucguuguguauauggucucccgugauaacgugagcuguucuauuugccuguga

SEQ ID NO: 155421 - RNA, 1758 nt, Artificial Sequence
  derived and/or modified CDS sequence (opt3) from hemagglutinin__InfluenzaB__AGX20096
augaaggccaucauugugcugcucauggucguuaccagcaacgcugacagaauaugcacaggcgugacuuccucuaauucaccccacguagugaaaacggcaacccagggggaggucaacgugacaggaguuaucccucuuacuaccacaccaaccaagagucauuucgccaaucugaaagguacugaaacaaggggcaaguuguguccgaaaugcuuaaacuguaccgaucuggacguggcgcuagggcggcccaagugcacgggaaauauuccuagcgcucgcgucuccauccuccacgaggugcgaccaguaacuucuggcuguuuucccauuaugcaugaucguaccaagaucagacaacugccuaaccuucugagggguuacgaacacauacgguugucgacacauaauguuaucaacgccgagaaugcaccagggggacccuauaaaauuggcacuucaggcagcugcccuaacgugaccaaugggaacggauucuuugccacaauggcuugggcagucccaaagaaugacaacaauaaaaccgccacgaacagucucacuaucgaagugccguacauuuguacagagggugaggaucagaucaccguguggggcuuccacuccgacaacgaaacucagauggcuaagcuguauggggauucuaaaccccagaaguuuacaagcuccgccaauggagucaccacgcacuacguuucacaaauaggcgguuucccuaaccagaccgaggacgggggacugccacagaguggccgcauugugguagauuauauggugcaaaagagcggcaaaacagggacuaucaccuaccagagagguauucucuuaccccagaaggucuggugcgcgucuggaagguccaaagugaucaagggcucacugccucuuaucggggaagcagacuguuugcaugagaaauauggaggccugaauaagagcaaaccauacuacacaggugagcacgccaaggcuauugggaacugccccauauggguuaagacuccgcuaaaacucgccaauggcaccaaguaucggccucccgcaaaacugcuuaaggaacgcggauuuuucggcgcuaucgccggguuucuggagggagguugggaaggcaugauugcgggguggcauggauacacaagucacggcgcccacgguguggcagucgcugccgauuugaaaucuacccaggaggcuaucaacaagauaacuaagaaucucaacucccugagcgaauuagaggugaaaaaucugcagcgacucucgggggccauggacgagcuucauaacgaaauucuggaguuggaugaaaagguagacgaccuaagagcagauacgaucucuucccaaaucgagcuggccguucuccugucaaaugaaggcauuaucaacagugaggacgagcaccuucuggcuuuggaaaggaaacucaagaaaaugcugggaccaagcgcgguggagauuggcaauggguguuucgaaacaaagcauaagugcaaccagaccugcuuagaucggauagcagccggaacuuuugacgcuggugaguucucccugccuaccuuugauucucuaaauaucacagccgcaagccucaacgacgauggccuggacaaccacaccauucuuuuguauuacucaacugccgcuaguucccuggccgucacacucaugaucgcaaucuucguggucuauauggugagccgugauaauguuucuuguucaauuugccuguga

SEQ ID NO: 155422 - RNA, 1758 nt, Artificial Sequence; identical to SEQ ID NO: 154656
  derived and/or modified CDS sequence (opt3) from hemagglutinin__InfluenzaB__AGX20107

SEQ ID NO: 155423 - RNA, 1758 nt, Artificial Sequence; identical to SEQ ID NO: 154656
  derived and/or modified CDS sequence (opt3) from hemagglutinin__InfluenzaB__AGX20118

SEQ ID NO: 155424 - RNA, 1758 nt, Artificial Sequence; identical to SEQ ID NO: 154656
  derived and/or modified CDS sequence (opt3) from hemagglutinin__InfluenzaB__AGX20129

SEQ ID NO: 155425 - RNA, 1758 nt, Artificial Sequence; identical to SEQ ID NO: 154656
  derived and/or modified CDS sequence (opt3) from hemagglutinin__InfluenzaB__AGX20140

SEQ ID NO: 155426 - RNA, 1758 nt, Artificial Sequence; identical to SEQ ID NO: 154656
  derived and/or modified CDS sequence (opt3) from hemagglutinin__InfluenzaB__AGX20151

SEQ ID NO: 155427 - RNA, 1758 nt, Artificial Sequence; identical to SEQ ID NO: 154656
  derived and/or modified CDS sequence (opt3) from hemagglutinin__InfluenzaB__AGX20162

SEQ ID NO: 155428 - RNA, 1758 nt, Artificial Sequence; identical to SEQ ID NO: 154656
  derived and/or modified CDS sequence (opt3) from hemagglutinin__InfluenzaB__AGX20173

SEQ ID NO: 155429 - RNA, 1758 nt, Artificial Sequence; identical to SEQ ID NO: 154656
  derived and/or modified CDS sequence (opt3) from hemagglutinin__InfluenzaB__AGX20184

SEQ ID NO: 155430 - RNA, 1758 nt, Artificial Sequence; identical to SEQ ID NO: 154656
  derived and/or modified CDS sequence (opt3) from hemagglutinin__InfluenzaB__AGX20195

SEQ ID NO: 155431 - RNA, 1758 nt, Artificial Sequence; identical to SEQ ID NO: 154656
  derived and/or modified CDS sequence (opt3) from hemagglutinin__InfluenzaB__AGX20206

SEQ ID NO: 155432 - RNA, 1758 nt, Artificial Sequence; identical to SEQ ID NO: 154656
  derived and/or modified CDS sequence (opt3) from hemagglutinin__InfluenzaB__AGX20217

SEQ ID NO: 155433 - RNA, 1758 nt, Artificial Sequence; identical to SEQ ID NO: 154693
  derived and/or modified CDS sequence (opt3) from hemagglutinin__InfluenzaB__AGX20228

SEQ ID NO: 155434 - RNA, 1758 nt, Artificial Sequence
  derived and/or modified CDS sequence (opt3) from hemagglutinin__InfluenzaB__AGX20239
augaaggccaucauugugcugcucauggucguuaccagcaacgcugacagaauaugcacaggcaucacuuccucuaauucaccccacgugguaaaaacggcaacccagggggaggugaacgucacaggagugauuccucuuacuaccacaccaaccaagagucauuucgccaaucugaaagguacugaaacaaggggcaaguuguguccgaaaugccccaacuguaccgauuuagacguugcgcuggggcggccuaagugcacgggaaagaucccaagcgcucgcguguccauucuacacgagguccgacccgugacuucuggcuguuuuccuaucaugcaugaucguaccaaaauaagacaacucccaaaucugcuuagggguuacgaacacauccggcugucgacacauaacguaauuaaugccgagaacgcacccgggggaccuuauaagaucggcacuucaggcagcugcccaaauguuaccaacgggaauggauucuuugccacaauggcuugggcagugccgaaaaacgacaagaauaaaaccgccacgaaccccuugacuauugaagucccuuacaucuguacagagggugaggaucagauaauuguguggggcuuccacagugacaaugaaacccagauggcuaagcucuauggggauuccaagccacagaaauuuacuucuagcgccaacggagugacaacccacuacgucucccaaaucggcgguuuccccaaccagacggaggacgggggacugccucagucaggccgcauuguuguggauuauaugguacagaagaguggcaaaaccgggacaaucacuuaccaaagaggaauccugcucccacagaagguguggugcgcgagcgguaggucuaaagucauuaagggcuccuuaccccugauaggggaagcagacugucuucaugagaaauauggaggcuugaauaagucaaagccguacuacaccggugagcacgccaaagcuaucgggaacugcccuauuugggugaagacaccccugaaacuagccaauggcacuaaguaucggccuccagcaaaacuccugaaggaacgcggauuuuucggcgcuaucgccggguuucuugagggagguugggaaggcaugauagcgggguggcauggauacaccagccacggcgcccacgguguugcaguggcugccgaucugaagaguacacaggaggcuauuaacaaaaucaccaagaauuugaacucucucuccgaacuggaggucaaaaauuuacagcgacugagcggggccauggacgagcuccauaacgaaauccuugagcuggaugaaaagguggacgacuugagagcagauacuauuucgucucaaaucgagcuagccguacugcucuccaaugaaggcauuauaaacucagaggacgagcaucugcuugcucuggaaaggaaauugaagaagaugcucggacccagugcgguugagaucggcaauggguguuucgaaacgaaacacaagugcaaccagacaugccuggaucggauugcagccggaaccuuugacgcuggugaguucagcuuaccaacuuuugauucccugaauaucaccgccgcaucucuaaacgacgauggccucgacaaucacacaauccugcuuuauuacagcaccgccgcuucaaguuuggccgugacucugaugauugcaauauucgucguguauauggucucccgugauaacgugagcuguucuaucugccucuga

SEQ ID NO: 155435 - RNA, 1758 nt, Artificial Sequence; identical to SEQ ID NO: 154656
  derived and/or modified CDS sequence (opt3) from hemagglutinin__InfluenzaB__AGX20250

SEQ ID NO: 155436 - RNA, 1758 nt, Artificial Sequence; identical to SEQ ID NO: 154656
  derived and/or modified CDS sequence (opt3) from hemagglutinin__InfluenzaB__AGX20261

SEQ ID NO: 155437 - RNA, 1758 nt, Artificial Sequence; identical to SEQ ID NO: 154656
  derived and/or modified CDS sequence (opt3) from hemagglutinin__InfluenzaB__AGX20272

SEQ ID NO: 155438 - RNA, 1758 nt, Artificial Sequence; identical to SEQ ID NO: 154656
  derived and/or modified CDS sequence (opt3) from hemagglutinin__InfluenzaB__AGX20283

SEQ ID NO: 155439 - RNA, 1758 nt, Artificial Sequence; identical to SEQ ID NO: 154656
  derived and/or modified CDS sequence (opt3) from hemagglutinin__InfluenzaB__AGX20294

SEQ ID NO: 155440 - RNA, 1758 nt, Artificial Sequence
  derived and/or modified CDS sequence (opt3) from hemagglutinin__InfluenzaB__AGX20305
augaaggccaucauugugcugcucauggucguuaccagcaacgcugacagaauaugcacaggcaucacuuccucuaauucaccccacgugguaaaaacggcaacccagggggaggugaacgucacaggagugauuccucuuacuaccacaccaaccaagagucauuucgccaaucugaaagguacugaaacaaggggcaaguuguguccgaaaugccccaacuguaccgauuuagacguugcgcuggggcggccuaagugcacgggaaagaucccaagcgcucgcguguccauucuacacgagguccgacccgugacuucuggcuguuuuccuaucaugcaugaucguaccaaaauaagacaacucccaaaucugcuuagggguuacgaacacauccggcugucgacacauaacguaauuaaugccgagaacgcacccgggggaccuuauaagaucggcacuucaggcagcugcccaaauguuaccaacgggaauggauucuuugccacaauggcuugggcagugccgaaaaacgacaagaauaaaaccgccacgaaccaguugacuauugaaguccccuacaucuguacagagggugaggaucagauaaccguguggggcuuccacagugacaaugaaacucagauggcuaagcucuauggggauuccaagccucaaaaauuuacaucuagcgccaacggagugaccacgcacuacgucucccagauuggcgguuucccaaaccagaccgaggacgggggacugccccagucaggccgcaucguuguggauuauaugguacaaaagaguggcaaaacagggacuauuaccuaccagagaggaauccugcucccucagaagguguggugcgcgagcgguaggucuaaagucaucaagggcuccuuaccacugauuggggaagcagacugucuucaugagaaauauggaggcuugaauaagucaaagcccuacuacacaggugagcacgccaaagcuauagggaacugcccgaucugggugaagacuccucugaaacuagccaauggcaccaaguaucggcccccagcaaaacuccugaaggaacgcggauuuuucggcgcuauugccggguuucuugagggagguugggaaggcaugaucgcgggguggcauggauacacaagccacggcgcccacgguguugcaguggcugccgaucugaagaguacccaggaggcuauaaacaaaauuacuaagaauuugaacucucucuccgaacuggaggucaaaaauuuacaacgacugagcggggccauggacgagcuccauaacgaaauccuugagcuggaugaaaagguggacgacuugagagcagauacgaucucgucucagauugagcuagccguacugcucuccaaugaaggcaucauuaacucagaggacgagcaucugcuugcucuggaaaggaaauugaagaagaugcucggaccuagugcgguugagauaggcaauggguguuucgaaacaaaacacaagugcaaccagaccugccuggaucggaucgcagccggaacuuuugacgcuggugaguucagcuuacccaccuuugauucccugaauauuacagccgcaucucuaaacgacgauggccucgacaaucacaccauccugcuuuauuacagcacugccgcuucaaguuuggccgugacacugaugaucgcaauuuucgucguguauauggucucccgugauaacgugagcuguucuauaugccucuga

SEQ ID NO: 155441 - RNA, 1758 nt, Artificial Sequence; identical to SEQ ID NO: 154656
  derived and/or modified CDS sequence (opt3) from hemagglutinin__InfluenzaB__AGX20316

SEQ ID NO: 155442 - RNA, 1758 nt, Artificial Sequence; identical to SEQ ID NO: 154656
  derived and/or modified CDS sequence (opt3) from hemagglutinin__InfluenzaB__AGX20327

SEQ ID NO: 155443 - RNA, 1758 nt, Artificial Sequence
  derived and/or modified CDS sequence (opt3) from hemagglutinin__InfluenzaB__AGX20338
augaaggccaucauugugcugcucauggucguuaccagcaacgcugacagaauaugcacaggcaucacuuccucuaauucaccccacgugguaaaaacggcaacccagggggaggugaacgucacaggagugauuccucuuacuaccacaccaaccaagagucauuucgccaaucugaaagguacugaaacaaggggcaaguuguguccgaaaugccccaacuguaccgauuuagacguugcgcuggggcggccuaagugcacgggaaagaucccaagcgcucgcguguccauucuacacgagguccgacccgugacuucuggcuguuuuccuaucaugcaugaucguaccaaaauaagacaacucccaaaucugcuuagggguuacgaacacauccggcugucgacacauaacguaauuaaugccgagaacgcacccgggggaccuuauaagaucggcacuucaggcagcugcccaaauguuaccaacgggaauggauucuuugccacaauggcuugggcagugccgaaaaacgacaagaauaaaaccgccacgaaccccuugacuauugaagucccuuacaucuguacagagggugaggaucagauaaccguguggggcuuccacagugacaaugaaacucagauggcuaaccucuauggggauuccaagccacagaaguuuacaucuagcgccaacggagugaccacgcacuacgucucccaaauuggcgguuuccccaaucagaccgaggacgggggacugccucagucaggccgcaucguuguggauuauaugguacagaaaaguggcaagacagggacuauuaccuaccaaagaggaauccugcucccacagaaaguguggugcgcgagcgguaggucuaaggucaucaaaggcuccuuaccccugauuggggaagcagacugucuucaugagaaguauggaggcuugaacaaaucaaagccguacuacacaggugagcacgccaaggcuauagggaauugcccuaucugggugaaaacuccccugaagcuagccaacggcaccaaauaucggccuccagcaaagcuccugaaagaacgcggauuuuucggcgcuauugccggguuucuugagggagguugggaaggcaugaucgcgggguggcauggauacacaagccacggcgcccacgguguugcaguggcugccgaucugaagaguacccaggaggcuauaaauaagauuacuaaaaaccuuaauucucucuccgaacuggaggucaagaacuuacagcgacugagcggggccauggacgagcuccauaaugaaauccuugagcuggaugaaaaaguggacgacuugagagcagauacgaucucgucucaaauugagcuagccguacugcucuccaacgaaggcaucauuaauucagaggacgagcaccuguuggcucuggaaaggaaguugaaaaagaugcucggacccagugcgguugagauaggcaacggguguuucgaaacaaagcauaaaugcaaucagaccugccuggaucggaucgcagccggaacuuuugacgcuggugaguucagcuuaccaaccuuugauucccugaacauuacagccgcaucucuaaaugacgauggccucgacaaccacaccauccugcuuuauuacagcacugccgcuucaaguuuggccgugacacugaugaucgcaauuuucgucguguauauggucucccgugauaacgugagcuguucuauaugccucuga

SEQ ID NO: 155444 - RNA, 1758 nt, Artificial Sequence; identical to SEQ ID NO: 154656
  derived and/or modified CDS sequence (opt3) from hemagglutinin__InfluenzaB__AGX20349

SEQ ID NO: 155445 - RNA, 1758 nt, Artificial Sequence; identical to SEQ ID NO: 154656
  derived and/or modified CDS sequence (opt3) from hemagglutinin__InfluenzaB__AGX20360

SEQ ID NO: 155446 - RNA, 1758 nt, Artificial Sequence; identical to SEQ ID NO: 154693
  derived and/or modified CDS sequence (opt3) from hemagglutinin__InfluenzaB__AGX20371

SEQ ID NO: 155447 - RNA, 1758 nt, Artificial Sequence
  derived and/or modified CDS sequence (opt3) from hemagglutinin__InfluenzaB__AGX20382
augaaggccaucauugugcugcucauggucguuaccagcaacgcugacagaauaugcacaggcaucacuuccucuaauucaccccacgugguaaaaacggcaacccagggggaggugaacgucacaggagugauuccucuuacuaccacaccaaccaagagucauuucgccaaucugaaagguacugaaacaaggggcaaguuguguccgaaaugccccaacuguaccgauuuagacguugcgcuggggcggccuaagugcacgggaaagaucccaagcgcucgcguguccauucuacacgagguccgacccgugacuucuggcuguuuuccuaucaugcaugaucguaccaaaauaagacaacucccaaaucugcuuagggguuacgaacacauccggcugucgacacauaacguaauuaaugccgagaacgcacccgggggaccuuauaagaucggcacuucaggcagcugcccaaauguuaccaacgggaauggauucuuugccacaauggcuugggcagugccgaaaaacgacaagaauaaaaccgccacgaaccccuugacuauugaagucccuuacaucuguacagagggugaggaucagauaaccguguggggcuuccacagugacaaugaaacucagauggcuaagcucuauggggauuccaagccacagaaauuuacaucuagcgccaacggagugaccacgcacuacgucucccaaauuggcgguuuccccaaccagaccgaggacgggggacugccucagucaggccgcaucguuguggauuauaugguacagaagaguggcaaaacagggacuauuaccuaccaaagaggaauccugcucccacagaagguguggugcgcgagcgguaggucuaaagucaucaagggcuccuuaccccugauuggggaagcagacugucuucaugagaaauauggaggcuugaauaagucaaagccguacuacacaggugagcacgccaaagcuauagggaacugcccuaucugggugaagacuccccugaaacuagccaauggcaccaaguaucggccuccagcaaaacuccugaaggaacgcggauuuuucggcgcuauugccggguuucuugagggagguugggaaggcaugaucgcgggguggcauggauacacaagccacggcgcccacgguguugcaguggcugccgaucugaagaguacccaggaggcuauaaacaaaauuacuaagaauuugaacucucucuccgaacuggaggucaaaaauuuacagcgacugagcggggccaugaacgagcuccauaaugaaauccuugagcuggacgaaaagguggaugacuugagagcagacacgaucucgucucaaauugagcuagccguacugcucuccaacgaaggcaucauuaauucagaggaugagcaucugcuugcucuggaaaggaaauugaagaagaugcucggacccagugcgguugagauaggcaacggguguuucgaaacaaaacacaagugcaaucagaccugccuggaccggaucgcagccggaacuuuugaugcuggugaguucagcuuaccaaccuuugacucccugaacauuacagccgcaucucuaaaugaugacggccucgauaaccacaccauccugcuuuauuacagcacugccgcuucaaguuuggccgugacacugaugaucgcaauuuucgucguguauauggucucccgugacaacgugagcuguucuauaugccucuga

SEQ ID NO: 155448 - RNA, 1758 nt, Artificial Sequence; identical to SEQ ID NO: 154656
  derived and/or modified CDS sequence (opt3) from hemagglutinin__InfluenzaB__AGX20393

SEQ ID NO: 155449 - RNA, 1758 nt, Artificial Sequence; identical to SEQ ID NO: 154693
  derived and/or modified CDS sequence (opt3) from hemagglutinin__InfluenzaB__AGX20404

SEQ ID NO: 155450 - RNA, 1758 nt, Artificial Sequence; identical to SEQ ID NO: 154656
  derived and/or modified CDS sequence (opt3) from hemagglutinin__InfluenzaB__AGX20415

SEQ ID NO: 155451 - RNA, 1758 nt, Artificial Sequence; identical to SEQ ID NO: 154656
  derived and/or modified CDS sequence (opt3) from hemagglutinin__InfluenzaB__AGX20426

SEQ ID NO: 155452 - RNA, 1758 nt, Artificial Sequence; identical to SEQ ID NO: 154656
  derived and/or modified CDS sequence (opt3) from hemagglutinin__InfluenzaB__AGX20437

SEQ ID NO: 155453 - RNA, 1758 nt, Artificial Sequence; identical to SEQ ID NO: 154656
  derived and/or modified CDS sequence (opt3) from hemagglutinin__InfluenzaB__AGX20448

SEQ ID NO: 155454 - RNA, 1758 nt, Artificial Sequence; identical to SEQ ID NO: 154656
  derived and/or modified CDS sequence (opt3) from hemagglutinin__InfluenzaB__AGX20459

SEQ ID NO: 155455 - RNA, 1758 nt, Artificial Sequence; identical to SEQ ID NO: 154656
  derived and/or modified CDS sequence (opt3) from hemagglutinin__InfluenzaB__AGX20470

SEQ ID NO: 155456 - RNA, 1758 nt, Artificial Sequence; identical to SEQ ID NO: 154656
  derived and/or modified CDS sequence (opt3) from hemagglutinin__InfluenzaB__AGX20481

SEQ ID NO: 155457 - RNA, 1758 nt, Artificial Sequence; identical to SEQ ID NO: 154656
  derived and/or modified CDS sequence (opt3) from hemagglutinin__InfluenzaB__AGX20492

SEQ ID NO: 155458 - RNA, 1758 nt, Artificial Sequence; identical to SEQ ID NO: 154656
  derived and/or modified CDS sequence (opt3) from hemagglutinin__InfluenzaB__AGX20503

SEQ ID NO: 155459 - RNA, 1758 nt, Artificial Sequence; identical to SEQ ID NO: 154656
  derived and/or modified CDS sequence (opt3) from hemagglutinin__InfluenzaB__AGX20514

SEQ ID NO: 155460 - RNA, 1758 nt, Artificial Sequence
  derived and/or modified CDS sequence (opt3) from hemagglutinin__InfluenzaB__AGX20525
augaaggccaucauugugcugcucauggucguuaccagcaacgcugacagaauaugcacaggcaucacuuccucuaauucaccccacgugguaaaaacggcaacccagggggaggugaacgucacaggagugauuccucuuacuaccacaccaaccaagagucauuucagcaaucugaaagguacugaaacaaggggcaaguuguguccgaaaugccccaacuguaccgauuuagacguugcccuggggcggccuaagugcacgggaaagaucccauccgcgcgcgugucuauucuacacgagguccgacccgugacuucgggcuguuuuccuaucaugcaugaucguaccaaaauaagacaacucccaaaucugcuuagggguuacgaacacauccggcugucaacacauaacguaauuaaugcugagaacgcccccgggggaccuuauaagaucggcacuagcggcaguugcccaaauguuaccaacgggaauggauucuuugcaacaauggccugggcugugccgaaaaacgacaagaauaaaaccgcaacgaaccccuugacuauugaagucccuuacaucuguacagagggugaggaucagauaaccguguggggcuuccacuccgacaaugaaacucagauggccaagcucuauggggauucuaagccacagaaauuuacaagcuccgcuaacggagugaccacgcacuacgucucacaaauuggcgguuuccccaaccagaccgaggacgggggacugccucagaguggccgcaucguuguggauuauaugguacaaaagagcggcaaaacagggacuauuaccuaccagagaggaauccugcucccacagaagguguggugcgccucugguagguccaaagucaucaagggcucauuaccccugauuggggaagcggacugucuucaugagaaauauggaggcuugaauaagagcaagccguacuacacaggugagcacgcaaaagccauagggaacugcccuaucugggugaagacuccccugaaacuagcuaauggcaccaaguaucggccuccagccaaacuccugaaggaacgcggauuuuucggcgcaauugcuggguuucuugagggagguugggaaggcaugaucgccggguggcauggauacacaagucacggcgcgcacgguguugccguggcagcugaucugaagucuacccaggaggccauaaacaaaauuacuaagaauuugaacucccucagcgaacuggaggucaaaaauuuacagcgacugucgggggcuauggacgagcuccauaacgaaauccuugagcuggaugaaaagguggacgacuugagagccgauacgaucucuucccaaauugagcuagcaguacugcucucaaaugaaggcaucauuaacagugaggacgagcaucugcuugcccuggaaaggaaauugaagaagaugcucggacccagcgcuguugagauaggcaauggguguuucgaaacaaaacacaagugcaaccagaccugccuggaucggaucgcggcaggaacuuuugacgccggugaguucuccuuaccaaccuuugauucucugaauauuacagcugccagccuaaacgacgauggccucgacaaucacaccauccugcuuuauuacucaacugcagccaguuccuuggcugugacacugaugaucgccauuuucgucguguauauggucagccgugauaacgugucuuguucaauaugccucuga

SEQ ID NO: 155461 - RNA, 1758 nt, Artificial Sequence; identical to SEQ ID NO: 154656
  derived and/or modified CDS sequence (opt3) from hemagglutinin__InfluenzaB__AGX20536

SEQ ID NO: 155462 - RNA, 1758 nt, Artificial Sequence
  derived and/or modified CDS sequence (opt3) from hemagglutinin__InfluenzaB__AGX20547
augaaggccaucauugugcugcucauggucguuaccagcaacgcugacagaauaugcacaggcaucacuuccucuaauucaccccacgugguaaaaacggcaacccagggggaggugaacgucacaggagugauuccucuuacuaccacaccaaccaagagucauuucgccaaucugaaagguacugaaacaaggggcaaguuguguccgaaaugcuuaaacuguaccgaucuggacguugcgcuagggcggcccaagugcacgggaaagaucccuagcgcucgcguguccauucuccacgagguccgaccagugacuucuggcuguuuucccaucaugcaugaucguaccaaaauaagacaacugccuaaucuucugagggguuacgaacacauccgguugucgacacauaacguaauuaaugccgagaacgcaccagggggacccuauaagaucggcacuucaggcagcugcccuaauguuaccaacgggaauggauucuuugccacaauggcuugggcagugccgaaaaacgacaagaauaaaaccgccacgaacccacucacuauugaaguccccuacaucuguacagagggugaggaucagauaaccguguggggcuuccacagugacaaugaaacucagauggcuaagcuguauggggauuccaagccucagaaauuuacaucuagcgccaacggagugaccacgcaccaugucucccaaauuggcgguuucccaaaccagaccgaggacgggggacugccccagucaggccgcaucguuguggauuacaugguacagaagaguggcaaaacagggacuauuaccuaucaaagaggaauccucuuaccucagaagguguggugcgcgagcgguaggucuaaagucaucaagggcucccugccacuuauuggggaagcagacuguuugcacgagaaauacggaggccugaauaagucaaagcccuauuacacaggugagcaugccaaagcuauagggaacugcccgaucugggugaagacuccucuaaaacucgccaauggcaccaaguaccggcccccagcaaaacugcuuaaggaacgcggauuuuucggcgcuauugccggguuucuggagggagguugggaaggcaugaucgcgggguggcacggauauacaagccacggcgcccaugguguugcaguggcugccgauuugaagaguacccaggaggcuauaaacaaaauuacuaagaaucucaacucucuguccgaauuagagaucaaaaaucugcagcgacucagcggggccauggacgagcuucacaacgaaauccuggaguuggaugaaaaggucgacgaccuaagagcagauacgauuucgucucaaaucgagcuggccgugcuccuguccaaugaaggcauuauaaacucagaggacgagcaucuucuggcuuuggaaaggaaacucaagaagaugcugggaccuagugcgguagagaucggcaauggguguuucgaaacaaaacacaagugcaaccagaccugcuuagaucggauugcagccggaacuuuugacgcuggugaguucagccugcccaccuuugauucccuaaauaucacagccgcaucucucaacgacgauggccuggacaaucauaccauccuuuuguacuauagcacugccgcuucaagucuggccguuacacucaugauugcaauauucguggucuacauggugucccgugauaacgucagcuguucuaucugccuguga

SEQ ID NO: 155463 - RNA, 1758 nt, Artificial Sequence; identical to SEQ ID NO: 154710
  derived and/or modified CDS sequence (opt3) from hemagglutinin__InfluenzaB__AGX20558

SEQ ID NO: 155464 - RNA, 1758 nt, Artificial Sequence; identical to SEQ ID NO: 154656
  derived and/or modified CDS sequence (opt3) from hemagglutinin__InfluenzaB__AGX20569

SEQ ID NO: 155465 - RNA, 1758 nt, Artificial Sequence; identical to SEQ ID NO: 154693
  derived and/or modified CDS sequence (opt3) from hemagglutinin__InfluenzaB__AGX20580

SEQ ID NO: 155466 - RNA, 1758 nt, Artificial Sequence; identical to SEQ ID NO: 154656
  derived and/or modified CDS sequence (opt3) from hemagglutinin__InfluenzaB__AGX20591

SEQ ID NO: 155467 - RNA, 1758 nt, Artificial Sequence; identical to SEQ ID NO: 154656
  derived and/or modified CDS sequence (opt3) from hemagglutinin__InfluenzaB__AGX20602

SEQ ID NO: 155468 - RNA, 1758 nt, Artificial Sequence; identical to SEQ ID NO: 154656
  derived and/or modified CDS sequence (opt3) from hemagglutinin__InfluenzaB__AGX20613

SEQ ID NO: 155469 - RNA, 1758 nt, Artificial Sequence; identical to SEQ ID NO: 154656
  derived and/or modified CDS sequence (opt3) from hemagglutinin__InfluenzaB__AGX20624

SEQ ID NO: 155470 - RNA, 1758 nt, Artificial Sequence
  derived and/or modified CDS sequence (opt3) from hemagglutinin__InfluenzaB__AGX20635
augaaggccaucauugugcugcucauggucguuaccagcaacgcugacagaauaugcacaggcaucacuuccucuaauucaccccacgugguaaaaacggcaacccagggggaggugaacgucacaggagugauuccucuuacuaccacaccaaccaagagucauuucgccaaucugaaagguacugaaacaaggggcaaguuguguccgaaaugcuuaaacuguaccgaucuggacguugcgcuagggcggcccaagugcacgggaaagaucccuagcgcucgcguguccauucuccacgagguccgaccagugacuucuggcuguuuucccaucaugcaugaucguaccaaaauaagacaacugccuaaucuucugagggguuacgaacacauccgguugucgacacauaacguaauuaaugccgagaacgcaccagggggacccuauaagaucggcacuucaggcagcugcccuaauguuaccaacgggaauggauucuuugccacaauggcuugggcagugccgaaaaacgacaagaauaaaaccgccacgaacccacucacuauugaaguccccuacaucuguacagagggugaggaucagauaaccguguggggcuuccacagugacaaugaaacucugauggcuaagcuguauggggauuccaagccucagaaauuuacaucuagcgccaacggagugaccacgcacuacgucucccagauuggcgguuucccaaaccaaaccgaggacgggggacucccccagucaggccgcaucguuguggauuauaugguacagaagaguggcaaaacagggacuauuaccuaccagagaggaaucuuacugccucaaaagguguggugcgcgagcgguaggucuaaagucaucaagggcucccuuccauugauuggggaagcagacugucugcaugagaaauauggaggccuaaauaagucaaagcccuacuacacaggugagcacgccaaagcuauagggaacugcccgaucugggugaagacuccucucaaacuggccaauggcaccaaguaucggcccccagcaaaacuucugaaggaacgcggauuuuucggcgcuauugccggguuuuuggagggagguugggaaggcaugaucgcgggguggcauggauacacaagccacggcgcccacgguguugcaguggcugccgaucucaagaguacccaggaggcuauaaacaaaauuacuaagaaucugaacucuuuauccgaacuggaggucaaaaaucuccagcgacuuagcggggccauggacgagcugcauaacgaaaucuuggagcuagaugaaaagguggacgaccugagagcagauacgaucucgucucagauugagcucgccguacugcuuuccaaugaaggcaucauuaacucagaggacgagcaccuguuggcucucgaaaggaaacugaagaagauguuaggaccuagugcgguugagauaggcaauggguguuucgaaacaaaacauaagugcaaccaaaccugccuggaucggaucgcagccggaacuuuugacgcuggugaguucagccuacccaccuuugauucccucaauauuacagccgcaucucugaacgacgauggccuugacaaucacaccaucuugcuguauuacagcacugccgcuucaagucucgccgugacacugaugaucgcaauuuucgucguguauauggucucccgugauaacgugagcuguucuauaugccuuuga

SEQ ID NO: 155471 - RNA, 1758 nt, Artificial Sequence; identical to SEQ ID NO: 154656
  derived and/or modified CDS sequence (opt3) from hemagglutinin__InfluenzaB__AGX20646

SEQ ID NO: 155472 - RNA, 1758 nt, Artificial Sequence
  derived and/or modified CDS sequence (opt3) from hemagglutinin__InfluenzaB__AGX20668
augaaggccaucauugugcugcucauggucguuaccagcaacgcugacagaauaugcacaggcaucacuuccucuaauucaccccacgugguaaaaacggcaacccagggggaggugaacgucacaggagugauuccucuuacuaccacaccaaccaagagucauuucgccaaucugaaagguacugaaacaaggggcaaguuguguccgaaaugccccaacuguaccgauuuagacguugcgcuggggcggccuaagugcacgggaaagaucccaagcgcucgcguguccauucuacacgagguccgacccgugacuucuggcuguuuuccuaucaugcaugaucguaccaaaauaagacaacucccaaaucugcuuagggguuacgaacacauccggcugucgacacauaacguaauuaaugccgagaacgcacccgggggaccuuauaagaucggcacuucaggcagcugcccaaauguuaccaacgggaauggauucuuugccacaauggcuugggcagugccgaaaaacgacaagaccaaaacggccacuaaucccuugacaauugaagucccuuacaucuguaccgagggugaggaucagauaacuguguggggcuuccacagugacaacgaaacacagauggcuaagcucuauggggauuccaagccacagaaauuuaccucuagcgccaauggagugacgacccacuacgucucccaaauuggcgguuuccccaaccagacagaggacgggggacugccucagucaggccgcaucguuguggauuauaugguacagaagaguggcaaaacugggaccauuacauaccaaagaggaauccugcucccacagaagguguggugcgcgagcgguaggucuaaagucaucaagggcuccuuaccccugauuggggaagcagacugucuucaugagaaauauggaggcuugaacaagucaaagccguacuacacuggugagcacgccaaagcuauagggaauugcccuaucugggugaagaccccacugaaacuagccaacggcacaaaguaucggcccccugcaaaacuccugaaggaacgcggauuuuucggcgcuauugccggguuucuugagggagguugggaaggcaugaucgcgggguggcauggauacaccagccacggcgcccacgguguugcaguggcugccgaucugaagaguacucaggaggcuauaaauaaaauuacgaagaaccuuaauucucucuccgaacuggaggucaaaaacuuacagcgacugagcggggccauggacgagcuccauaaugaaauccuugagcuggaugaaaagguggacgacuugagagcagauacaaucucgucucaaauugagcuagccguacugcucuccaacgaaggcaucauuaauucagaggacgagcaccuguuggcucuggaaaggaaauugaagaagaugcucggacccagugcgguugagauaggcaacggguguuucgaaaccaaacauaagugcaaucagacuugccuggaucggaucgcagccggaaccuuugacgcuggugaguucagcuuaccaacauuugauucccugaacauuaccgccgcaucucuaaaugacgauggccucgacaaccacacuauccugcuuuauuacagcacagccgcuucaaguuuggccgugacgcugaugaucgcaauuuucgucguguauauggucucccgugauaaugugagcuguucuauaugccucuga

SEQ ID NO: 155473 - RNA, 1758 nt, Artificial Sequence; identical to SEQ ID NO: 154731
  derived and/or modified CDS sequence (opt3) from hemagglutinin__InfluenzaB__AGX20679

SEQ ID NO: 155474 - RNA, 1758 nt, Artificial Sequence; identical to SEQ ID NO: 154693
  derived and/or modified CDS sequence (opt3) from hemagglutinin__InfluenzaB__AGX20690

SEQ ID NO: 155475 - RNA, 1758 nt, Artificial Sequence; identical to SEQ ID NO: 154693
  derived and/or modified CDS sequence (opt3) from hemagglutinin__InfluenzaB__AGX20701

SEQ ID NO: 155476 - RNA, 1758 nt, Artificial Sequence; identical to SEQ ID NO: 155037
  derived and/or modified CDS sequence (opt3) from hemagglutinin__InfluenzaB__AGX20712

SEQ ID NO: 155477 - RNA, 1758 nt, Artificial Sequence; identical to SEQ ID NO: 154656
  derived and/or modified CDS sequence (opt3) from hemagglutinin__InfluenzaB__AGX20723

SEQ ID NO: 155478 - RNA, 1758 nt, Artificial Sequence
  derived and/or modified CDS sequence (opt3) from hemagglutinin__InfluenzaB__AGX20734
augaaggccaucauugugcugcucauggucguuaccagcaacgcugacagaauaugcacaggcaucacuuccucuaauucaccccacgugguaaaaacggcaacccagggggaggugaacgucacaggagugauuccucuuacuaccacaccaaccaagagucauuucgccaaucugaaagguacugaaacaaggggcaaguuguguccgaaaugcuuaaacuguaccgaucuggacguugcgcuagggcggcccaagugcacgggaaagaucccuagcgcucgcguguccauucuccacgagguccgaccagugacuucuggcuguuuucccaucaugcaugaucguaccaaaauaagacaacugccuaaucuucugagggguuacgaacacauccgguugucgacaaacaauguaauuaacgccgagaaugcaccagggggacccuauaagaucggcacuucaggcagcugcccuaacguuaccaaugggaacggauucuuugccacaauggcuugggcagugccgaaaaaugacaagaacaaaaccgccacgaauccacucacuauugaaguccccuacaucuguacagagggugaggaucagauaaccguguggggcuuccauagugacaacgaaacucagauggcuaagcuguauggggauuccaagccucagaaauuuacaucuagcgccaacggagugaccacgcacuacgucucccaaauuggcgguuucccaaaucagaccgaggacgggggacugccccagucaggccgcaucguuguggauuauaugguacagaagaguggcaaaacagggacuauuaccuaccaaagaggaauccucuuaccucagaagguguggugcgcgagcgguaggucuaaagucaucaagggcucccugccacuuauuggggaagcagacuguuugcacgagaaauauggaggccugaacaagucaaagcccuacuacacaggugagcaugccaaagcuauagggaauugcccgaucugggugaagacuccucuaaaacucgccaacggcaccaaguaucggcccccagcaaaacugcuuaaggaacgcggauuuuucggcgcuauugccggguuucuggagggagguugggaaggcaugaucgcgggguggcacggauacacaagccauggcgcccacgguguugcaguggcugccgauuugaagaguacccaggaggcuauaaauaaaauuacuaagaaccucaauucucuguccgaauuagaggucaaaaaccugcagcgacucagcggggccauggacgagcuucacaaugaaauccuggaguuggaugaaaagguggacgaccuaagagcagauacgaucucgucucaaauugagcuggccguacuccuguccaacgaaggcaucauuaauucagaggacgagcaucuucuggcuuuggaaaggaaacucaagaagaugcugggaccuagugcgguugagauaggcaacggguguuucgaaacaaaacacaagugcaaucagaccugcuuagaucggaucgcagccggaacuuuugacgcuggugaguucagccugcccaccuuugauucccuaaacauuacagccgcaucucucaaugacgauggccuggacaaccauaccauccuuuuguauuacagcacugccgcuucaagucuggccgugacacucaugaucgcaauuuucgucguguauauggucucccgugauaacgugagcuguucuauaugccuguga

SEQ ID NO: 155479 - RNA, 1758 nt, Artificial Sequence
  derived and/or modified CDS sequence (opt3) from hemagglutinin__InfluenzaB__AGX20745
augaaggccaucauugugcugcucauggucguuaccagcaacgcugacagaauaugcacaggcaucacuuccucuaauucaccccacgugguaaaaacggcaacccagggggaggugaacgucacaggagugauuccucuuacuaccacaccaaccaagagucauuucgccaaucugaaagguacugaaacaaggggcaaguuguguccgaaaugccccaacuguaccgauuuagacguugcgcuggggcggccuaagugcacgggaaagaucccaagcgcucgcguguccauucuacacgagguccgacccgugacuucuggcuguuuuccuaucaugcaugaucguaccaaaauaagacaacucccaaaucugcuuagggguuacgaacacauccggcugucgacacauaacguaauuaaugccgagaacgcacccgggggaccuuauaagaucggcacuucaggcagcugcccaaauguuaccaacgggaauggauucuuugccacaauggcuugggcagugccgaaaaacgacaagaauaaaaccgccacgaaccccuugacuauugaagucccuuacaucuguacagagggugaggaucagauaaccauuuggggcuuccacagugacaaugaaacucagauggcuaagcucuauggggauuccaagccacagaaauuuacaucuagcgccaacggagugaccacgcacuacgugucccaaaucggcgguuuccccaaccagaccgaggacgggggacugccucagucaggccgcauugucguugauuauauggugcagaagaguggcaaaacagggacuaucaccuaccaaagaggaauccugcucccacagaagguauggugcgcgagcgguaggucuaaagugauuaagggcuccuuaccccugauaggggaagcagacugucuucaugagaaauauggaggcuugaauaagucaaagccguacuacacaggugagcacgccaaagcuaucgggaacugcccuauuugggucaagacuccccugaaacuagccaauggcaccaaguaucggccuccagcaaaacuccugaaggaacgcggauuuuucggcgcuaucgccggguuucuugagggagguugggaaggcaugauagcgggguggcauggauacacaagccacggcgcccacgguguggcaguugcugccgaucugaagaguacccaggaggcuauuaacaaaaucacuaagaauuugaacucucucuccgaacuggaggugaaaaauuuacagcgacugagcggggccauggacgagcuccauaacgaaauccuugagcuggaugaaaaggucgacgacuugagagcagauacgauuucgucucaaaucgagcuagccgugcugcucuccaaugaaggcauuauaaacucagaggacgagcaucugcuugcucuggaaaggaaauugaagaagaugcucggacccagugcgguagagaucggcaauggguguuucgaaacaaaacacaagugcaaccagaccugccuggaucggauugcagccggaacuuuugacgcuggugaguucagcuuaccaaccuuugauucccugaauaucacagccgcaucucuaaacgacgauggccucgacaaucacaccauccugcuuuauuacagcacugccgcuucaaguuuggccguuacacugaugauugcaauauucguggucuauauggugucccgugauaacgucagcuguucuaucugccucuga

SEQ ID NO: 155480 - RNA, 1758 nt, Artificial Sequence; identical to SEQ ID NO: 155037
  derived and/or modified CDS sequence (opt3) from hemagglutinin__InfluenzaB__AGX20756

SEQ ID NO: 155481 - RNA, 1758 nt, Artificial Sequence; identical to SEQ ID NO: 154656
  derived and/or modified CDS sequence (opt3) from hemagglutinin__InfluenzaB__AGX20767

SEQ ID NO: 155482 - RNA, 1758 nt, Artificial Sequence; identical to SEQ ID NO: 154693
  derived and/or modified CDS sequence (opt3) from hemagglutinin__InfluenzaB__AGX20778

SEQ ID NO: 155483 - RNA, 1758 nt, Artificial Sequence
  derived and/or modified CDS sequence (opt3) from hemagglutinin__InfluenzaB__AGX20789
augaaggccaucauugugcugcucauggucguuaccagcaacgcugacagaauaugcacaggcaucacuuccucuaauucaccccacgugguaaaaacggcaacccagggggaggugaacgucacaggagugauuccucuuacuaccacaccaaccaagagucauuucgccaaucugaaagguacugaaacaaggggcaaguuguguccgaaaugccccaacuguaccgauuuagacguugcgcuggggcggccuaagugcacgggaaagaucccaagcgcucgcguguccauucuacacgagguccgacccgugacuucuggcuguuuuccuaucaugcaugaucguaccaaaauaagacaacucccaaaucugcuuagggguuacgaacacauccggcugucgacacauaacguaauuaaugccgagaacgcacccgggggaccuuauaagaucggcacuucaggcagcugcccaaauguuaccaacgggaauggauucuuugccacaauggcuugggcagugccgaaaaacgacaagaauaaaaccgccacgaaccccuugacuauugaagucccuuacaucuguacagagggugaggaucagauaaccguguggggcuuccacagugacaaugaaacucagauggcuaagcucuauggggauuccaagccacagaaauuuacaucuagcgccaacggagugaccacgcacuacgucucccaaauuggcgguuuccccaaccagaccgaggacgggggacugccucagucaggccgcaucguuguggauuauaugguacagaagaguggcaaaacagggacuauuaccuaccaaagaggaauccugcucccacagaagguguggugcgcgagcgguaggucuaaagucaucaagggcuccuuaccccugauuggggaagcagacugucuucaugagaaauauggaggcuugaauaagucaaagccguacuacacaggugagcacgccaaagcuauagggaacugcccuaucugggugaagacuccccugaaacuagccaauggcaccaaguaucggccuccagcaaaacuccugaaggaacgcggauuuuucggcgcuauugccggguuucuugagggagguugggaaggcaugaucgcgggguggcauggauacacaagccacggcgcccacgguguugcaguggcugccgaucugaagaguacccaggaggcuauaaacaaaauuacuaagaauuugaacucucucuccgaacuggaggucaaaaauuuacagcgacugagcggggccauggacgagcuccauggcgaaauccuugagcuggaugaaaagguggacgacuugagagcagauacgaucucgucucaaauugagcuagccguacugcucuccaacgaaggaaucauuaauucagaggacgagcaucugcuugcucuggaaaggaaauugaagaagaugcucggccccagugcgguugagauagggaacggauguuucgaaacaaaacacaagugcaaucagaccugccuggaucggaucgcagccgguacuuuugacgcuggcgaguucagcuuaccaaccuuugauucccugaacauuacagccgcaucucuaaaugacgaugggcucgacaaccacaccauccugcuuuauuacagcacugccgcuucaaguuuggccgugacacugaugaucgcaauuuucgucguguauauggucucccgugauaaugugagcuguucuauaugccucuga

SEQ ID NO: 155484 - RNA, 1758 nt, Artificial Sequence
  derived and/or modified CDS sequence (opt3) from hemagglutinin__InfluenzaB__AGX20800
augaaggccaucauugugcugcucauggucguuaccagcaacgcugacagaauaugcacaggcaucacuuccucuaauucaccccacgugguaaaaacggcaacccagggggaggugaacgucacaggagugauuccucuuacuaccacaccaaccaagagucauuucgccaaucugaaagguacugaaacaaggggcaaguuguguccgaaaugccccaacuguaccgauuuagacguugcgcuggggcggccuaagugcacgggaaagaucccaagcgcucgcguguccauucuacacgagguccgacccgugacuucuggcuguuuuccuaucaugcaugaucguaccaaaauaagacaacucccaaaucugcuuagggguuacgaacacauccggcugucgacacauaacguaauuaaugccgagaacgcacccgggggaccuuauaagaucggcacuucaggcagcugcccaaauguuaccaacgggaauggauucuuugccacaauggcuugggcagugccgaaaaacgacaagaauaaaaccgccacgaaccccuugacuauugaagucccuuacaucuguacagagggugaggaucagauaaccguguggggcuuccacagugacaaugaaacucagauggcuaagcucuauggggauuccaagccacagaaauuuacaucuagcgccaacggagugaccacgcacuacgucucccaaauuggcgguuuccccaaccagaccgaggacgggggacugccucagucaggccgcaucguuguggauuauaugguacagaagaguggcaaaacagggacuauuaccuaccaaagaggaauccugcucccacagaagguguggugcgcgagcgguaggucuaaagucaucaagggcuccuuaccccugauuggggaagcagacugucuucaugagaaauauggaggcuugaauaagucaaagccguacuacacaggugagcacgccaaagcuauagggaacugcccuaucugggugaagacuccccugaaacuagccaauggcaccaaguaucggccuccagcaaaacuccugaaggaacgcggauuuuucggcgcuauugccggguuucuugagggagguugggaaggcaugaucgcgggguggcauggauacacaagccacggcgcccacgguguugcaguggcugccgaucugaagaguacccaggaggcuauaaacaaaauuacuaagaauuugaacucucucuccgaacuggaggucaaaaauuuacagcgacugagcggggccauggacgagcuccauaacgaaauccuugagcuggaugaaaagguggacgacuugagagcagauacgaucucgucucaaauugagcuagccguacugcucuccaaugaaggcaucauuaacucagaggacgagcaucugcuugcucuggaaaggaaauugaagaagaugcucggacccagugcgguugagauaggcaauggguguuucgaaacaaaacacaagugcaaccagaccugccuggaucggaucgcagccggaacuuuugacgcuggugaguucagcuuaccaaccuuugauucccugaauauuacagccgcaucucuaaacgacgaugaacucgacaaucacaccauccugcuuuauuacagcacugccgcuucaaguuuggccgugacacugaugaucgcaauuuucgucguguauauggucucccgugauaacgugagcuguucuauaugccucuga

SEQ ID NO: 155485 - RNA, 1758 nt, Artificial Sequence; identical to SEQ ID NO: 154731
  derived and/or modified CDS sequence (opt3) from hemagglutinin__InfluenzaB__AGX20811

SEQ ID NO: 155486 - RNA, 1758 nt, Artificial Sequence; identical to SEQ ID NO: 154731
  derived and/or modified CDS sequence (opt3) from hemagglutinin__InfluenzaB__AGX20822

SEQ ID NO: 155487 - RNA, 1758 nt, Artificial Sequence; identical to SEQ ID NO: 154731
  derived and/or modified CDS sequence (opt3) from hemagglutinin__InfluenzaB__AGX20833

SEQ ID NO: 155488 - RNA, 1758 nt, Artificial Sequence
  derived and/or modified CDS sequence (opt3) from hemagglutinin__InfluenzaB__AGX20844
augaaggccaucauugugcugcucauggucguuaccagcaacgcugacagaauaugcacaggcaucacuuccucuaauucaccccacauugugaaaacggcaacccagggggagguaaacgugacaggagucaucccucuuacuaccacaccaaccaagagucauuucgccaaucugaaagguacugaaacaaggggcaaguuguguccgaaaugcuuaaacuguaccgaucuggacguggcgcuagggcggcccaagugcaugggaaagauuccuagcgcucgcguuuccauccuccacgaggugcgaccagucacgucuggcuguuuucccauaaugcaugaucguacuaaaaucagacaacugccuaaucuucugagggguuacgaacacauucgguugucgacccauaacgugaucaaugccgagaacgcaccagggggacccuauaagauuggcacaucaggcagcugcccuaauaucacuaacgggaauggauucuuugccaccauggcuugggcaguaccgaaaaacgacaagaauaaaacagccaccaacccacucacgauagaaguucccuacauuuguacugagggugaggaucagaucacaguguggggcuuccacagugacaaugaaacccagauggcuaagcuguauggggauuccaagccucagaaauuuacuucuagcgccaacggagucacaacccacuacgugucccaaauuggcgguuucccaaaccagacggaggacgggggacugccccagucaggccgcaucguggucgauuauaugguucagaagaguggcaaaaccgggacaaucacuuaccaaagagguauucucuuaccucagaagguguggugcgcgagcggaaggucuaaaguaauaaagggcucccugccacuuaucggggaagcagacuguuugcaugagaaauauggaggccugaauaagucaaagcccuacuacaccggugagcacgccaaagcuauugggaacugcccgaucugggugaagacaccucuaaaacucgccaauggcacuaaguaucggcccccagcaaaacugcuuaaggaacgcggauuuuucggcgcuauagccggguuucuggagggagguugggaaggcaugauugcgggguggcauggauacaccagccacggcgcccacggugucgcaguggcugccgauuugaagaguacacaggaggcuaucaacaaaaucaccaagaaucucaacucucuguccgaauuagagguuaaaaaucugcagcgacucagcggggccauggacgagcuucauaacgaaauucuggaguuggaugaaaagguggacgaccuaagagcagauacuaucucgucucaaauugagcuggccguccuccuguccaaugaaggcauaaucaacucagaggacgagcaccuucuggcuuuggaaaggaaacucaagaagaugcugggaccuagugcgguggagauuggcaauggguguuucgaaacgaaacauaagugcaaccagacaugcuuagaucggaucgcagccggaaccuuugacgcuggugaguucagccugcccacuuuugauucccuaaauaucaccgccgcaucucucaacgacgauggccuggacaaucacacaauucuuuuguauuacagcaccgccgcuucaagucuggccguaacucucaugauagcaaucuucguuguguauauggucucccgugauaacgugagcuguucuauuugccuguga

SEQ ID NO: 155489 - RNA, 1758 nt, Artificial Sequence; identical to SEQ ID NO: 154656
  derived and/or modified CDS sequence (opt3) from hemagglutinin__InfluenzaB__AGX20855

SEQ ID NO: 155490 - RNA, 1758 nt, Artificial Sequence; identical to SEQ ID NO: 154731
  derived and/or modified CDS sequence (opt3) from hemagglutinin__InfluenzaB__AGX20866

SEQ ID NO: 155491 - RNA, 1758 nt, Artificial Sequence; identical to SEQ ID NO: 154731
  derived and/or modified CDS sequence (opt3) from hemagglutinin__InfluenzaB__AGX20877

SEQ ID NO: 155492 - RNA, 1758 nt, Artificial Sequence
  derived and/or modified CDS sequence (opt3) from hemagglutinin__InfluenzaB__AGX20888
augaaggccaucauugugcugcucauggucguuaccagcaacgcugacagaauaugcacaggcaucacuuccucuaauucaccccacgugguaaaaacggcaacccagggggaggugaacgucacaggagugauuccucuuacuaccacaccaaccaagagucauuucgccaaucugaaagguacugaaacaaggggcaaguuguguccgaaaugccccaacuguaccgauuuagacguugcgcuggggcggccuaagugcacgggaaagaucccaagcgcucgcguguccauucuacacgagguccgacccgugacuucuggcuguuuuccuaucaugcaugaucguaccaaaauaagacaacucccaaaucugcuuagggguuacgaacacauccggcugucgacacauaacguaauuaaugccgagaacgcacccgggggaccuuauaagaucggcacuucaggcagcugcccaaauguuaccaacgggaauggauucuuugccacaauggcuugggcagugccgaaaaacgacaagaauaaaaccgccacgaaccccuugacuauugaagucccuuacaucuguacagagggugaggaucagauaaccguguggggcuuccacagugacuccgaaacucagauggcuaagcucuauggggauucuaagccacagaaauuuacaagcuccgccaauggagugaccacgcacuacgucucacaaauuggcgguuuccccaaccagaccgaggacgggggacugccucagaguggccgcaucguuguggauuauaugguacagaaguccggcaaaacagggacuauuaccuaccaaagaggaauccugcucccacagaagguguggugcgcgucugguagguccaaagucaucaagggcucauuaccccugauuggggaagcagacugucuucaugagaaauauggaggcuugaacaagagcaagccguacuacacaggugagcacgccaaagcuauagggaauugcccuaucugggugaagacuccccugaaacuagccaacggcaccaaguaucggccuccagcaaaacuccugaaggaacgcggauuuuucggcgcuauugccggguuucuugagggagguugggaaggcaugaucgcgggguggcauggauacacaagucacggcgcccacgguguugcaguggcugccgaucugaagucuacccaggaggcuauaaauaaaauuacuaagaacuugaauagccucagcgaacuggaggucaaaaacuuacagcgacugucgggggccauggacgagcuccauaaugaaauccuugagcuggaugaaaagguggacgacuugagagcagauacgaucucuucccaaauugagcuagccguacugcucucaaacgaaggcaucauuaauagugaggacgagcaucugcuugcucuggaaaggaaauugaagaagaugcucggacccagcgcgguugagauaggcaacggguguuucgaaacaaaacacaagugcaaucagaccugccuggaucggaucgcagccggaacuuuugacgcuggugaguucuccuuaccaaccuuugauucucugaacauuacagccgcaagccuaaaugacgauggccucgacaaccacaccauccugcuuuauuacucaacugccgcuaguuccuuggccgugacacugaugaucgcaauuuucgucguguauauggucagccgugauaaugugucuuguucaauaugccucuga

SEQ ID NO: 155493 - RNA, 1758 nt, Artificial Sequence; identical to SEQ ID NO: 154731
  derived and/or modified CDS sequence (opt3) from hemagglutinin__InfluenzaB__AGX20899

SEQ ID NO: 155494 - RNA, 1758 nt, Artificial Sequence; identical to SEQ ID NO: 154731
  derived and/or modified CDS sequence (opt3) from hemagglutinin__InfluenzaB__AGX20910

SEQ ID NO: 155495 - RNA, 1758 nt, Artificial Sequence; identical to SEQ ID NO: 154656
  derived and/or modified CDS sequence (opt3) from hemagglutinin__InfluenzaB__AGX20921

SEQ ID NO: 155496 - RNA, 1758 nt, Artificial Sequence
  derived and/or modified CDS sequence (opt3) from hemagglutinin__InfluenzaB__AGX20932
augaaggccaucauugugcugcucauggucguuaccagcaacgcugacagaauaugcacaggcaucacuuccucuaauucaccccacgugguaaaaacggcaacccagggggaggugaacgucacaggagugauuccucuuacuaccacaccaaccaagagucauuucgccaaucugaaagguacugaaacaaggggcaaguuguguccgaaaugccccaacuguaccgauuuagacguugcgcuggggcggccuaagugcacgggaaagaucccaagcgcucgcguguccauucuacacgagguccgacccgugacuucuggcuguuuuccuaucaugcaugaucguaccaaaauaagacaacucccaaaucugcuuagggguuacgaacacauccggcugucgacacauaacguaauuaaugccgagaacgcacccgggggaccuuauaagaucggcacuucaggcagcugcccaaauguuaccaacgggaauggauucuuugccacaauggcuugggcagugccgaaaaacgacaagaauaaaaccgccacgaaccccuugacuauugaagucccuuacaucuguacagagggugaggaucagauaaccguguggggcuuccacagugacaaugaaacucagauggcuaagcucuauggggauccaaagccccagaaauuuacauccucugccaacggagugaccacgcacuacgucagccaaauuggcgguuucccuaaccagaccgaggacgggggacugccacaguccggccgcaucguuguggauuauaugguacagaagucaggcaaaacagggacuauuaccuaccaaagaggaauccugcucccccagaagguguggugcgcgagugguaggagcaaagucaucaagggcucuuuaccgcugauuggggaagcagacugucuucaugagaaauauggaggcuugaauaaguccaagccuuacuacacaggugagcacgccaaagcuauagggaacugccccaucugggugaagacuccacugaaacuagccaauggcaccaaguaucggccucccgcaaaacuccugaaggaacgcggauuuuucggcgcuauugccggguuucuugagggagguugggaaggcaugaucgcgggguggcauggauacacaucacacggcgcccacgguguugcaguggcugccgaucugaaaagcacccaggaggcuauaaacaagauuacuaagaauuugaacagucucucugaacuggaggucaaaaauuuacagcgacuguccggggccauggacgagcuccauaacgaaauccuugagcuggaugaaaagguggacgacuugagagcagauacgaucagcucgcaaauugagcuagccguacugcucucuaaugaaggcaucauuaacuccgaggacgagcaucugcuugcucuggaaaggaaauugaagaagaugcucggaccaucagcgguugagauaggcaauggguguuucgaaacaaaacacaagugcaaccagaccugccuggaucggaucgcagccggaacuuuugacgcuggugaguucaguuuacccaccuuugauagccugaauauuacagccgcaucccuaaacgacgauggccucgacaaucacaccauccugcuuuauuacucuacugccgcuagcucauuggccgugacacugaugaucgcaauuuucgucguguauauggucagucgugauaacguguccuguagcauaugccucuga

SEQ ID NO: 155497 - RNA, 1758 nt, Artificial Sequence; identical to SEQ ID NO: 154656
  derived and/or modified CDS sequence (opt3) from hemagglutinin__InfluenzaB__AGX20943

SEQ ID NO: 155498 - RNA, 1758 nt, Artificial Sequence; identical to SEQ ID NO: 154656
  derived and/or modified CDS sequence (opt3) from hemagglutinin__InfluenzaB__AGX20954

SEQ ID NO: 155499 - RNA, 1758 nt, Artificial Sequence; identical to SEQ ID NO: 154656
  derived and/or modified CDS sequence (opt3) from hemagglutinin__InfluenzaB__AGX20965

SEQ ID NO: 155500 - RNA, 1758 nt, Artificial Sequence
  derived and/or modified CDS sequence (opt3) from hemagglutinin__InfluenzaB__AGX20976
augaaggccaucauugugcugcucauggucguuaccagcaacgcugacagaauaugcacaggcaucacuuccucuaauucaccccacgugguaaaaacggcaacccagggggaggugaacgucacaggagugauuccucuuacuaccacaccaaccaagagucauuucgccaaucugaaagguacugaaacaaggggcaaguuguguccgaaaugcuuaaacuguaccgaucuggacguugcgcuagggcggcccaagugcacgggaaagaucccuagcgcucgcguguccauucuccacgagguccgaccagugacuucuggcuguuuucccaucaugcaugaucguaccaaaauaagacaacugccuaaucuucugagggguuacgaacacauccgguugucgacacauaacguaauuaaugccgagaacgcaccagggggacccuauaagaucggcacuucaggcagcugcccuaauguuaccaacgggaauggauucuuugccacaauggcuugggcagugccgaaaaacgacaagaauaaaaccgccacgaacccacucacuauugaaguccccuacaucuguacagagggugaggaucagauaaccguguggggcuuccacagugacaaugaaacucagauggcuaagcuguauggggauuccaagccucagaaauuuacaucuagcgccaacggagugaccacgcacuacgucucccaaauuggcgguuucccaaaccagaccgaggacgggggacugccccagucaggccgcaucguuguggauuauaugguacagaagaguggcaaaacagggacuauuaccuaccaaagaggaauccucuuaccucagaagguguggugcgcgagcgguaggucuaaagucaucaagggcucccugccacuuauuggggaagcagacuguuugcaugagaaauauggaggccugaauaagucaaagcccuacuacacaggugagcacgccaaagcuauagggaacugcccgaucugggugaagacuccucuaaaacucgccaauggcaccaaguaucggcccccagcaaaacugcuuaaggaacgcggauuuuucggcgcuauugccggguuucuggagggagguugggaaggcaugaucgcgggguggcauggauacacaagccacggcgcccacgguguugcaguggcugccgauuugaagaguacccaggaggcuauaaacaaaauuacuaagaaucucaacucucuguccgaauuagaggucaaaaaucugcagcgacucagcggggccauggacgagcuucauggcgaaauccuggaguuggaugaaaagguggacgaccuaagagcagauacgaucucgucucaaauugagcuggccguacuccuguccaacgaaggaaucauuaauucagaggacgagcaccuucuggcuuuggaaaggaaacucaagaagaugcugggcccuagugcgguugagauagggaacggauguuucgaaacaaaacauaagugcaaucagaccugcuuagaucggaucgcagccgguacuuuugacgcuggcgaguucagccugcccaccuuugauucccuaaacauuacagccgcaucucucaaugacgaugggcuggacaaccacaccauccuuuuguauuacagcacugccgcuucaagucuggccgugacacucaugaucgcaauuuucgucguguauauggucucccgugauaaugugagcuguucuauaugccuguga

SEQ ID NO: 155501 - RNA, 1758 nt, Artificial Sequence; identical to SEQ ID NO: 154656
  derived and/or modified CDS sequence (opt3) from hemagglutinin__InfluenzaB__AGX20987

SEQ ID NO: 155502 - RNA, 1758 nt, Artificial Sequence; identical to SEQ ID NO: 154731
  derived and/or modified CDS sequence (opt3) from hemagglutinin__InfluenzaB__AGX20998

SEQ ID NO: 155503 - RNA, 1758 nt, Artificial Sequence
  derived and/or modified CDS sequence (opt3) from hemagglutinin__InfluenzaB__AGX21009
augaaggccaucauugugcugcucauggucguuaccagcaacgcugacagaauaugcacaggcaucacuuccucuaauucaccccacgugguaaaaacggcaacccagggggaggugaacgucacaggagugauuccucuuacuaccacaccaaccaagagucauuucgccaaucugaaagguacugaaacaaggggcaaguuguguccgaaaugccccaacuguaccgauuuagacguugcgcuggggcggccuaagugcacgggaaagaucccaagcgcucgcguguccauucuacacgagguccgacccgugacuucuggcuguuuuccuaucaugcaugaucguaccaaaauaagacaacucccaaaucugcuuagggguuacgaacacauccggcugucgacacauaacguaauuaaugccgagaacgcacccgggggaccuuauaagaucggcacuucaggcagcugcccaaauguuaccaacgggaauggauucuuugccacaauggcuugggcagugccgaaaaacgacaagaauaaaaccgccacgaaccccuugacuauugaagucccuuacaucuguacagagggugaggaucagauaaccguguggggcuuccacagugacaaugaaacucagauggcuaagcucuauggggauuccaagccacagaaauuuacaucuagcgccaacggagugaccacgcacuacgucucccaaauuggcgguuuccccaaccagaccgaggacgggggacugccucagucaggccgcaucguuguggauuauaugguacagaagaguggcaaaacagggacuauuaccuaccaaagaggaauccugcucccacagaagguguggugcgcgagcgguaggucuaaagucaucaagggcuccuuaccccugauuggggaagcagacugucuucaugagaaauauggaggcuugaauaagucaaagccguacuacacaggugagcacgccaaagcuauagggaacugcccuaucugggugaagacuccccugaaacuagccaauggcaccaaguaucggccuccagcaaaacuccugaaggaacgcggauuuuucggcgcuauugccggguuucuugagggagguugggaaggcaugaucgcgggguggcauggauacacaagccacggcgcccacgguguugcaguggcugccgaucugaagaguacccaggaggcuauaaacaaaauuacuaagaauuugaacucucucuccgaacuggaggucaaaaauuuacagcgacugagcggggccauggacgagcuccauaacgaaauccuugagcuggaugaaaagguggacgacuugagagcagauacgaucucgucucaaauugagcuagccguacugcucuccaaugaaggcaucauuaacucagaggacgagcaucugcuugcucuggaaaggaaauugaagaagaugcucggacccagugcgguugagauaggcaauggguguuucgaaacaaaacacaagugcaaccagaccugccuggaucggaucgcagccggaacuuuugacgcuggugaguucagcuuaccaaccuuugauucccugaauauuacagccgcaucucuaaacgacgauggccucgacaaucacaccauccugcuuuauuacagcacugccgcuucaaguuuggccgugacacugaugaucgcaauuuucgucguguauaugauaucccgugauaacgucagcuguucuaucugccucuga

SEQ ID NO: 155504 - RNA, 1758 nt, Artificial Sequence
  derived and/or modified CDS sequence (opt3) from hemagglutinin__InfluenzaB__AGX21020
augaaggccaucauugugcugcucauggucguuaccagcaacgcugacagaauaugcacaggcaucacuuccucuaauucaccccacgugguaaaaacggcaacccagggggaagugaacgucacaggagugauuccucuuacuaccacaccaaccaagagucauuucgccaaucugaaagguacugaaacaaggggcaaguuguguccgaaaugcuuaaacuguaccgaucuggacguugcgcuagggcggcccaagugcacgggaaagaucccuagcgcucgcguguccauucuccacgagguccgaccagugacuucuggcuguuuucccaucaugcaugaucguaccaaaauaagacaacugccuaaucuucugagggguuacgaacacauccgguugucgacacauaacguaauuaaugccgagaacgcaccagggggacccuauaagaucggcacuucaggcagcugcccuaauguuaccaacgggaauggauucuuugccacaauggcuugggcagugccgaaaaacgacaagaauaaaaccgccacgaacccacucacuauugaaguccccuacaucuguacagagggugaggaucagauaaccguguggggcuuccacagugacaaugaaacucagauggcuaagcuguauggggauuccgagccucagaaguuuacaucuagcgccaacggagugaccacgcacuacgucucccaaauuggcgguuucccaaaccagaccgaagacgggggacugccccagucaggccgcaucguuguggauuauaugguacagaaaaguggcaagacagggacuauuaccuaccaaagaggaauccucuuaccucagaaaguguggugcgcgagcgguaggucuaaggucaucaaaggcucccugccacuuauuggggaggcagacuguuugcaugagaaguauggaggccugaauaaaucaaagcccuacuacacaggugaacacgccaaggcuauagggaacugcccgaucugggugaaaacuccucuaaagcucgccaauggcaccaaauaucggcccccagcaaagcugcuuaaagagcgcggauuuuucggcgcuauugccggguuucuggaaggagguugggagggcaugaucgcgggguggcauggauacacaagccacggcgcccacgguguugcaguggcugccgauuugaagaguacccaggaagcuauaaacaagauuacuaaaaaucucaacucucuguccgaguuagaggucaagaaucugcagcgacucagcggggccauggacgaacuucauaacgagauccuggaauuggaugagaaaguggacgaccuaagagcagauacgaucucgucucaaauugaacuggccguacuccuguccaaugagggcaucauuaacucagaggacgaacaccuucuggcuuuggagaggaagcucaaaaagaugcugggaccuagugcgguugaaauaggcaauggguguuucgagacaaagcauaaaugcaaccagaccugcuuagaucggaucgcagccggaacuuuugacgcuggugaguucagccugcccaccuuugauucccuaaauauuacagccgcaucucucaacgacgauggccuggacaaucacaccauccuuuuguauuacagcacugccgcuucaagucuggccgugacacucaugaucgcaauuuucgucguguauauggucucccgugauaacgugagcuguucuauaugccuguga

SEQ ID NO: 155505 - RNA, 1758 nt, Artificial Sequence; identical to SEQ ID NO: 154731
  derived and/or modified CDS sequence (opt3) from hemagglutinin__InfluenzaB__AGX21031

SEQ ID NO: 155506 - RNA, 1758 nt, Artificial Sequence
  derived and/or modified CDS sequence (opt3) from hemagglutinin__InfluenzaB__AGX21042
augaaggccaucauugugcugcucauggucguuaccagcaacgcugacagaauaugcacaggcaucacuuccucuaauucaccccacgugguaaaaacggcaacccagggggaggugaacgucacaggagugauuccucuuacuaccacaccaaccaagagucauuucgccaaucugaaagguacugaaacaaggggcaaguuguguccgaaaugcuuaaacuguaccgaucuggacguugcgcuagggcggcccaagugcacgggaaagaucccuagcgcucgcguguccauucuccacgagguccgaccagugacuucuggcuguuuucccaucaugcaugaucguaccaaaauaagacaacugccuaaucuucugagggguuacgaacacauccgguugucgacacauaacguaauuaauacugagaacgccccagggggacccuauaagaucggcaccucaggcagcugcccuaauguuacaaacgggaauggauucuuugcaaccauggccugggcugugccgaaaaacgacaagaauaaaacggcaacuaacccacucacaauugaaguccccuacaucuguaccgagggugaggaucagauaacuguguggggcuuccacagugacaaugaaacacagauggccaagcuguauggggauuccaagccucagaaauuuaccucuagcgcuaacggagugacgacccacuacgucucccaaauuggcgguuucccaaaccagacagaggacgggggacugccccagucaggccgcaucguuguggauuauaugguacagaagaguggcaaaacugggaccauuacauaccaaagaggaauccucuuaccucagaagguguggugcgccagcgguaggucuaaagucaucaagggcucccugccacuuauuggggaagcggacuguuugcaugagaaauauggaggccugaauaagucaaagcccuacuacacuggugagcacgcaaaagccauagggaacugcccgaucugggugaagaccccucuaaaacucgcuaauggcacaaaguaucggcccccagccaaacugcuuaaggaacgcggauuuuucggcgcaauugcuggguuucuggagggagguugggaaggcaugaucgccggguggcauggauacaccagccacggcgcgcacgguguugccguggcagcugauuugaagaguacucaggaggccauaaacaaaauuacgaagaaucucaacucucuguccgaauuagaggucaaaaaucugcagcgacucagcggggcuauggacgagcuucauaacgaaauccuggaguuggaugaaaagguggacgaccuaagagccgauacaaucucgucucaaauugagcuggcaguacuccuguccaaugaaggcaucauuaacucagaggacgagcaccuucuggccuuggaaaggaaacucaagaagaugcugggaccuagugcuguugagauaggcaauggguguuucgaaaccaaacauaagugcaaccagacuugcuuagaucggaucgcggcaggaaccuuugacgccggugaguucagccugcccacauuugauucccuaaauauuaccgcugccucucucaacgacgauggccuggacaaucacacuauccuuuuguauuacagcacagcagccucaagucuggcugugacgcucaugaucgccauuuucgucguguauauggucucccgugauaacgugagcuguucuauaugccuguga

SEQ ID NO: 155507 - RNA, 1758 nt, Artificial Sequence; identical to SEQ ID NO: 154693
  derived and/or modified CDS sequence (opt3) from hemagglutinin__InfluenzaB__AGX21053

SEQ ID NO: 155508 - RNA, 1758 nt, Artificial Sequence; identical to SEQ ID NO: 154656
  derived and/or modified CDS sequence (opt3) from hemagglutinin__InfluenzaB__AGX21064

SEQ ID NO: 155509 - RNA, 1758 nt, Artificial Sequence; identical to SEQ ID NO: 154693
  derived and/or modified CDS sequence (opt3) from hemagglutinin__InfluenzaB__AGX21075

SEQ ID NO: 155510 - RNA, 1758 nt, Artificial Sequence; identical to SEQ ID NO: 154693
  derived and/or modified CDS sequence (opt3) from hemagglutinin__InfluenzaB__AGX21084

SEQ ID NO: 155511 - RNA, 1758 nt, Artificial Sequence; identical to SEQ ID NO: 154693
  derived and/or modified CDS sequence (opt3) from hemagglutinin__InfluenzaB__AGX21095

SEQ ID NO: 155512 - RNA, 1758 nt, Artificial Sequence
  derived and/or modified CDS sequence (opt3) from hemagglutinin__InfluenzaB__AGX21106
augaaggccaucauugugcugcucauggucguuaccagcaacgcugacagaauaugcacaggcaucacuuccucuaauucaccccacgugguaaaaacggcaacccagggggaggugaacgucacaggagugauuccucuuacuaccacaccaaccaagagucauuucgccaaucugaaagguacugaaacaaggggcaaguuguguccgaaaugccccaacuguaccgauuuagacguugcgcuggggcggccuaagugcacgggaaagaucccaagcgcucgcguguccauucuacacgagguccgacccgugacuucuggcuguuuuccuaucaugcaugaucguaccaaaauaagacaacucccaaaucugcuuagggguuacgaacacauccggcugucgacacauaacguaauuaaugccgagaacgcacccgggggaccuuauaagaucggcacuucaggcagcugcccaaauguuaccaacgggaauggauucuuugccacaauggcuugggcagugccgaaaaacgacaagaauaaaaccgccacgaaccccuugacuauugaagucccuuacaucuguacagagggugaggaucagauaaccguguggggcuuccacagugacaaugaagcucagauggccaagcucuauggggauuccaagccacagaaauuuacuucuagcgcgaacggagugacaacccacuacgucucccaaauuggcgguuuccccaaccagacggaggacgggggacugccucagucaggccgcaucguuguggauuauaugguacagaagaguggcaaaaccgggacaauuacuuaccaaagaggaauccugcucccacagaagguguggugcgcaagcgguaggucuaaagucaucaagggcuccuuaccccugauuggggaagccgacugucuucaugagaaauauggaggcuugaauaagucaaagccguacuacaccggugagcacgcuaaagccauagggaacugcccuaucugggugaagacaccccugaaacuagcaaauggcacuaaguaucggccuccagcuaaacuccugaaggaacgcggauuuuucggcgccauugcgggguuucuugagggagguugggaaggcaugaucgccggguggcauggauacaccagccacggcgcacacgguguugcuguggccgcugaucugaagaguacacaggaggccauaaacaaaauuaccaagaauuugaacucucucuccgaacuggaggucaaaaauuuacagcgacugagcggggcaauggacgagcuccauaacgaaauccuugagcuggaugaaaagguggacgacuugagagccgauacuaucucgucucaaauugagcuagcuguacugcucuccaaugaaggcaucauuaacucagaggacgagcaucugcuugcgcuggaaaggaaauugaagaagaugcucggacccagugcaguugagauaggcaauggguguuucgaaacgaaacacaagugcaaccagacaugccuggaucggaucgccgcuggaaccuuugacgccggugaguucagcuuaccaacuuuugauucccugaauauuaccgcagccucucuaaacgacgauggccucgacaaucacacaauccugcuuuauuacagcaccgcugccucaaguuuggcagugacucugaugaucgcgauuuucgucguguauauggucucccgugauaacgugagcuguucuauaugccucuga

SEQ ID NO: 155513 - RNA, 1758 nt, Artificial Sequence; identical to SEQ ID NO: 154656
  derived and/or modified CDS sequence (opt3) from hemagglutinin__InfluenzaB__AGX21117

SEQ ID NO: 155514 - RNA, 1758 nt, Artificial Sequence; identical to SEQ ID NO: 155506
  derived and/or modified CDS sequence (opt3) from hemagglutinin__InfluenzaB__AGX21128

SEQ ID NO: 155515 - RNA, 1758 nt, Artificial Sequence
  derived and/or modified CDS sequence (opt3) from hemagglutinin__InfluenzaB__AGX21139
augaaggccaucauugugcugcucauggucguuaccagcaacgcugacagaauaugcacaggcaucacuuccucuaauucaccccacgugguaaaaacggcaacccagggggaggugaacgucacaggagugauuccucuuacuaccacaccaaccaagagucauuucgccaaucugaaagguacugaaacaaggggcaaguuguguccgaaaugccccaacuguaccgauuuagacguugcgcuggggcggccuaagugcacgggaaagaucccaagcgcucgcguguccauucuacacgagguccgacccgugacuucuggcuguuuuccuaucaugcaugaucguaccaaaauaagacaacucccaaaucugcuuagggguuacgaacacauccggcugucgacacauaacguaauuaaugccgagaacgcacccgggggaccuuauaagaucggcacuucaggcagcugcccaaauguuaccaacgggaauggauucuuugccacaauggcuugggcagugccgaaaaacgacaagaauaaaaccgccacgaaccccuugacuauugaagucccuuacaucuguacagagggugaggaucagauaaccguguggggcuuccacagugacaaugaaacucagauggcuaagcucuauggggauuccaagccacagaaauuuacaucuagcgccaacggagugaccacgcacuacgucucccaaauuggcgacuuccccaaccagaccgaggauggugggcugccucagucaggacgcaucguuguggacuauaugguacagaagaguggcaaaacaggcacuauuaccuaccaaagagggauccugcucccacagaagguguggugcgcgagcggaaggucuaaagucaucaaggguuccuuaccccugauuggcgaagcagauugucuucaugagaaauaugggggauugaauaagucaaagccguacuacacaggcgagcacgccaaagcuauagguaacugcccuaucugggugaagacuccccugaaacuagccaaugggaccaaguaucggccuccagcaaaacuccugaaggaacgcggcuuuuucggagcuauugccggcuuucuugaagggggaugggaggguaugaucgcgggcuggcauggguacacaagccacggagcccacggcguugcaguggcugccgaccugaagaguacccaggaggcuauaaacaaaauuacuaagaauuugaacucucucuccgaacuggaggucaaaaauuuacagcgacugagcggugccauggaugagcuccauaacgaaauccuugagcuggacgaaaagguggacgauuugagagcagacacgaucucgucucaaauugagcuagccguacugcucuccaaugaagggaucauuaacucagaggaugagcaucugcuugcucuggaaaggaaauugaagaagaugcucggccccagugcgguugagauaggaaauggcuguuucgaaacaaaacacaagugcaaccagaccugccuggaccggaucgcagccgggacuuuugaugcuggagaguucagcuuaccaaccuuugacucccugaauauuacagccgcaucucuaaacgaugacggucucgauaaucacaccauccugcuuuauuacagcacugccgcuucaaguuuggccgugacacugaugaucgcaauuuucgucguguauauggucucccgugacaacgugagcuguucuauaugccucuga

SEQ ID NO: 155516 - RNA, 1758 nt, Artificial Sequence; identical to SEQ ID NO: 154731
  derived and/or modified CDS sequence (opt3) from hemagglutinin__InfluenzaB__AGX21150

SEQ ID NO: 155517 - RNA, 1758 nt, Artificial Sequence; identical to SEQ ID NO: 154656
  derived and/or modified CDS sequence (opt3) from hemagglutinin__InfluenzaB__AGX21161

SEQ ID NO: 155518 - RNA, 1758 nt, Artificial Sequence; identical to SEQ ID NO: 154731
  derived and/or modified CDS sequence (opt3) from hemagglutinin__InfluenzaB__AGX21172

SEQ ID NO: 155519 - RNA, 1758 nt, Artificial Sequence; identical to SEQ ID NO: 154693
  derived and/or modified CDS sequence (opt3) from hemagglutinin__InfluenzaB__AGX21183

SEQ ID NO: 155520 - RNA, 1758 nt, Artificial Sequence; identical to SEQ ID NO: 154731
  derived and/or modified CDS sequence (opt3) from hemagglutinin__InfluenzaB__AGX21194

SEQ ID NO: 155521 - RNA, 1758 nt, Artificial Sequence
  derived and/or modified CDS sequence (opt3) from hemagglutinin__InfluenzaB__AGX21205
augaaggccaucauugugcugcucauggucguuaccagcaacgcugacagaauaugcacaggcaucacuuccucuaauucaccccacauugugaaaacggcaacccagggggaaguaaacgugacaggagucaucccucuuacuaccacaccaaccaagagucauuucgccaaucugaaagguacugaaacaaggggcaaguuguguccgaaaugcuuaaacuguaccgaucuggacguggcgcuagggcggcccaagugcacgggaaagauuccuagcgcucgcguuuccauccuccacgaggugcgaccagucacuucuggcuguuuucccauaaugcaugaucguaccaaaaucagacaacugccuaaucuucugagggguuacgaacacauucgguugucgacacauaacgugaucaaugccaagaacgcaccagggggacccuauaaaauuggcacuucaggcagcugcccuaauaucaccaacgggaauggauucuuugccacaauggcuugggcaguaccaaagaacgacaaaaauaagaccgccacgaacccgcucacuauagagguucccuacauuuguacagaaggugaggaucagaucaccguguggggcuuccacagugacaaugagacucagauggcuaagcuguauggggauuccaaaccucagaaguuuacaucuagcgccaacggagucaccacgcacuacgugucccaaauuggcgguuucccaaaccagaccgaagacgggggacugccccagucaggccgcaucguggucgauuauaugguucagaaaaguggcaagacagggacuaucaccuaccaaagagguauucucuuaccucagaaaguguggugcgcgagcggaaggucuaagguaauaaaaggcucccugccacuuaucggggaggcagacuguuugcaugaaaaguauggaggccugaauaagucaaaacccuacuacacaggugagcacgccaaggcuauugggaacugcccgaucugggugaaaacuccucuaaagcucgccaauggcaccaaauaucggcccccagcaaagcugcuuaaggagcgcggauuuuucggcgcuauagccggguuucuggaaggagguugggagggcaugauugcgggguggcauggauacacaagccacggcgcccacggugucgcaguggcugccgauuugaaaaguacccaggaagcuaucaacaagaucacuaaaaaucucaacucucuguccgaguuagaaguuaagaaucugcagcgacucagcggggccauggacgagcuucauaacgagauucuggaauuggaugagaaaguggacgaccuaagagcagauacgaucucgucucaaauugaacuggccguccuccuguccaaugagggcauaaucaacucagaagacgagcaccuucuggcuuuggagaggaagcucaagaaaaugcugggaccuagugcgguggaaauuggcaauggguguuucgagacaaagcauaaaugcaaccagaccugcuuagaucggaucgcagccggaacuuuugacgcuggugaguucagccugcccaccuuugauucccuaaauaucacagccgcaucucucaacgacgauggccuggacaaucacaccauucuuuuguauuacagcacugccgcuucaagucuggccguaacacucaugauagcaaucuucguuguguauauggucucccgugauaacgugagcuguucuauuugccuguga

SEQ ID NO: 155522 - RNA, 1758 nt, Artificial Sequence; identical to SEQ ID NO: 154693
  derived and/or modified CDS sequence (opt3) from hemagglutinin__InfluenzaB__AGX21216

SEQ ID NO: 155523 - RNA, 1758 nt, Artificial Sequence; identical to SEQ ID NO: 154656
  derived and/or modified CDS sequence (opt3) from hemagglutinin__InfluenzaB__AGX21227

SEQ ID NO: 155524 - RNA, 1758 nt, Artificial Sequence
  derived and/or modified CDS sequence (opt3) from hemagglutinin__InfluenzaB__AGX21238
augaaggccaucauugugcugcucauggucguuaccagcaacgcugacagaauaugcacaggcaucacuuccucuaauucaccccacgugguaaaaacggcaacccagggggaggugaacgucacaggagugauuccucuuacuaccacaccaaccaagagucauuucgccaaucugaaagguacugaaacaaggggcaaguuguguccgaaaugcuuaaacuguaccgaucuggacguugcgcuagggcggcccaagugcacgggaaagaucccuagcgcucgcguguccauucuccacgagguccgaccagugacuucuggcuguuuucccaucaugcaugaucguaccaaaauaagacaacugccuaaucuucugagggguuacgaacacauccgguugucgacacauaacguaauuaaugccgagaacgcaccagggggacccuauaagaucggcacuucaggcagcugcccuaauguuaccaacgggaauggauucuuugccacaauggcuugggcagugccaaagaacgacaagaauaaaaccgccacgaacccgcucacuauugaaguccccuacaucuguacagagggugaggaucagauaaccguguggggcuuccacagugacaaugaaacucagauggcuaagcuguauggggauuccaagccucagaaauuuacaucuagcgccaacggagugaccacgcacuacgucucccaaauuggcgguuucccaaaccagaccgaggacgggggacugccccagucaggccgcaucguuguggauuauaugguacagaagaguggcaaaacagggacuauuaccuaccaaagaggaauccucuuaccucagaagguguggugcgcgaaugguaggagcaaagucaucaagggcucucugccacuuauuggggaagcagacuguuugcaugagaaauauggaggccugaacaaguccaagcccuacuacacaggugagcacgccaaagcuauagggaauugcccgaucugggugaagacuccucuaaaacucgccaacggcaccaaguaucggcccccagcaaaacugcuuaaggaacgcggauuuuucggcgcuauugccggguuucuggagggagguugggaaggcaugaucgcgggguggcauggauacacaucacacggcgcccacgguguugcaguggcugccgauuugaaaagcacccaggaggcuauaaauaaaauuacuaagaaccucaauagucugucugaauuagaggucaaaaaccugcagcgacucuccggggccauggacgagcuucauaaugaaauccuggaguuggaugaaaagguggacgaccuaagagcagauacgaucagcucgcaaauugagcuggccguacuccugucuaacgaaggcaucauuaauuccgaggacgagcaccuucuggcuuuggaaaggaaacucaagaagaugcugggaccuucagcgguugagauaggcaacggguguuucgaaacaaaacauaagugcaaucagaccugcuuagaucggaucgcagccggaacuuuugacgcuggugaguucagucugcccaccuuugauagccuaaacauuacagccgcaucccucaaugacgauggccuggacaaccacaccauccuuuuguauuacucuacugccgcuagcucacuggccgugacacucaugaucgcaauuuucgucguguauaugauaagucgugauaacgucuccuguagcaucugccuguga

SEQ ID NO: 155525 - RNA, 1758 nt, Artificial Sequence; identical to SEQ ID NO: 154731
  derived and/or modified CDS sequence (opt3) from hemagglutinin__InfluenzaB__AGX21249

SEQ ID NO: 155526 - RNA, 1758 nt, Artificial Sequence
  derived and/or modified CDS sequence (opt3) from hemagglutinin__InfluenzaB__AGX21260
augaaggccaucauugugcugcucauggucguuaccagcaacgcugacagaauaugcacaggcaucacuuccucuaauucaccccacgugguaaaaacggcaacccagggggaggugaacgucacaggagugauuccucuuacuaccacaccaaccaagagucauuucgccaaucugaaagguacugaaacaaggggcaaguuguguccgaaaugcuuaaacuguaccgaucuggacguugcgcuagggcggcccaagugcacgggaaagaucccuagcgcucgcguguccauucuccacgagguccgaccagugacuucuggcuguuuucccaucaugcaugaucguaccaaaauaagacaacugccuaaucuucugagggguuacgaacacauccgguugucgacacauaacguaauuaaugccgagaacgcaccagggggacccuauaagaucggcacuucaggcagcugcccuaauguuaccaacgggaauggauucuuugccacaauggcuugggcagugcccaaaaacgacaagaauaaaaccgccacgaacccgcucacuauugaaguccccuacaucuguacagagggugaggaucagauaaccguguggggcuuccacagugacaaugaaacucagauggcuaagcuguauggggauuccaagccucagaaauuuacaucuagcgccaacggagugaccacgcacuacgucucccaaauuggcgguuucccaaaccagaccgaggacgggggacugccccagucaggccgcaucguuguggauuauaugguacagaagaguggcaaaacagggacuauuaccuaccaaagaggaauccucuuaccucagaggguguggugcgcgagcggucggucuaaggucaucaaaggcucccugccacuuauuggggaagcagacuguuugcaugagaaguauggaggccugaauaaaucaaagcccuacuacacaggugagcacgccaaggcuauagggaacugcccgaucugggugaaaacuccucuaaagcucgccaauggcaccaaauaucgcccaccagcaaagcugcuuaaagaacgaggauuuuucggcgcuauugccggguuucuggagggagguugggaaggcaugaucgcgggguggcauggauacacaagccacggcgcccacgguguugcaguggcugccgauuugaagaguacccaggaggcuauaaacaagauuacuaaaaaucucaacucucuguccgaauuagaggucaagaaucugcagagacucagcggggccauggacgagcuucauaacgaaauccuggaguuggaugaaaaaguggacgaccuaagggcagauacgaucucgucucaaauugagcuggccguacuccuguccaaugaaggcaucauuaacucagaggacgagcaccuucuggcuuuggaacggaagcucaaaaagaugcugggaccuagugcgguugagauaggcaauggguguuucgaaacaaagcauaaaugcaaccagaccugcuuagaucguaucgcagccggaacuuuugacgcuggugaguucagccugcccaccuuugauucccuaaauauuacagccgcaucucucaacgacgauggccuggacaaucacaccauccuuuuguauuacagcacugccgcuucaagucuggccgugacacucaugaucgcaauuuucgucguguauauggucucccgcgauaacgugagcuguucuauaugccuguga

SEQ ID NO: 155527 - RNA, 1758 nt, Artificial Sequence; identical to SEQ ID NO: 154656
  derived and/or modified CDS sequence (opt3) from hemagglutinin__InfluenzaB__AGX21271

SEQ ID NO: 155528 - RNA, 1758 nt, Artificial Sequence
  derived and/or modified CDS sequence (opt3) from hemagglutinin__InfluenzaB__AGX21282
augaaggccaucauugugcugcucauggucguuaccagcaacgcugacagaauaugcacaggcaucacuuccucuaauucaccccacauugugaaaacggcaacccagggggaaguaaacgugacaggagucaucccucuuacuaccaguccaacaaagagccauuucgccaaucugaaagguaccgaaacuaggggcaaguuguguccgaaaugcuuaaacuguacagaucuggacguggcgcuagggcggcccaagugcaccggaaagauuccuuccgcucgcguuucuauccuccacgaggugcgaccagucacgucgggcuguuuucccauaaugcaugaucguacuaaaaucagacaacugccuaaucuucugagggguuacgaacacauucgguugucaacccauaacgugaucaaugccaagaacgcaccagggggacccuauaaaauuggcacaagcggcaguugcccuaauaucacuaacgggaauggauucuuugccaccauggcuugggcaguaccaaagaacgacaaaaauaagacagccaccaacccgcucacgauagagguucccuacauuuguacugaaggugaggaucagaucacaguguggggcuuccacuccgacaaugagacccagauggcuaagcuguauggggauucuaaaccucagaaguuuacuagcuccgccaacggagucacaacccacuacgugucacaaauuggcgguuucccaaaccagacggaagacgggggacugccccagaguggccgcaucguggucgauuauaugguucagaaaagcggcaagaccgggacaaucacuuaccaaagagguauucucuuaccucagaaaguguggugcgcgucuggaagguccaagguaauaaaaggcucacugccacuuaucggggaggcagacuguuugcaugaaaaguauggaggccugaauaagagcaaacccuacuacaccggugagcacgccaaggcuauugggaacugcccgaucugggugaaaacaccucuaaagcucgccaauggcacuaaauaucggcccccagcaaagcugcuuaaggagcgcggauuuuucggcgcuauagccggguuucuggaaggagguugggagggcaugauugcgggguggcauggauacaccagucacggcgcccacggugucgcaguggcugccgauuugaaaucuacacaggaagcuaucaacaagaucaccaaaaaucucaacucccugagcgaguuagaaguuaagaaucugcagcgacucucgggggccauggacgagcuucauaacgagauucuggaauuggaugagaaaguggacgaccuaagagcagauacuaucucuucccaaauugaacuggccguccuccugucaaaugagggcauaaucaacagugaagacgagcaccuucuggcuuuggagaggaagcucaagaaaaugcugggaccuagcgcgguggaaauuggcaauggguguuucgagacgaagcauaaaugcaaccagacaugcuuagaucggaucgcagccggaaccuuugacgcuggugaguucucccugcccacuuuugauucucuaaauaucaccgccgcaagccucaacgacgauggccuggacaaucacacaauucuuuuguauuacucaaccgccgcuaguucccuggccguaacucucaugauagcaaucuucguuguguauauggucagccgugauaacgugucuuguucaauuugccuguga

SEQ ID NO: 155529 - RNA, 1758 nt, Artificial Sequence; identical to SEQ ID NO: 154693
  derived and/or modified CDS sequence (opt3) from hemagglutinin__InfluenzaB__AGX21293

SEQ ID NO: 155530 - RNA, 1758 nt, Artificial Sequence; identical to SEQ ID NO: 154731
  derived and/or modified CDS sequence (opt3) from hemagglutinin__InfluenzaB__AGX21304

SEQ ID NO: 155531 - RNA, 1758 nt, Artificial Sequence; identical to SEQ ID NO: 154693
  derived and/or modified CDS sequence (opt3) from hemagglutinin__InfluenzaB__AGX21315

SEQ ID NO: 155532 - RNA, 1758 nt, Artificial Sequence; identical to SEQ ID NO: 154656
  derived and/or modified CDS sequence (opt3) from hemagglutinin__InfluenzaB__AGX21326

SEQ ID NO: 155533 - RNA, 1758 nt, Artificial Sequence
  derived and/or modified CDS sequence (opt3) from hemagglutinin__InfluenzaB__AGX21337
augaaggccaucauugugcugcucauggucguuaccagcaacgcugacagaauaugcacaggcaucacuuccucuaauucaccccacgugguaaaaacggcaacccagggggaggugaacgucacaggagugauuccucuuacuaccacaccaaccaagagucauuucgccaaucugaaagguacugaaacaaggggcaaguuguguccgaaaugccccaacuguaccgauuuagacguugcgcuggggcggccuaagugcacgggaaagaucccaagcgcucgcguguccauucuacacgagguccgacccgugacuucuggcuguuuuccuaucaugcaugaucguaccaaaauaagacaacucccaaaucugcuuagggguuacgaacacauccggcugucgacacauaacguaauuaaugccgagaacgcacccgggggaccuuauaagaucggcacuucaggcagcugcccaaauguuaccaacgggaauggauucuuugccacaauggcuugggcagugccgaaaaacgacaagaauaaaaccgccacgaaccccuugacuauugaagucccuuacaucuguacagagggugaggaucagauaaccguguggggcuuccacagugacaaggaaacucagauggcuaagcucuauggggauuccaaaccacagaaguuuacaucuagcgccaauggagugaccacgcacuacgucucccaaauuggcgguuuccccaaccagaccgaggacgggggacugccucagucaggccgcaucguuguggauuauaugguacagaaaaguggcaagacagggacuauuaccuaccaaagaggaauccugcucccacagaaaguguggugcgcgagcgguaggucuaaggucaucaaaggcuccuuaccccugauuggggaagcagacugucuucaugagaaguauggaggcuugaacaagucaaaaccguacuacacaggugagcacgccaaggcuauagggaauugcccuaucugggugaaaacuccccugaagcuagccaacggcaccaaauaucggccuccagcaaagcuccugaaggaacgcggauuuuucggcgcuauugccggguuucuugagggagguugggaaggcaugaucgcgggguggcauggauacacaagccacggcgcccacgguguugcaguggcugccgaucugaaaaguacccaggaggcuauaaauaagauuacuaaaaaccuuaauucucucuccgaacuggaggucaagaacuuacagcgacugagcggggccauggacgagcuccauaaugaaauccuugagcuggaugaaaaaguggacgacuugagagcagauacgaucucgucucaaauugagcuagccguacugcucuccaacgaaggcaucauuaauucagaggacgagcaccuguuggcucuggaaaggaaguugaagaaaaugcucggacccagugcgguugagauaggcaacggguguuucgaaacaaagcauaaaugcaaucagaccugccuggaucggaucgcagccggaacuuuugacgcuggugaguucagcuuaccaaccuuugauucccugaacauuacagccgcaucucuaaaugacgauggccucgacaaccacaccauccugcuuuauuacagcacugccgcuucaaguuuggccgugacacugaugaucgcaauuuucgucguguauauggucucccgugauaaugugagcuguucuauaugccucuga

SEQ ID NO: 155534 - RNA, 1758 nt, Artificial Sequence; identical to SEQ ID NO: 154693
  derived and/or modified CDS sequence (opt3) from hemagglutinin__InfluenzaB__AGX21348

SEQ ID NO: 155535 - RNA, 1758 nt, Artificial Sequence; identical to SEQ ID NO: 154693
  derived and/or modified CDS sequence (opt3) from hemagglutinin__InfluenzaB__AGX21359

SEQ ID NO: 155536 - RNA, 1758 nt, Artificial Sequence
  derived and/or modified CDS sequence (opt3) from hemagglutinin__InfluenzaB__AGX21370
augaaggccaucauugugcugcucauggucguuaccagcaacgcugacagaauaugcacaggcaucacuuccucuaauucaccccacgugguaaaaacggcaacccagggggaggugaacgucacaggagugauuccucuuacuaccacaccaaccaagagucauuucgccaaucugaaagguacugaaacaaggggcaaguuguguccgaaaugccccaacuguaccgauuuagacguugcgcuggggcggccuaagugcaugggaaagaucccaagcgcucgcguguccauucuacacgagguccgacccgugacgucuggcuguuuuccuaucaugcaugaucguacuaaaauaagacaacucccaaaucugcuuagggguuacgaacacauccggcugucgacccauaacguaauuaaugccgagaacgcacccgggggaccuuauaagaucggcacaucaggcagcugcccaaauguuacuaacgggaauggauucuuugccaccauggcuugggcagugccgaaaaacgacaagaauaaaacagccaccaaccccuugacgauugaagucccuuacaucuguacugagggugaggaucagauaacaguguggggcuuccacagugacaaugaaacccagauggcuaagcucuauggggauuccaagccacagaaauuuacuucuagcgccaacggagugacaacccacuacgucucccaaauuggcgguuuccccaaccagacggaggacgggggacugccucagucaggccgcaucguuguggauuauaugguacagaagaguggcaaaaccgggacaauuacuuaccaaagaggaauccugcucccacagaagguguggugcgcgagcgguaggucuaaagucaucaagggcuccuuaccccugauuggggaagcagacugucuucaugagaaauauggaggcuugaauaagucaaagccguacuacaccggugagcacgccaaagcuauagggaacugcccuaucugggugaagacaccccugaaacuagccaauggcacuaaguaucggccuccagcaaaacuccugaaggaacgcggauuuuucggcgcuauugccggguuucuugagggagguugggaaggcaugaucgcgggguggcauggauacaccagccacggcgcccacgguguugcaguggcugccgaucugaagaguacacaggaggcuauaaacaaaauuaccaagaauuugaacucucucuccgaacuggaggucaaaaauuuacagcgacugagcggggccauggacgagcuccauaacgaaauccuugagcuggaugaaaagguggacgacuugagagcagauacuaucucgucucaaauugagcuagccguacugcucuccaaugaaggcaucauuaacucagaggacgagcaucugcuugcucuggaaaggaaauugaagaagaugcucggacccagugcgguugagauaggcaauggguguuucgaaacgaaacacaagugcaaccagacaugccuggaucggaucgcagccggaaccuuugacgcuggugaguucagcuuaccaacuuuugauucccugaauauuaccgccgcaucucuaaacgacgauggccucgacaaucacacaauccugcuuuauuacagcaccgccgcuucaaguuuggccgugacucugaugaucgcaauuuucgucguguauauggucucccgugauaacgugagcuguucuauaugccucuga

SEQ ID NO: 155537 - RNA, 1758 nt, Artificial Sequence
  derived and/or modified CDS sequence (opt3) from hemagglutinin__InfluenzaB__AGX21381
augaaggccaucauugugcugcucauggucguuaccagcaacgcugacagaauaugcacaggcaucacuuccucuaauucaccccacauugugaaaacggcaacccagggggagguaaacgugacaggagucaucccucuuacuaccacaccaaccaagagucauuucgccaaucugaaagguacugaaacaaggggcaaguuguguccgaaaugcuuaaacuguaccgaucuggacguggcgcuagggcggcccaagugcacgggaaagauuccuagcgcucgcguuuccauccuccacgaggugcgaccagucacuucuggcuguuuucccauaaugcaugaucguaccaaaaucagacaacugccuaaucuucugagggguuacgaacacauucgguugucgacacauaacgugaucaaugccgagaacgcaccagggggacccuauaagauuggcacuucaggcagcugcccuaauaucaccaacgggaauggauucuuugccacaauggcuugggcaguaccgaaaaacgacaagaauaaaaccgccacgaacccacucacuauagaaguucccuacauuuguacagagggugaggaucagaucaccguguggggcuuccacagugacaaugaaacucagauggcuaagcuguauggggauuccaagccucagaaauuuacaucuagcgccaacggagucaccacgcacuacauuucccaaaucggcgguuucccaaaccagaccgaggacgggggacugccccagucaggccgcaucgugguggauuauaugguccagaagaguggcaaaacagggacuauuaccuaccaaagaggaauacucuuaccucagaagguuuggugcgcgagcgguaggucuaaagugaucaagggcucccugccacuuauuggggaagcagacuguuugcaugagaaauauggaggccugaauaagucaaagcccuacuacacaggugagcacgccaaagcuaucgggaacugcccgauauggguaaagacuccucuaaaacucgccaauggcaccaaguaucggcccccagcaaaacugcuuaaggaacgcggauuuuucggcgcuauugccggguuucuggagggagguugggaaggcaugaucgcgggguggcauggauacacaagccacggcgcccacgguguggcagucgcugccgauuugaagaguacccaggaggcuaucaacaaaauuacuaagaaucucaacucucuguccgaauuagaggugaaaaaucugcagcgacucagcggggccauggacgagcuucauaacgaaauccuggaguuggaugaaaagguugacgaccuaagagcagauacgauuucgucucaaauagagcuggccgugcuccuguccaaugaaggcaucauuaacucagaggacgagcaccuucuggcuuuggaaaggaaacucaagaagaugcugggaccuagugcggucgagaucggcaauggguguuucgaaacaaaacauaagugcaaccagaccugcuuagaucggaucgcagccggaacuuuugacgcuggugaguucagccugcccaccuuugauucccuaaauauuacagccgcaucucucaacgacgauggccuggacaaucacaccauacuuuuguauuacagcacugccgcuucaagucuggccgugacacucaugaucgcaauuuucguaguuuauauggugucccgugauaacgucagcuguucuaucugccuguga

SEQ ID NO: 155538 - RNA, 1758 nt, Artificial Sequence
  derived and/or modified CDS sequence (opt3) from hemagglutinin__InfluenzaB__AGX21392
augaaggccaucauugugcugcucauggucguuaccagcaacgcugacagaauaugcacaggcaucacuuccucuaauucaccccacauugugaaaacggcaacccagggggagguaaacgugacaggagucaucccucuuacuaccacaccaaccaagagucauuucgccaaucugaaagguacugaaacaaggggcaaguuguguccgaaaugcuuaaacuguaccgaucuggacguggcgcuagggcggcccaagugcacgggaaagauuccuagcgcucgcguuuccauccuccacgaggugcgaccagucacuucuggcuguuuucccauaaugcaugaucguaccaaaaucagacaacugccuaaucuucugagggguuacgaacacauucgguugucgacacauaacgugaucaaugccgagaacgcaccagggggacccuauaagauuggcacuucaggcagcugcccuaauaucaccaacgggaauggauucuuugccacaauggcuugggcaguaccgaaaaacgacaagaauaaaaccgccacgaacccacucacuauagaaguucccuacauuuguacagagggugaggaucagaucaccguguggggcuuccacagugacaaugaagcucagauggccaagcuguauggggauuccaagccucagaaauuuacuucuagcgcgaacggagucacaacccacuacgugucccaaauuggcgguuucccaaaccagacggaggacgggggacugccccagucaggccgcaucguggucgauuauaugguucagaagaguggcaaaaccgggacaaucacuuaccaaagagguauucucuuaccucagaagguguggugcgcaagcggaaggucuaaaguaauaaagggcucccugccacuuaucggggaagccgacuguuugcaugagaaauauggaggccugaauaagucaaagcccuacuacaccggugagcacgcuaaagccauugggaacugcccgaucugggugaagacaccucuaaaacucgcaaauggcacuaaguaucggcccccagcuaaacugcuuaaggaacgcggauuuuucggcgccauagcgggguuucuggagggagguugggaaggcaugauugccggguggcauggauacaccagccacggcgcacacggugucgcuguggccgcugauuugaagaguacacaggaggccaucaacaaaaucaccaagaaucucaacucucuguccgaauuagagguuaaaaaucugcagcgacucagcggggcaauggacgagcuucauaacgaaauucuggaguuggaugaaaagguggacgaccuaagagccgauacuaucucgucucaaauugagcuggcuguccuccuguccaaugaaggcauaaucaacucagaggacgagcaccuucuggcguuggaaaggaaacucaagaagaugcugggaccuagugcaguggagauuggcaauggguguuucgaaacgaaacauaagugcaaccagacaugcuuagaucggaucgccgcuggaaccuuugacgccggugaguucagccugcccacuuuugauucccuaaauaucaccgcagccucucucaacgacgauggccuggacaaucacacaauucuuuuguauuacagcaccgcugccucaagucuggcaguaacucucaugauagcgaucuucguuguguauauggucucccgugauaacgugagcuguucuauuugccuguga

SEQ ID NO: 155539 - RNA, 1758 nt, Artificial Sequence
  derived and/or modified CDS sequence (opt3) from hemagglutinin__InfluenzaB__AGX21403
augaaggccaucauugugcugcucauggucguuaccagcaacgcugacagaauaugcacaggcaucacuuccucuaauucaccccacgugguaaaaacggcaacccagggggaggugaacgucacaggagugauuccucuuacuaccacaccaaccaagagucauuucgccaaucugaaagguacugaaacaaggggcaaguuguguccgaaaugccccaacuguaccgauuuagacguugcgcuggggcggccuaagugcacgggaaagaucccaagcgcucgcguguccauucuacacgagguccgacccgugacuucuggcuguuuuccuaucaugcaugaucguaccaaaauaagacaacucccaaaucugcuuagggguuacgaacacauccggcugucgacacauaacguaauuaaugccgagaacgcacccgggggaccuuauaagaucggcacuucaggcagcugcccaaauguuaccaacgggaauggauucuuugccacaauggcuugggcagugccgaaaaacgacaagaauaaaaccgccacgaaccccuugacuauugaagucccuuacaucuguacagagggugaggaucagauaaccguguggggcuuccacagugacaaugaaacucagauggcuaagcucuauggggauuccaagccacagaaauuuacaucuagcgccaacggagugaccacgcacuacgucucccaaauuggcgguuuccccaaccagaccgaggacgggggacugccucagucaggccgcaucguuguggauuauaugguacagaagaguggcaaaacagggacuauuaccuaccaaagaggaauccugcucccacagaagguguggugcgcgagcgguaggucuaaagucaucaagggcuccuuaccccugauuggggaagcagacugucuucaugagaaauauggaggcuugaauaagucaaagccguacuacacaggugagcacgccaaagcuauagggaacugcccuaucugggugaagacuccccugaaacuagccaauggcaccaaguaucggccuccagcaaaacuccugaaggaacgcggauuuuucggcgcuauugccggguuucuugagggagguugggaaggcaugaucgcgggguggcauggauacacaagccacggcgcccacgguguugcaguggcugccgaucugaagaguacccaggaggcuauaaacaaaauuacuaagaauuugaacucucucuccgaacuggaggucaaaaauuuacagcgacugagcggggccauggacgagcuccauaacgaaauccuugagcuggaugaaaagguggacgacuugagagcagauacgaucucgucucaaauugagcuagccguacugcucuccaaugaaggcaucauuaacucagaggacgagcaucugcuugcucuggaaaggaaauugaagaagaugcucggacccagugcgguugagauaggcaauggguguuucgaaacaaaacacaagugcaaccagaccugccugaaucggaucgcagccggaacuuuugaugcuggugaguucagcuuaccaaccuuugacucccugaacauuacagccgcaucucuaaaugaugacggccucgauaaccacaccauccugcuuuauuacagcacugccgcuucaaguuuggccgugacacugaugaucgcaauuuucgucguguauauggucucccgugacaacgugagcuguucuauaugccucuga

SEQ ID NO: 155540 - RNA, 1758 nt, Artificial Sequence
  derived and/or modified CDS sequence (opt3) from hemagglutinin__InfluenzaB__AGX21414
augaaggccaucauugugcugcucauggucguuaccagcaacgcugacagaauaugcacaggcaucacuuccucuaauucaccccacgugguaaaaacggcaacccagggggaggugaacgucacaggagugauuccucuuacuaccacaccaaccaagagucauuucgccaaucugaaagguacugaaacaaggggcaaguuguguccgaaaugccccaacuguaccgauuuagacguugcgcuggggcggccuaagugcacgggaaagaucccaagcgcucgcguguccauucuacacgagguccgacccgugacuucuggcuguuuuccuaucaugcaugaucguaccaaaauaagacaacucccaaaucugcuuagggguuacgaacacauccggcugucgacacauaacguaauuaaugccgagaacgcacccgggggaccuuauaagaucggcacuucaggcagcugcccaaauguuaccaacgggaauggauucuuugccacaauggcuugggcagugccgaaaaacgacaagaauaaaaccgccacggaucccuugacuauugaagucccuuacaucuguacagagggugaggaccagauaaccguguggggcuuccacagugauaacgaaacucagauggcuaagcucuauggggacuccaagccacagaaauuuacaucuagcuccaauggagugaccacgcacuacgucucacaaauuggcgguuuccccaaccagaccgaggaugggggacugccucagaguggccgcaucguuguggacuauaugguacagaaguccggcaaaacagggacuauuaccuaccaaagaggaauccugcucccacagaagguguggugcgccucugguagguccaaagucaucaagggcucauuaccccugauuggggaagcggauugucuucaugagaaauauggaggcuugaacaagagcaagccguacuacacaggugagcacgcaaaagccauagggaauugcccuaucugggugaagacuccccugaaacuagcuaacggcaccaaguaucggccuccagccaaacuccugaaggaacgcggauuuuucggcgcaauugcuggguuucuugagggagguugggaaggcaugaucgccggguggcauggauacacaagucacggcgcgcacgguguugccguggcagcugaccugaagucuacccaggaggccauaaauaaaauuacuaagaacuugaauagccucagcgaacuggaggucaaaaacuuacagcgacugucgggggcuauggaugagcuccauaaugaaauccuugagcuggacgaaaagguggacgauuugagagccgacacgaucucuucccaaauugagcuagcaguacugcucucaaacgaaggcaucauuaauagugaggaugagcaucugcuugcccuggaaaggaaauugaagaagaugcucggacccagcgcuguugagauaggcaacggguguuucgaaacaaaacacaagugcaaucagaccugccuggaccggaucgcggcaggaacuuuugaugccggugaguucuccuuaccaaccuuugacucucugaacauuacagcugccagccuaaaugaugacggccucgauaaccacaccauccugcuuuauuacucaacugcagccaguuccuuggcugugacacugaugaucgccauuuucgucguguauauggucagccgugacaaugugucuuguucaauaugccucuga

SEQ ID NO: 155541 - RNA, 1758 nt, Artificial Sequence; identical to SEQ ID NO: 154656
  derived and/or modified CDS sequence (opt3) from hemagglutinin__InfluenzaB__AGX21425

SEQ ID NO: 155542 - RNA, 1758 nt, Artificial Sequence
  derived and/or modified CDS sequence (opt3) from hemagglutinin__InfluenzaB__AGX21436
augaaggccaucauugugcugcucauggucguuaccagcaacgcugacagaauaugcacaggcaucacuuccucuaauucaccccacauugugaaaacggcaacccagggggagguaaacgugacaggagucaucccucuuacuaccacaccaaccaagagucauuucgccaaucugaaagguacugaaacaaggggcaaguuguguccgaaaugcuuaaacuguaccgaucuggacguggcgcuagggcggcccaagugcacgggaaagauuccuagcgcucgcguuuccauccuccacgaggugcgaccagucacuucuggcuguuuucccauaaugcaugaucguaccaaaaucagacaacugccuaaucuucugagggguuacgaacacauucgguugucgacacauaacgugaucaaugccgagaacgcaccagggggacccuauaagauuggcacuucaggcagcugcccuaauaucaccaacgggaauggauucuuugccacaauggcuugggcaguaccgaaaaacgacaagaauaaaaccgccacgaacccacucacuauagaaguucccuacauuuguacagagggugaggaucagaucaccguguggggcuuccacagugacaaugaaacucagauggcuaagcuguauggggauuccaagccucagaaauuuacaucuagcgccaacggagucaccacgcacuacgugucccaaauuggcgguuucccaaaccagaccgaggacgggggacugccccagucaggccgcaucguggucgauuauaugguucagaagaguggcaaaacagggacuaucaccuaccaaagagguauucucuuaccucagaagguguggugcgcgagcggaaggucuaaaguaauaaagggcucccugccacuuaucggggaagcagacuguuugcaugagaaauauggaggccugaauaagucaaagcccuacuacacaggugagcacgccaaagcuauugggaacugcccgaucugggugaagacuccucuaaaacucgccaauggcaccaaguaucggcccccagcaaaacugcuuaaggaacgcggauuuuucggcgcuauagccggguuucuggagggagguugggaaggcaugauugcgggguggcauggauacacaagccacggcgcccacggugucgcaguggcugccgauuugaagaguacccaggaggcuaucaacaaaaucacuaagaaucucaacucucuguccgaauuagagguuaaaaaucugcagcgacucagcggggccauggacgagcuucauaacgaaauucuggaguuggaugaaaagguggacgaccuaagagcagauacgaucucgucucaaauugagcuggccguccuccuguccaaugaaggcauaaucaacucagaggacgagcaccuucuggcuuuggaaaggaaacucaagaagaugcugggaccuagugcgguggagauuggcaauggguguuucgaaacaaaacauaagugcaaccagaccugcuuagaucggaucgcagccggaacuuuugacgcuggugaguucagccugcccaccuuugauucccuaaauaucacagccgcaucucucaacgacgauggccuggacaaucacaccauucuuuuguauuacagcacuguagccucaagucuggcuguuacacucaugauagccaucuucguggucuauauggugucccgugauaacgucagcuguucuauuugccuguga

SEQ ID NO: 155543 - RNA, 1758 nt, Artificial Sequence; identical to SEQ ID NO: 154731
  derived and/or modified CDS sequence (opt3) from hemagglutinin__InfluenzaB__AGX21447

SEQ ID NO: 155544 - RNA, 1758 nt, Artificial Sequence; identical to SEQ ID NO: 154656
  derived and/or modified CDS sequence (opt3) from hemagglutinin__InfluenzaB__AGX21458

SEQ ID NO: 155545 - RNA, 1758 nt, Artificial Sequence; identical to SEQ ID NO: 154656
  derived and/or modified CDS sequence (opt3) from hemagglutinin__InfluenzaB__AGX21469

SEQ ID NO: 155546 - RNA, 1758 nt, Artificial Sequence
  derived and/or modified CDS sequence (opt3) from hemagglutinin__InfluenzaB__AGX21480
augaaggccaucauugugcugcucauggucguuaccagcaacgcugacagaauaugcacaggcaucacuuccucuaauucaccccacgugguaaaaacggcaacccagggggaggugaacgucacaggagugauuccucuuacuaccacaccaaccaagagucauuucgccaaucugaaagguacugaaacaaggggcaaguuguguccgaaaugcuuaaacuguaccgaucuggacguugcgcuagggcggcccaagugcacgggaaagaucccuagcgcucgcguguccauucuccacgagguccgaccagugacuucuggcuguuuucccaucaugcaugaucguaccaaaauaagacaacugccuaaucuucugagggguuacgaacacauccgguugucgacacauaacguaauuaaugccgagaacgcaccagggggacccuauaagaucggcacuucaggcagcugcccuaauguuaccaacgggaauggauucuuugccacaauggcuugggcagugccgaaaaacgacaagaauaaaaccgccacgaacccacucacuauugaaguccccuacaucuguacagagggugaggaucagauaaccguguggggcuuccacagugacaaugaaacucagauggcuaagcuguauggggauuccaagccucagaaauuuacaucuagcgccaacggagugaccacgcacuacgucucccaaauuggcgguuucccaaaccagaccgaggacgggggacugccccagucaggccgcaucguuguggauuauaugguacagaagaguggcaaaacagggacuauuaccuaccaaagaggaauccucuuaccucagaagguguggugcgcgagcgguaggucuaaagucaucaagggcucccugccacuuauuggggaagcagacuguuugcaugagaaauauggaggccugaauaagucaaagcccuacuacacaggugagcacgccaaagcuauagggaacugcccgaucugggugaagacuccucuaaaacucgccaauggcaccaaguaucggcccccagcaaaacugcuuaaggaacgcggauuuuucggcgcuauugccggguuucuggagggagguugggaaggcaugaucgcgggguggcauggauacacaagccacggcgcccacgguguugcaguggcugccgauuugaagaguacccaggaggcuauaaacaaaauuacuaagaaucucaacucucuguccgaauuagaggucaaaaaucugcagcgacucagcggggccauggacgagcuucauaacgaaauccuggaguuggaugaaaagguggacgaccuaagagcagauacgaucucgucucaaauugagcuggccguacuccuguccaaugaaggcaucauuaacucagaggacgagcaccuucuggcuuuggaaaggaaacucaagaagaugcugggaccuagugcgguugagauaggcaauggguguuucgaaacaaaacauaagugcaaccagaccugcuuagaucggaucgcagccggaacuuuugacgcuggugaguucagccugcccaccuuugauucccuaaauauuacagccgcaucucucaacgaagacggccuggauaaucacaccauccuuuuguauuacagcacugccgcuucaagucuggccgugacacucaugaucgcaauuuucgucguguauauggucucccgugacaacgugagcuguucuauaugccuguga

SEQ ID NO: 155547 - RNA, 1758 nt, Artificial Sequence; identical to SEQ ID NO: 154731
  derived and/or modified CDS sequence (opt3) from hemagglutinin__InfluenzaB__AGX21491

SEQ ID NO: 155548 - RNA, 1758 nt, Artificial Sequence; identical to SEQ ID NO: 154731
  derived and/or modified CDS sequence (opt3) from hemagglutinin__InfluenzaB__AGX21502

SEQ ID NO: 155549 - RNA, 1758 nt, Artificial Sequence; identical to SEQ ID NO: 154656
  derived and/or modified CDS sequence (opt3) from hemagglutinin__InfluenzaB__AGX21513

SEQ ID NO: 155550 - RNA, 1758 nt, Artificial Sequence; identical to SEQ ID NO: 154693
  derived and/or modified CDS sequence (opt3) from hemagglutinin__InfluenzaB__AGX21524

SEQ ID NO: 155551 - RNA, 1758 nt, Artificial Sequence
  derived and/or modified CDS sequence (opt3) from hemagglutinin__InfluenzaB__AGX21535
augaaggccaucauugugcugcucauggucguuaccagcaacgcugacagaauaugcacaggcaucacuuccucuaauucaccccacauugugaaaacggcaacccagggggagguaaacgugacaggagucaucccucuuacuaccacaccaaccaagagucauuucgccaaucugaaagguacugaaacaaggggcaaguuguguccgaaaugcuuaaacuguaccgaucuggacguggcgcuagggcggcccaagugcacgggaaagauuccuagcgcucgcguuuccauccuccacgaggugcgaccagucacuucuggcuguuuucccauaaugcaugaucguaccaaaaucagacaacugccuaaucuucugagggguuacgaacacauucgguugucgacacauaacgugaucaaugccgagaacgcaccagggggacccuauaagauuggcacuucaggcagcugcccuaauaucaccaacgggaauggauucuuugccacaauggcuugggcaguaccaaagaacgacaagaauaaaaccgccacgaacccgcucacuauagaaguucccuacauuuguacagagggugaggaucagaucaccguguggggcuuccacagugacuccgaaacucagauggcuaagcuguauggggauucuaagccucagaaauuuacaagcuccgccaauggagucaccacgcacuacgugucacaaauuggcgguuucccaaaccagaccgaggacgggggacugccccagaguggccgcaucguggucgauuauaugguucagaaaagcggcaaaacagggacuaucaccuaccaaagagguauucucuuaccucagaagguguggugcgcgucuggaagguccaaaguaauaaagggcucacugccacuuaucggggaagcagacuguuugcaugagaaauauggaggccugaacaagagcaagcccuacuacacaggugagcacgccaaagcuauugggaauugcccgaucugggugaagacuccucuaaaacucgccaacggcaccaaguaucggcccccagcaaaacugcuuaaggaacgcggauuuuucggcgcuauagccggguuucuggagggagguugggaaggcaugauugcgggguggcauggauacacaagucacggcgcccacggugucgcaguggcugccgauuugaagucuacccaggaggcuaucaauaaaaucacuaagaaccucaauucccugagcgaauuagagguuaaaaaccugcagcgacucucgggggccauggacgagcuucauaaugaaauucuggaguuggaugaaaagguggacgaccuaagagcagauacgaucucuucccaaauugagcuggccguccuccugucaaacgaaggcauaaucaauagugaggacgagcaccuucuggcuuuggaaaggaaacucaagaagaugcugggaccuagcgcgguggagauuggcaacggguguuucgaaacaaaacauaagugcaaucagaccugcuuagaucggaucgcagccggaacuuuugacgcuggugaguucucccugcccaccuuugauucucuaaacaucacagccgcaagccucaaugacgauggccuggacaaccacaccauucuuuuguauuacucaacugccgcuaguucccuggccguaacacucaugauagcaaucuucguuguguauauggucagccgugauaaugugucuuguucaauuugccuguga

SEQ ID NO: 155552 - RNA, 1758 nt, Artificial Sequence; identical to SEQ ID NO: 154693
  derived and/or modified CDS sequence (opt3) from hemagglutinin__InfluenzaB__AGX21546

SEQ ID NO: 155553 - RNA, 1758 nt, Artificial Sequence
  derived and/or modified CDS sequence (opt3) from hemagglutinin__InfluenzaB__AGX21557
augaaggccaucauugugcugcucauggucguuaccagcaacgcugacagaauaugcacaggcaucacuuccucuaauucaccccacgugguaaaaacggcaacccagggggaggugaacgucacaggagugauuacucuuaccacaaccccuacuaagagucauuucgccaaucugaaagguacagaaaccaggggcaaguuguguccaaaaugcuuaaacuguacggaucuggacguugcgcuagggcggccgaagugcacuggaaagauccccagcgcucgcguguccauucuccacgagguccgaccugugaccucuggcuguuuuccaaucaugcaugaucguacaaaaauaagacaacugcccaaucuucugagggguuacgaacacauccgguugucgacucauaacguaauuaaugccgagaacgcaccugggggaccauauaagaucggcaccucaggcagcugccccaauguuacaaacgggaauggauucuuugccaccauggcuugggcagugccuaaaaacgacaagaauaaaacggccacuaacccacucacaauugaagucccguacaucuguaccgagggugaggaucagauaacuguguggggcuuccacagugacaaugaaacacagauggcuaagcuguauggggauuccaagccccagaaauuuaccucuagcgccaacggagugacgacccacuacgucucccaaauuggcgguuucccuaaccagacagaggacgggggacugccacagucaggccgcaucguuguggauuauaugguacagaagaguggcaaaacugggaccauuacauaccaaagaggaauccucuuaccccagaagguguggugcgcgagcgguaggucuaaagucaucaagggcucccugccucuuauuggggaagcagacuguuugcaugagaaauauggaggccugaauaagucaaagccauacuacacuggugagcacgccaaagcuauagggaacugccccaucugggugaagaccccgcuaaaacucgccaauggcacaaaguaucggccucccgcaaaacugcuuaaggaacgcggauuuuucggcgcuauugccggguuucuggagggagguugggaaggcaugaucgcgggguggcauggauacaccagccacggcgcccacgguguugcaguggcugccgauuugaagaguacucaggaggcuauaaacaaaauuacgaagaaucucaacucucuguccgaauuagaggucaaaaaucugcagcgacucagcggggccauggacgagcuucauaacgaaauccuggaguuggaugaaaagguggacgaccuaagagcagauacaaucucgucucaaauugagcuggccguacuccuguccaaugaaggcaucauuaacucagaggacgagcaccuucuggcuuuggaaaggaaacucaagaagaugcugggaccaagugcgguugagauaggcaauggguguuucgaaaccaaacauaagugcaaccagacuugcuuagaucggaucgcagccggaaccuuugacgcuggugaguucagccugccuacauuugauucccuaaauauuaccgccgcaucucucaacgacgauggccuggacaaucacacuauccuuuuguauuacagcacagccgcuucaagucuggccgugacgcucaugaucgcaauuuucgucguguauauggucucccgugauaacgugagcuguucuauaugccuguga

SEQ ID NO: 155554 - RNA, 1758 nt, Artificial Sequence
  derived and/or modified CDS sequence (opt3) from hemagglutinin__InfluenzaB__AGX21568
augaaggccaucauugugcugcucauggucguuaccagcaacgcugacagaauaugcacaggcaucacuuccucuaauucaccccacgugguaaaaacggcaacccagggggaggugaacgucacaggagugauuccucuuacuaccacaccaaccaagagucauuucgccaaucugaaagguacugaaacaaggggcaaguuguguccgaaaugcuuaaacuguaccgaucuggacguugcgcuagggcggcccaagugcacgggaaagaucccuagcgcucgcguguccauucuccacgagguccgaccagugacuucuggcuguuuucccaugaugcaugaucguaccaaaaucagacaacugccuaaucuucugagggguuacgaacacauacgguugucgacacauaacguaaucaaugccgagaacgcaccagggggacccuauaagauuggcacuucaggcagcugcccuaauguuaccaacgggaauggauucuuugccacaauggcuugggcagugccgaaaaacgacaagaauaaaaccgccacgaacccacucacuaucgaaguccccuacauuuguacagagggugaggaucagaucaccguguggggcuuccacagugacaaugaaacucagauggcuaagcuguauggggauuccaagccucagaaauuuacaucuagcgccaacggagugaccacgcacuacgucucccaaauaggcgguuucccaaaccagaccgaggacgggggacugccccagucaggccgcauuguuguggauuauaugguacagaagaguggcaaaacagggacuaucaccuaccaaagagguauucucuuaccucagaagguguggugcgcgagcggaaggucuaaagucaucaagggcucccugccacuuaucggggaagcagacuguuugcaugagaaauauggaggccugaauaagucaaagcccuacuacacaggugagcacgccaaagcuauugggaacugcccgauaugggugaagacuccucuaaaacucgccaauggcaccaaguaucggcccccagcaaaacugcuuaaggaacgcggauuuuucggcgcuaucgccggguuucuggagggagguugggaaggcaugauugcgggguggcauggauacacaagccacggcgcccacgguguugcaguggcugccgauuugaagaguacccaggaggcuaucaacaaaauaacuaagaaucucaacucucuguccgaauuagaggucaaaaaucugcagcgacucagcggggccauggacgagcuucauaacgaaauucuggaguuggaugaaaagguggacgaccuaagagcagauacgaucucgucucaaaucgagcuggccguacuccuguccaaugaaggcauuaucaacucagaggacgagcaccuucuggcuuuggaaaggaaacucaagaagaugcugggaccuagugcgguugagauuggcaauggguguuucgaaacaaaacauaagugcaaccagaccugcuuagaucggauagcagccggaacuuuugacgcuggugaguucagccugcccaccuuugauucccuaaauaucacagccgcaucucucaacgacgauggccuggacaaucacaccauucuuuuguauuacagcacugccgcuucaagucuggccgugacacucaugaucgcaaucuucgucguguauauggucucccgugauaacgugagcuguucuauuugccuguga

SEQ ID NO: 155555 - RNA, 1758 nt, Artificial Sequence; identical to SEQ ID NO: 154656
  derived and/or modified CDS sequence (opt3) from hemagglutinin__InfluenzaB__AGX21579

SEQ ID NO: 155556 - RNA, 1758 nt, Artificial Sequence; identical to SEQ ID NO: 154693
  derived and/or modified CDS sequence (opt3) from hemagglutinin__InfluenzaB__AGX21590

SEQ ID NO: 155557 - RNA, 1758 nt, Artificial Sequence; identical to SEQ ID NO: 155506
  derived and/or modified CDS sequence (opt3) from hemagglutinin__InfluenzaB__AGX21601

SEQ ID NO: 155558 - RNA, 1758 nt, Artificial Sequence; identical to SEQ ID NO: 154693
  derived and/or modified CDS sequence (opt3) from hemagglutinin__InfluenzaB__AGX21611

SEQ ID NO: 155559 - RNA, 1758 nt, Artificial Sequence; identical to SEQ ID NO: 155037
  derived and/or modified CDS sequence (opt3) from hemagglutinin__InfluenzaB__AGX21622

SEQ ID NO: 155560 - RNA, 1758 nt, Artificial Sequence
  derived and/or modified CDS sequence (opt3) from hemagglutinin__InfluenzaB__AGX21633
augaaggccaucauugugcugcucauggucguuaccagcaacgcugacagaauaugcacaggcaucacuuccucuaauucaccccacauugugaaaacggcaacccagggggagguaaacgugacaggagucaucccucuuacuaccacaccaaccaagagucauuucgccaaucugaaagguacugaaacaaggggcaaguuguguccgaaaugcuuaaacuguaccgaucuggacguggcgcuagggcggcccaagugcacgggaaagauuccuagcgcucgcguuuccauccuccacgaggugcgaccagucacuucuggcuguuuucccauaaugcaugaucguaccaaaaucagacaacugccuaaucuucugagggguuacgaacacauucgguugucgacacauaacgugaucaaugccgagaacgcaccagggggacccuauaagauuggcacuucaggcagcugcccuaauaucaccaacgggaauggauucuuugccacaauggcuugggcaguaccgaaaaacgacaagaauaaaaccgccacgaacccacucacuauagaaguucccuacauuuguacagagggugaggaucagaucaccguguggggcuuccacagugacaaugaaacucagauggcuaagcuguauggggauuccaagccucagaaauuuacaucuagcgccaacggagucaccacgcacuacgugucccaaauuggcgguuucccaaaccagaccgaggacgggggacugccccagucaggccgcaucguggucgauuauaugguucagaagaguggcaaaacagggacuaucaccuaccaaagagguauucucuuaccucagaagguguggugcgcgagcggaaggucuaaaguaauaaagggcucccugccacuuaucggggaagcagacuguuugcaugagaaauauggaggccugaauaagucaaagcccuacuacacaggugagcacgccaaagcuauugggaacugcccgaucugggugaagacuccucuaaaacucgccaauggcaccaaguaucggcccccagcacgccugcuuaaagaacgaggauuuuucggcgcuauagccggguuucuggagggagguugggaaggcaugauugcgggguggcauggauacacaagccacggcgcccacggugucgcaguggcugccgauuugaagaguacccaggaggcuaucaacaagaucacuaaaaaucucaacucucuguccgaauuagagguuaagaaucugcagagacucagcggggccauggacgagcuucauaacgaaauucuggaguuggaugaaaaaguggacgaccuaagggcagauacgaucucgucucaaauugagcuggccguccuccuguccaaugaaggcauaaucaacucagaggacgagcaccuucuggcuuuggaacggaagcucaaaaagaugcugggaccuagugcgguggagauuggcaauggguguuucgaaacaaagcauaaaugcaaccagaccugcuuagaucguaucgcagccggaacuuuugacgcuggugaguucagccugcccaccuuugauucccuaaauaucacagccgcaucucucaacgacgauggccuggacaaucacaccauucuuuuguauuacagcacugccgcuucaagucuggccguaacacucaugauagcaaucuucguuguguauauggucucccgcgauaacgugagcuguucuauuugccuguga

SEQ ID NO: 155561 - RNA, 1758 nt, Artificial Sequence; identical to SEQ ID NO: 154731
  derived and/or modified CDS sequence (opt3) from hemagglutinin__InfluenzaB__AGX21644

SEQ ID NO: 155562 - RNA, 1758 nt, Artificial Sequence; identical to SEQ ID NO: 154656
  derived and/or modified CDS sequence (opt3) from hemagglutinin__InfluenzaB__AGX21655

SEQ ID NO: 155563 - RNA, 1758 nt, Artificial Sequence
  derived and/or modified CDS sequence (opt3) from hemagglutinin__InfluenzaB__AGX21666
augaaggccaucauugugcugcucauggucguuaccagcaacgcugacagaauaugcacaggcaucacuuccucuaauucaccccacgugguaaaaacggcaacccagggggaggugaacgucacaggagugauuccucuuacuaccacaccaaccaagagucauuucgccaaucugaaagguacugaaacaaggggcaaguuguguccgaaaugccccaacuguaccgauuuagacguugcgcuggggcggccuaagugcacgggaaagaucccaagcgcucgcguguccauucuacacgagguccgacccgugacuucuggcuguuuuccuaucaugcaugaucguaccaaaauaagacaacucccaaaucugcuuagggguuacgaacacauccggcugucgacacauaacguaauuaaugccgagaacgcacccgggggaccuuauaagaucggcacuucaggcagcugcccaaauguuaccaacgggaauggauucuuugccacaauggcuugggcagugccgaaaaacgacaagaauaaaaccgccacgaaccccuugacuauugaagucccuuacaucuguacagagggugaggaucagauaaccguguggggcuuccacagugacaaugaaacucagauggcuaagcucuauggggauuccaagccacagaaauuuacaucuagcgccaacggagugaccacgcacuacgucucccaaauuggcgguuuccccaaccagaccgaggacgggggacugccucagucaggccgcaucguuguggauuauaugguacagaagaguggcaaaacagggacuauuaccuaccaaagaggaauccugcucccacagaagguguggugcgcgagcgguaggucuaaagucaucaagggcuccuuaccccugauuggggaagcagacugucuucaugagaaauauggaggcuugaauaagucaaagccguacuacacaggugagcacgccaaagcuauagggaacugcccuaucugggugaagacuccccugaaacuagccaauggcaccaaguaucggccuccagcaaaacuccugaaggaacgcggauuuuucggcgcuauugccggguuucuugagggagguugggaaggcaugaucgcgggguggcauggauacacaagccacggcgcccacgguguugcaguggcugccgaucugaagaguacccaggaggcuauaaacaaaauuacuaagaauuugaacucucucuccgaacuggaggucaaaaauuuacagcgacugagcggggccauggacgagcuccauaacgaaauccuugagcuggaugaaaagguggacgacuugagagcagauacgaucucgucucaaauugagcuagccguacugcucuccaaugaaggcaucauuaacucagaggacgagcaucugcuugcucuggaaaggaaauugaagaagaugcucggacccagugcgguugagauaggcaauggguguuucgaaacaaaacacaagugcaaccagaccugccuggauaaaaucgcagccggaacuuuugacgcuggugaguucagcuuaccaaccuuugauucccugaauauuacagccgcaucucuaaacgacgauggccucgacaaucacaccauccugcuuuauuacagcacugccgcuucaaguuuggccgugacacugaugaucgcaauuuucgucguguauauggucucccgggauaacgugagcuguucuauaugccucuga

SEQ ID NO: 155564 - RNA, 1758 nt, Artificial Sequence; identical to SEQ ID NO: 154731
  derived and/or modified CDS sequence (opt3) from hemagglutinin__InfluenzaB__AGX21677

SEQ ID NO: 155565 - RNA, 1758 nt, Artificial Sequence; identical to SEQ ID NO: 154656
  derived and/or modified CDS sequence (opt3) from hemagglutinin__InfluenzaB__AGX21688

SEQ ID NO: 155566 - RNA, 1758 nt, Artificial Sequence
  derived and/or modified CDS sequence (opt3) from hemagglutinin__InfluenzaB__AGX21699
augaaggccaucauugugcugcucauggucguuaccagcaacgcugacagaauaugcacaggcaucacuuccucuaauucaccccacgugguaaaaacggcaacccagggggaggugaacgucacaggagugauuccucuuacuaccacaccaaccaagagucauuucgccaaucugaaagguacugaaacaaggggcaaguuguguccgaaaugcuuaaacuguaccgaucuggacguugcgcuagggcggcccaagugcacgggaaagaucccuagcgcucgcguguccauucuccacgagguccgaccagugacuucuggcuguuuucccaucaugcaugaucguaccaaaauaagacaacugccuaaucuucugagggguuacgaacacauccgguugucgacacauaacguaauuaaugccgagaacgcaccagggggacccuauaagaucggcacuucaggcagcugcccuaauguuaccaacgggaauggauucuuugccacaauggcuugggcagugccgaaaaacgacaagaauaaaaccgccacgaacccacucacuauugaaguccccuacaucuguacagagggugaggaucagauaaccguguggggcuuccacagugacaaugaaacucagauggcuaagcuguauggggauuccaagccucagaaauuuacaucuagcgccaacggagugaccacgcacuacgucucccaaauuggcgguuucccaaaccagaccgaggacgggggacugccccagucaggccgcaucguuguggauuauaugguacagaagaguggcaaaacagggacuauuaccuaccaaagaggaauccucuuaccucagaagguguggugcgcgagcgguaggucuaaagucaucaagggcucccugccacuuauuggggaagcagacuguuugcaugagaaauauggaggccugaauaagucaaagcccuacuacacaggugagcacgccaaagcuauagggaacugcccgaucugggugaagacuccucuaaaucucgccaacggcaccaaauaucggcccccagcaaagcugcuuaaagaacgcggauuuuucggcgcuauugccggguuucuggagggagguugggaaggcaugaucgcgggguggcauggauacacaagccacggcgcccacgguguugcaguggcugccgauuugaagaguacccaggaggcuauaaauaagauuacuaaaaaccucaauucucuguccgaauuagaggucaagaaccugcagcgacucagcggggccauggacgagcuucauaaugaaauccuggaguuggaugaaaaaguggacgaccuaagagcagauacgaucucgucucaaauugagcuggccguacuccuguccaacgaaggcaucauuaauucagaggacgagcaccuucuggcuuuggaaaggaagcucaaaaagaugcugggaccuagugcgguugagauaggcaacggguguuucgaaacaaagcauaaaugcaaucagaccugcuuagaucggaucgcagccggaacuuuugacgcuggugaguucagccugcccaccuuugauucccuaaacauuacagccgcaucucucagcgacgauggccuggacaaucacaccauccuuuuguauuacucaacugccgcuaguucccuggccgugacacucaugaucgcaauuuucgucguguauauggucagccgugauaacgugucuuguucaauaugccuguga

SEQ ID NO: 155567 - RNA, 1758 nt, Artificial Sequence; identical to SEQ ID NO: 155506
  derived and/or modified CDS sequence (opt3) from hemagglutinin__InfluenzaB__AGX21710

SEQ ID NO: 155568 - RNA, 1758 nt, Artificial Sequence; identical to SEQ ID NO: 154731
  derived and/or modified CDS sequence (opt3) from hemagglutinin__InfluenzaB__AGX21721

SEQ ID NO: 155569 - RNA, 1755 nt, Artificial Sequence
  derived and/or modified CDS sequence (opt3) from hemagglutinin__InfluenzaB__AGX21732
augaaggccaucauugugcugcucauggucguuaccagcaacgcugacagaauaugcacaggcaucacuuccucuaauucaccccacgugguaaaaacggcaacccagggggaggugaacgucacaggagccauuccucuuacuaccacaccaaccaagagucauuucgcgaaucugaaagguacuaagacaaggggcaaauuguguccgaccugcuuaaacuguacggaucuggacguggcucuagggggacccaugugcguuggcaucacuccuagcgccaaggcauccauucuccacgaagugcggccagucaccucugguuguuuucccaucaugcaugaucgcacaaagauacgacaacugccuaaucuucugcguggguacgagaaaaucagauugucggcccagaacgugauuaaugcugaaaaggcaccaggaggccccuauaaacucggcacuucagggagcugcccuaacgccaccaguaaguccggauucuuugcuacaauggccugggcgguaccaagggacgauaauaaaaccgcaacgaacccgcugacuguugaggugccccacaucugugccaaugaagaggaccagauuacagucugggguuuccauucugauaacaagacccagaugaagaaucuguacggcgacagcaacccucaaaaauuuacuuccucagcuaaugggaucacaacccacuaugugagucagauaggaggcuucccagaucagacggaggacggugggcucccccagagcggacggauuguggucgauuacaugguucaaaagccuggcaaaaccggcacaaucguguaucagcgcgggauuuuacugccacagaagguauggugcgccucuggaagauccaaagugaucaaggguucacuucccuugaucggcgaagcagacugucugcacgagaaauacgggggacuaaacaagagcaagccguauuacacuggcgaacaugcuaaagccauugguaacugcccuauaugggucaagacuccccucaaacuggcgaaugggacaaaguacaggccuccagccaaacuucugaaggagcggggcuuuuucggagcaaucgcuggcuuuuuggaagggggaugggaagguaugauugccggcuggcacggguauaccagucauggagcucacggcguggccguugcagccgaucucaagucuacccaggaggcuaucaacaaaauaacaaagaaucugaacuccuuaagcgaacuggaggugaaaaaucuccaacgccuuucgggugcgauggacgaacugcacaacgagauuuuggagcuagacgaaaaggucgaugaccugcgagcagauaccaucucuucccagaucgagcucgccgugcugcuuucaaaugaagggauuaucaacagugaggacgaacaucuguuggcucucgagagaaaacugaagaagauguuaggccccagcgccguagauauuggaaauggcuguuucgagacuaaacacaagugcaaccagacgugccuggacaggauagcagccgggacauuuaaugcuggagaguucucccuaccaaccuuugauucucucaacaucacugccgcaagccugaaugacgauggucuugacaaccauaccauuuugcuguacuauucaacagcggcuaguucccucgccguuacccugaugaucgcaaucuucauuguguacaugauaagccgggauaaugucucuuguucaaucugccuuuga

SEQ ID NO: 155570 - RNA, 1755 nt, Artificial Sequence
  derived and/or modified CDS sequence (opt3) from hemagglutinin__InfluenzaB__AGX21743
augaaggccaucauugugcugcucauggucguuaccagcaacgcugacagaauaugcacaggcaucacuuccucuaauucaccccacgugguaaaaacggcaacccagggggaggugaacgucacaggagugauuccucuuacuaccacaccaaccaagagucauuucgccaaucugaaagguacuaggacacggggcaaguuguguccggauugcuuaaacuguaccgaccuggauguugcgcuagggcgccccaugugcgugggaacgacuccuagcgcuaaagccuccauccuccacgaaguccgaccagugaccucuggcuguuuucccauuaugcaugaccguacaaagaucagacaacugccuaaucuucugagggguuacgagaacauacgguugucgacucagaauguaaucgaugcagaaaaggcccucgggggaccauaucgccugggcaccucaggcagcugccccaacgcuacaaguaaauccggguucuuugcaaccauggccugggcuguuccuaaggacaauaacaaaaaugccacgaacccacugacuguggaggucccguacauuuguacagaaggagaggaucagaucaccgugugggguuuccacucugacaauaagacucagaugaaaaaccucuauggcgauagcaauccccaaaaguuuacauccucagcgaacggggugaccacgcauuacgucagucagauuggaggcuucccugaccagaccgaggaugguggguuaccacagagcggaagaaucguuguggacuauaugguacaaaagcccggcaaaacaggcacuauaguguaccagaggggaguccugcuuccucagaagguguggugcgcaucugggaaauccaagguuauuaaagguucauugccacugaucggcgaagccgauugucuacacgagaaguaugggggacucaacaaaagcaagcccuacuacaccggcgaacacgcuaaggccauugguaauugcccgaucugggugaaaacaccucugaaacuugcaaacgggacuaaauaucggcccccagcuaagcuguugaaagagcgcggcuuuuucggagccaucgcgggcuuucucgaagggggaugggaagguaugauugccggcuggcauggguacaccagucacggagcacauggcgucgcuguggccgcugaccugaagucuacacaggaggccauaaauaagaucaccaaaaacuuaaauucccugagcgaacucgagguaaagaaccuucaacgacugucgggugcaauggacgaauugcacaaugagauucuagagcuggaugaaaaaguugacgaucucagagccgacacuaucucuucccagauagagcuggcugugcuucugucaaacgaagggauuaucaauagugaggaugaacacuugcucgcgcuggagaggaaguuaaagaagaugcugggcccuagcgcagucgacaucggaaacggcuguuucgagacgaagcauaaaugcaaucagacaugccuagaucggauugccgcugggaccuuuaacgccggagaguucucccuccccacuuuugacucucugaauaucaccgcagccagccuuaacgaugacgguuuggauaaucacacaauucugcucuauuacucaaccgcugccaguucccuggcagugacucuuaugcuggcgauauucaucgucuauauggugagccgugacaacguuucuuguucaauuugcuuguga

SEQ ID NO: 155571 - RNA, 1755 nt, Artificial Sequence
  derived and/or modified CDS sequence (opt3) from hemagglutinin__InfluenzaB__AGX21754
augaaggccaucauugugcugcucauggucguuaccagcaacgcugacagaauaugcacaggcaucacuuccucuaauucaccccacgugguaaaaacggcaacccagggggaggugaacgucacaggagccauuccucuuacuaccacaccagcgaagagucauuucgcuaaucugaaagguaccaagacuaggggcaaauuguguccgacaugcuuaaacuguaccgaucuggacguggcccuagggggacccaugugcguuggcaucacgccuagcgcaaaggccuccauucuccacgaagugcggccagucacuucugguuguuuucccaucaugcaugaucgcaccaagauacgacaacugccuaaucuucugcguggguacgagaaaaucagauugucggcucagaacgugauuaaugcagaaaaggccccaggaggccccuauaaacucggcacaucagggagcugcccuaacgcuaccaguaaguccggauucuuugccacuauggcgugggcaguaccaagggacgauaauaaaacagccaccaacccgcugacgguugaggugccccacaucugugcuaaugaagaggaccagauuacugucugggguuuccauucugauaacaagacacagaugaagaaucuguacggcgacagcaacccucaaaaauuuaccuccucagccaaugggaucacuacacacuaugugagucagauaggaggcuucccagaucagaccgaggacggugggcucccccagagcggacggauuguggucgauuacaugguucaaaagccuggcaaaacgggcaccaucguguaucagcgcgggauuuuacugccacagaagguauggugcgcaucuggaagauccaaagugaucaaggguucacuucccuugaucggcgaagcugacugucugcacgagaaauacgggggacuaaacaagagcaagccguauuacacaggcgaacaugccaaagcgauugguaacugcccuauaugggucaagacuccccucaaacuggccaaugggaccaaguacaggccuccagcaaaacuucugaaggagcggggcuuuuucggagcuaucgccggcuuuuuggaagggggaugggaagguaugauugcuggcuggcacggguauacaagucauggagcccacggcguggcaguugccgcugaucucaagucuacucaggaggcgaucaacaaaauaaccaagaaucugaacuccuuaagcgaacuggaggugaaaaaucuccaacgccuuucgggugcaauggacgaacugcacaacgagauuuuggagcuagacgaaaaggucgaugaccugcgagccgauacaaucucuucccagaucgagcucgcugugcugcuuucaaaugaagggauuaucaacagugaggacgaacaucuguuggcccucgagagaaaacugaagaagauguuaggccccagcgcaguagauauuggaaauggcuguuucgagaccaaacacaagugcaaccagacuugccuggacaggauagccgcugggacguuuaaugccggagaguucucccuaccaacauuugauucucucaacaucaccgcagcgagccugaaugacgauggucuugacaaccauacuauuuugcuguacuauucaaccgcugccaguucccucgcaguuacacugaugaucgccaucuucauuguguacaugauaagccgggauaaugucucuuguucaaucugccuuuga

SEQ ID NO: 155572 - RNA, 1755 nt, Artificial Sequence
  derived and/or modified CDS sequence (opt3) from hemagglutinin__InfluenzaB__AGX21776
augaaggccaucauugugcugcucauggucguuaccagcaacgcugacagaauaugcacaggcaucacuuccucuaauucaccccacgugguaaaaacggcaacccagggggaggugaacgucacaggagugauuccucuuacuaccacaccaaccaagaguuacuucgccaaucugaaagguacuaggacacggggcaaguuguguccggauugcuuaaacuguaccgaccuggauguugcgcuagggcgccccaugugcgugggaaucacgccuagcgcuaaagccuccauucuccaugaaguccgaccagugacuucuggcuguuuucccaucaugcacgaccguaccaagauaagacaacugccuaaucuucugagggguuaugagaacauccgguugucgacacagaauguaauugaugcagaaaaggccccagggggacccuaccgccucggcacuucaggcagcugcccuaacgcuaccaguaaauccggguucuuugcaacaauggccugggcuguuccaaaggacaauaacaaaaaugccaccaacccgcugacgguggagguccccuauguguguacugaaggagaggaucagaucacagugugggguuuccauucugacaauaagacccagaugaaaaaccuguacggcgauagcaauccucaaaaguuuacuuccucagcgaacggggucacaacccacuauguuagucagauuggaggcuucccagaccagacggaggauggugggcucccccagagcggaagaaucgugguagacuacauggugcaaaagccuggcaaaaccggcacaauagucuaucagaggggaguguuacugccacagaagguuuggugcgcaucugggcgguccaaagugauuaaggguucacuucccuugaucggcgaagccgauugucugcaugagaaauacgggggacuaaacaagagcaaaccguacuauacuggcgaacacgcuaaggccauugguaauugcccuaucugggucaagaccccucucaaacuggcaaacgggacaaaguaccgcccacccgcuaaacuucugaaggagcgaggcuuuuucggagccaucgcgggcuuuuuggaagggggaugggaagguaugauugccggcuggcacggguauacuucccauggagcacacggcguggcuguagccgcugaccucaaaucuacccaggaggccauaaauaagaucacaaagaaccugaauaguuuaagcgaacuggagguuaaaaaccuccaaagacuuucgggugcaauggacgaacugcauaaugagauuuuggagcuagaugaaaagguggacgaucugagggccgacaccaucucuucccagauagagcucgcuguccugcuuucaaacgaagggauuaucaauagugaggaugaacaccuguuggcgcucgagcggaaacugaagaaaauguuaggccccagcgcaguggacaucggaaacggcuguuucgagacuaagcacaagugcaaucagacgugccuggaucguauugccgcugggacauuuaacgccggagaguucucccuaccaaccuuugacucucucaauaucacugcagccagccugaacgaugacggucuugauaaucauaccauuuugcuguacuauucaacagcugccaguucccucgcagucacccugaugcuugcgauauucaucguguacaugguuagccgcgacaacgugucuuguucaauuugccuguga

SEQ ID NO: 155573 - RNA, 1758 nt, Artificial Sequence; identical to SEQ ID NO: 155027
  derived and/or modified CDS sequence (opt3) from hemagglutinin__InfluenzaB__AGX21787

SEQ ID NO: 155574 - RNA, 1755 nt, Artificial Sequence
  derived and/or modified CDS sequence (opt3) from hemagglutinin__InfluenzaB__AGX21798
augaaggccaucauugugcugcucauggucguuaccagcaacgcugacagaauaugcacaggcaucacuuccucuaauucaccccacgugguaaaaacggcaacccagggggaggugaacgucacaggagugauuccucuuacuaccacaccaaccaagaguuacuucgccaaucugaaagguacuaggacacggggcaaguuguguccggauugcuuaaacuguaccgaccuggauguugcgcuagggcgccccaugugcgugggaacgacuccuagcgcuaaagccuccauccuccaugaaguccgaccagugaccucuggcuguuuucccauuaugcacgaccguacaaagaucagacaacugccuaaucuucugagggguuaugagaacauacgguugucgacucagaauguaaucgaugcagaaaaggccccagggggacccuaccgccucggcaccucaggcagcugcccuaacgcuacaaguaaauccggguucuuugcaaccauggccugggcuguuccaaaggacaauaacaaaaaugccacgaacccgcugacuguggagguccccuauguguguacagaaggagaggaucagauuaccgugugggguuuccauucugacaauaagacucagaugaaaaaccuguacggcgauagcaauccucaaaaguuuacauccucagcgaacggggucaccacgcacuauguuagucagaucggaggcuucccagaccagaccgaggauggugggcucccccagagcggaagaauugugguagacuacauggugcaaaagccuggcaaaacaggcacuaucgucuaucagaggggaguguuacugccacagaagguuuggugcgcaucugggcgguccaaagugauaaaggguucacuucccuugauuggcgaagccgauugucugcaugagaaauacgggggacuaaacaagagcaaaccguacuauaccggcgaacacgcuaaggccaucgguaauugcccuauuugggucaagacaccccucaaacuggcaaacgggacuaaguaccgcccuccagcuaaacuucugaaggagcgaggcuuuuucggagccaucgcgggcuuuuuggaagggggaugggaagguaugaucgccggcuggcacggguauaccagucauggagcacacggcguggcuguagccgcugaccucaaaucuacacaggaggccauuaauaagauaaccaagaacuuaaauucccugagcgaacuggagguuaaaaaccuccaaagacuuucgggugcaauggacgaacugcauaaugagaucuuggagcuagaugaaaagguggacgaucugagggccgacacuauuucuucccagaucgagcucgcuguccugcuuucaaacgaagggauaauuaauagugaggaugaacaccuguuggcgcucgagcggaaacugaagaaaauguuaggccccagcgcaguggacaucggaaacggcuguuucgagacgaagcacaagugcaaucagacaugccuggaucguaucgccgcugggaccuuuaacgccggagaguucucccuaccaacuuuugacucucucaauauuaccgcagccagccugaacgaugacggucuugauaaucauacaaucuugcuguacuauucaaccgcugccaguucccucgcagucacucugaugcuugcgauuuucauaguguacaugguuagccgcgacaacgugucuuguucaaucugccuguga

SEQ ID NO: 155575 - RNA, 1755 nt, Artificial Sequence
  derived and/or modified CDS sequence (opt3) from hemagglutinin__InfluenzaB__AGX21809
augaaggccaucauugugcugcucauggucguuaccagcaacgcugacagaauaugcacaggcaucacuuccucuaauucaccccacgugguaaaaacggcaacccagggggaggugaacgucacaggagugauuccucuuacuaccacaccaaccaagaguuacuucgccaaucugaaagguacuaggacacggggcaaguuguguccggauugcuuaaacuguaccgaccuggauguugcgcuagggcgccccaugugcgugggaacgacuccuagcgcuaaagccuccauccuccaugaaguccgaccagugaccucuggcuguuuucccauuaugcacgaccguacaaagaucagacaacugccuaaucuucugagggguuaugagaacauacgguugucgacucagaauguaaucgaugcagaaaaggccccagggggacccuaccgccucggcaccucaggcagcugcccuaacgcuacaaguaaauccggguucuuugcaaccauggccugggcuguuccaaaggacaauaacaaaaaugccacgaacccgcugacuguggagguccccuauguguguacagaaggagaggaucagauuaccgugugggguuuccauucugacaauaagacucagaugaaaaaccuguacggcgauagcaauccucaaaaguuuacauccucagcgaacggggucaccacgcacuauguuagucagaucggaggcuucccagaccagaccgaggauggugggcucccccagagcggaagaauugugguagacuacauggugcaaaagccuggcaaaacaggcacuaucgucuaucagaggggaguguuacugccacagaagguuuggugcgcaucugggcgguccaaagugauaaaggguucacuucccuugauuggcgaagccgauugucugcaugagaaauacgggggacuaaacaagagccgcccguacuauaccggcgaacacgcuaaagccaucgguaauugcccuauuugggucaagacaccccucaagcuggcaaacgggacuaaauaccgaccuccagcuaagcugcugaaagagagaggcuuuuucggagccaucgcgggcuuuuuggaagggggaugggaagguaugaucgccggcuggcacggguauaccagucauggagcacacggcguggcuguagccgcugaccucaagucuacacaggaggccauuaauaaaauaaccaagaaccuuaauuccuuaagcgaacuggagguuaagaaccuccaaaggcuuucgggugcaauggacgaacugcauaaugagaucuuggagcuagaugaaaaaguggacgaucugcgggccgacacuauuucuucccagaucgagcucgcuguccugcuuucaaacgaagggauaauuaauagugaggaugaacaccuguuggcgcucgagcguaagcugaaaaagauguuaggccccagcgcaguggacaucggaaacggcuguuucgagacgaaacacaagugcaaucagacaugccuggaucgcaucgccgcugggaccuuuaacgccggagaguucucccuaccaacuuuugacucucucaauauuaccgcagccagccugaacgaugacggucuugauaaucauacaaucuugcuguacuauucaaccgcugccaguucccucgcagucacucugaugcuugcgauuuucauaguguacaugguuagcagagacaacgugucuuguucaaucugccuguga

SEQ ID NO: 155576 - RNA, 1755 nt, Artificial Sequence
  derived and/or modified CDS sequence (opt3) from hemagglutinin__InfluenzaB__AGX21820
augaaggccaucauugugcugcucauggucguuaccagcaacgcugacagaauaugcacaggcaucacuuccucuaauucaccccacgugguaaaaacggcaacccagggggaggugaacgucacaggagugauuccucuuacuaccacaccaaccaagaguuacuucgccaaucugaaagguacuaggacacggggcaaguuguguccggauugcuuaaacuguaccgaccuggauguugcgcuagggcgccccaugugcgugggaacgacuccuagcgcuaaagccuccauccuccaugaaguccgaccagugaccucuggcuguuuucccauuaugcacgaccguacaaagaucagacaacugccuaaucuucugagggguuaugagaacauacgguugucgacucagaauguaaucgaugcagaaaaggccccagggggacccuaccgccucggcaccucaggcagcugcccuaacgcuacaaauaaaaguggguucuuugcaaccauggccugggcuguuccaaaggacaacaauaaaaacgccacgaauccgcugacuguggagguccccuauauuuguacagaaggagaggaucagaucaccgugugggguuuccauuccgacaacaagacucagaugaaaaaucuguacggcgauucuaacccucaaaaguuuacaagcuccgcgaacggggugaccacgcacuaugucucacagauuggaggcuucccagaccagaccgaggauggugggcucccccagaguggaagaaucguuguggacuacaugaugcaaaagccuggcaaaacaggcacuauaguauaucagaggggaguguuacugccacagaaggucuggugcgcaagcgggcggucuaaagugauuaaggguucccuucccuugaucggcgaagccgauugucugcaugagaaauacgggggacuaaauaagucaaaaccguacuauaccggcgaacacgcuaaggccauugguaacugcccuaucuggguuaagacaccccucaaacuggcaaaugggacuaaguaccgcccuccagcuaaacuucugaaggagcgaggcuuuuucggagccaucgcgggcuuuuuggaagggggaugggaagguaugauugccggcuggcacggguauaccagccauggagcacacggcguggcugucgccgcugaccucaaaaguacacaggaggccauaaacaagaucaccaagaaucugaacucuuuauccgaacuggaggugaaaaaucuccaaagacuuagcggugcaauggacgaacugcauaacgagauuuuggagcuagaugaaaagguagacgaucugagggccgacacuaucucgucucagauagagcucgcuguucugcuuuccaaugaagggauuaucaacucagaggaugaacaccuguuggcgcucgagcggaaacugaagaaaauguuaggccccagugcaguggacaucggaaauggcuguuucgagacgaagcacaagugcaaccagacaugccuggaucguauugccgcugggaccuuuaaugccggagaguucagccuaccaacuuuugacucccucaacaucaccgcagccucucugaaugaugacggucuugauaaccauacaauuuugcuguacuauagcaccgcugccucaagucucgcagucacucugaugcuugcgauauucaucguguacauggucucccgcgacaacgugagcuguucuauuugccuguga

SEQ ID NO: 155577 - RNA, 1755 nt, Artificial Sequence; identical to SEQ ID NO: 155071
  derived and/or modified CDS sequence (opt3) from hemagglutinin__InfluenzaB__AGX21831

SEQ ID NO: 155578 - RNA, 1755 nt, Artificial Sequence; identical to SEQ ID NO: 155074
  derived and/or modified CDS sequence (opt3) from hemagglutinin__InfluenzaB__AGX21842

SEQ ID NO: 155579 - RNA, 1755 nt, Artificial Sequence; identical to SEQ ID NO: 155074
  derived and/or modified CDS sequence (opt3) from hemagglutinin__InfluenzaB__AGX21853

SEQ ID NO: 155580 - RNA, 1755 nt, Artificial Sequence
  derived and/or modified CDS sequence (opt3) from hemagglutinin__InfluenzaB__AGX21864
augaaggccaucauugugcugcucauggucguuaccagcaacgcugacagaauaugcacaggcaucacuuccucuaauucaccccacgugguaaaaacggcaacccagggggaggugaacgucacaggagugauuccucuuacuaccacaccaaccaagaguuacuucgccaaucugaaagguacuaggacacggggcaaguuguguccggauugcuuaaacuguaccgaccuggauguugcgcuagggcgccccaugugcgugggaacgacuccuagcgcuaaagccuccauccuccaugaaguccgaccagugaccucuggcuguuuucccauuaugcacgaccguacaaagaucagacaacugccuaaucuucugagggguuaugagaacauacgguugucgaaucagaacguaaucgaugcagaaaaggccccagggggacccuaccgccucggcacuucaggcagcugcccuaaugcuaccaguaaauccggguucuuugcaacaauggccugggcuguuccaaaggacaacaauaaaaacgccaccaauccgcugacgguggagguccccuauauuuguacugaaggagaggaucagaucacagugugggguuuccauucugacaacaagacccagaugaaaaaucuguacggcgauagcaacccucaaaaguuuacuuccucagcgaacggggugacaacccacuaugucagucagauuggaggcuucccagaccagacggaggauggugggcucccccagagcggaagaaucguuguggacuacaugaugcaaaagccuggcaaaaccggcacaauaguauaucagaggggaguguuacugccacagaaggucuggugcgcaucugggcgguccaaagugauuaaggguucacuucccuugaucggcgaagccgauugucugcaugagaaauacgggggacuaaauaagagcaaaccguacuauacuggcgaacacgcuaaggccauugguaacugcccuaucuggguuaagacuccccucaaacuggcaaaugggacaaaguaccgcccuccagcuaaacuucugaaggagcgaggcuuuuucggagccaucgcgggcuuuuuggaagggggaugggaagguaugauugccggcuggcacggguauaccagucauggagcacacggcguggcugucgccgcugaccucaaaucuacccaggaggccauaaacaagaucacaaagaaucugaacuccuuaagcgaacuggaggugaaaaaucuccaaagacuuucgggugcaauggacgaacugcauaacgagauuuuggagcuagaugaaaagguagacgaucugagggccgacaccaucucuucccagauagagcucgcuguucugcuuucaaaugaagggauuaucaacagugaggaugaacaccuguuggcgcucgagcggaaacugaagaaaauguuaggccccagcgcaguggacaucggaaauggcuguuucgagacuaagcacaagugcaaccagacgugccuggaucguauugccgcugggacauuuaaugccggagaguucucccuaccaaccuuugacucucucaacaucacugcagccagccugaaugaugacggucuugauaaccauaccauuuugcuguacuauucaacagcugccaguucccucgcagucacccugaugcuugcgauauucaucguguacauggucagccgcgacaacgugucuuguucaauuugccuguga

SEQ ID NO: 155581 - RNA, 1755 nt, Artificial Sequence; identical to SEQ ID NO: 155072
  derived and/or modified CDS sequence (opt3) from hemagglutinin__InfluenzaB__AGX21875

SEQ ID NO: 155582 - RNA, 1755 nt, Artificial Sequence; identical to SEQ ID NO: 155071
  derived and/or modified CDS sequence (opt3) from hemagglutinin__InfluenzaB__AGX21886

SEQ ID NO: 155583 - RNA, 1755 nt, Artificial Sequence; identical to SEQ ID NO: 155071
  derived and/or modified CDS sequence (opt3) from hemagglutinin__InfluenzaB__AGX21897

SEQ ID NO: 155584 - RNA, 1755 nt, Artificial Sequence; identical to SEQ ID NO: 155071
  derived and/or modified CDS sequence (opt3) from hemagglutinin__InfluenzaB__AGX21908

SEQ ID NO: 155585 - RNA, 1755 nt, Artificial Sequence
  derived and/or modified CDS sequence (opt3) from hemagglutinin__InfluenzaB__AGX21919
augaaggccaucauugugcugcucauggucguuaccagcaacgcugacagaauaugcacaggcaucacuuccucuaauucaccccacgugguaaaaacggcaacccagggggaggugaacgucacaggagugauuccucuuacuaccacaccaaccaagaguuacuucgccaaucugaaagguacuaggacacggggcaaguuguguccggauugcuuaaacuguaccgaccuggauguugcgcuagggcgccccaugugcgugggaacgacuccuagcgcuaaagccuccauccuccaugaaguccgaccagugaccucuggcuguuuucccauuaugcacgaccguacaaagaucagacaacugccuaaucuucugagggguuaugagaacauacgguugucgacucagaauguaaucgaugcagaaaaggccccagggggacccuaccgccucggcaccucaggcagcugcccuaacgcuacaaguaaauccggguucuuugcaaccauggccugggcuguuccaaaggacaauaacaaaaaugccacgaacccgcugacuguggagguccccuauauuuguacagaaggagaggaucagaucaccgugugggguuuccauucugacaauaagacucagaugaaaaaccuguacggcgauagcaauccucaaaaguuuacauccucagcgaacggggugaccacgcacuaugucagucagauuggaggcuucccagaccagaccgaggauggugggcucccccagagcggaagaaucguuguggacuacaugaugcaaaagccuggcaaagcaggcacaauaguauaucagaggggaguguuacugccacagaaggucuggugcgccucugggcgguccaaagugauuaaggguucacuucccuugaucggcgaagcugauugucugcaugagaaauacgggggacuaaacaagagcaaaccguacuauacuggcgaacacgccaaggcaauugguaauugcccuaucuggguuaagaccccucucaaacuggcuaacgggacaaaguaccgcccacccgccaaacuucugaaggagcgaggcuuuuucggagcgaucgccggcuuuuuggaagggggaugggaagguaugauugcaggcuggcacggguauacuucccauggagcucacggcguggccgucgcugccgaccucaaaucuacccaggaggcaauaaauaagaucacaaagaaccugaauaguuuaagcgaacuggaggugaaaaaccuccaaagacuuucgggugccauggacgaacugcauaaugagauuuuggagcuagaugaaaagguagacgaucugagggcugacaccaucucuucccagauagagcucgcgguucugcuuucaaacgaagggauuaucaauagugaggaugaacaccuguuggcacucgagcggaaacugaagaaaauguuaggccccagcgccguggacaucggaaacggcuguuucgagacuaagcacaagugcaaucagacgugccuggaucguauugcugccgggacauuuaacgcaggagaguucucccuaccaaccuuugacucucucaauaucacugccgcuagccugaacgaugacggucuugauaaucauaccauuuugcuguacuauucaacagccgcaaguucccucgcggucacccugaugcuugcuauauucaucguguacauggucagccgcgacaacgugucuuguucaauuugccuguga

SEQ ID NO: 155586 - RNA, 1755 nt, Artificial Sequence; identical to SEQ ID NO: 155074
  derived and/or modified CDS sequence (opt3) from hemagglutinin__InfluenzaB__AGX21941

SEQ ID NO: 155587 - RNA, 1755 nt, Artificial Sequence; identical to SEQ ID NO: 155071
  derived and/or modified CDS sequence (opt3) from hemagglutinin__InfluenzaB__AGX21952

SEQ ID NO: 155588 - RNA, 1755 nt, Artificial Sequence; identical to SEQ ID NO: 155074
  derived and/or modified CDS sequence (opt3) from hemagglutinin__InfluenzaB__AGX21963

SEQ ID NO: 155589 - RNA, 1755 nt, Artificial Sequence
  derived and/or modified CDS sequence (opt3) from hemagglutinin__InfluenzaB__AGX21974
augaaggccaucauugugcugcucauggucguuaccagcaacgcugacagaauaugcacaggcaucacuuccucuaauucaccccacgugguaaaaacggcaacccagggggaagugaacgucacaggagugauuccucuuacuaccacaccaaccaagaguuacuucgccaaucugaaagguacuaggacacggggcaaguuguguccggauugcuuaaacuguaccgaccuggauguugcgcuagggcgccccaugugcgugggaacgacuccuagcgcuaaagccuccauccuccaugaaguccgaccagugaccucuggcuguuuucccauuaugcacgaccguacaaagaucagacaacugccuaaucuucugagggguuaugagaacauacgguugucgacucagaauguaaucgaugcagaaaaggccccagggggacccuaccgccucggcaccucaggcagcugcccuaacgcuacaaguaaauccggguucuuugcaaccauggccugggcuguuccaaaggugaauaacaaaaaugccacgaacccgcugacugucgaggugcccuauauuuguacagaaggagaggaccagaucaccgugugggguuuccauucugauaauaagacucagaugaaaaaccuguacggcgacagcaauccucaaaaguuuacauccucagcgaacggggucaccacgcacuauguuagucagauuggcagcuucccagaucagaccgaggacggaggucucccccagucugggagaaucgugguagauuacaugaugcaaaagccuggaaaaacaggcacuauaguguaucagaggggcgucuuacugccacagaagguguggugcgcauccgggcggucaaaaguuauuaagggaagccuucccuugaucggugaagccgacugucugcaugagaaauacggcgggcuaaacaagaguaaaccguacuauaccggagaacacgcuaaggccauuggcaauugcccuaucugggugaagacaccccucaaacuggcaaacgguacuaaguaccgcccuccagcuaaacuucugaaggagcgaggguuuuucggcgccaucgcgggauuuuuggagggcgggugggaaggaaugauugccgguuggcacggcuauaccucucauggggcacacggagucgcuguggccgcugaucucaaauccacacaggaggccauaaauaagaucaccaagaaccugaauagcuuaucggaacuggagguuaaaaaccuccaaagacuuucuggcgcaauggacgaacugcauaaugagauuuuggagcuagacgaaaagguagaugaccugagggccgauacuaucuccucacagauagagcucgcugugcugcuuaguaacgaagguauuaucaauagcgaggacgaacaccuguuggcgcucgagcggaaacugaagaaaauguuagggcccuccgcagucgauaucggcaacggauguuucgagacgaagcacaagugcaaucagacaugccuggaccguauugccgcuggcaccuuuaacgccggggaguucucucuaccaacuuuugauagccucaauaucaccgcagccucacugaacgacgauggacuugacaaucauacaauuuugcuguacuauaguaccgcugccuccagccucgcagugacucugaugcuugcgauauucaucgucuacaugauuucucgcgauaacgugucauguaguaucugccuguga

SEQ ID NO: 155590 - RNA, 1755 nt, Artificial Sequence; identical to SEQ ID NO: 155074
  derived and/or modified CDS sequence (opt3) from hemagglutinin__InfluenzaB__AGX21985

SEQ ID NO: 155591 - RNA, 1755 nt, Artificial Sequence; identical to SEQ ID NO: 155072
  derived and/or modified CDS sequence (opt3) from hemagglutinin__InfluenzaB__AGX21996

SEQ ID NO: 155592 - RNA, 1755 nt, Artificial Sequence; identical to SEQ ID NO: 155072
  derived and/or modified CDS sequence (opt3) from hemagglutinin__InfluenzaB__AGX22007

SEQ ID NO: 155593 - RNA, 1755 nt, Artificial Sequence; identical to SEQ ID NO: 155071
  derived and/or modified CDS sequence (opt3) from hemagglutinin__InfluenzaB__AGX22018

SEQ ID NO: 155594 - RNA, 1755 nt, Artificial Sequence; identical to SEQ ID NO: 155071
  derived and/or modified CDS sequence (opt3) from hemagglutinin__InfluenzaB__AGX22029

SEQ ID NO: 155595 - RNA, 1755 nt, Artificial Sequence; identical to SEQ ID NO: 155071
  derived and/or modified CDS sequence (opt3) from hemagglutinin__InfluenzaB__AGX22040

SEQ ID NO: 155596 - RNA, 1755 nt, Artificial Sequence
  derived and/or modified CDS sequence (opt3) from hemagglutinin__InfluenzaB__AGX22051
augaaggccaucauugugcugcucauggucguuaccagcaacgcugacagaauaugcacaggcaucacuuccucuaauucaccccacgugguaaaaacggcaacccagggggaggugaacgucacaggagugauuccucuuacuaccacaccaaccaagaguuacuucgccaaucugaaagguacuaggacacggggcaaguuguguccggauugcuuaaacuguaccgaccuggauguugcgcuagggcgccccaugugcgugggaacgacuccuagcgcuaaagccuccauccuccaugaaguccgaccagugaccucuggcuguuuucccauuaugcacgaccguacaaagaucagacaacugccuaaucuucugagggguuaugagaacauacgguugucgacucagaauguaaucgaugcagaaaaggccccagggggacccuaccgccucggcaccucaggcagcugcccuaacgcuacaaguaaauccggguucuuugcaaccauggccugggcuguuccaaaggacaauaacaaaaaugccacgaacccgcugacuguggagguccccuauauuuguacagaaggagaggaucagaucaccgugugggguuuccauucugacaauaagacucagaugaaaaaccuguacggcgauagcaauccucaaaaguuuacauccucagcgaacggggugaccacgcacuaugucagucagauuggaggcuucccagaccagaucgaggauggugggcucccccagagcggaagaauaguuguggacuacaugaugcaaaagccuggcaaaaccggcacaauuguauaucagaggggaguguuacugccacagaaggucuggugcgcaucugggcgguccaaagugaucaaggguucacuucccuugauuggcgaagccgauugucugcaugagaaauacgggggacuaaacaagagcaaaccguacuauacuggcgaacacgcuaaggccaucgguaauugcccuaucuggguuaagaccccucucaaacuggcaaacgggacaaaguaccgcccacccgcuaaacuucugaaggagcgaggcuuuuucggagccauugcgggcuuuuuggaagggggaugggaagguaugauagccggcuggcacggguauacuucccauggagcacacggcguggcugucgccgcugaccucaaaucuacccaggaggccaucaauaagauuacaaagaaccugaauaguuuaagcgaacuggaggugaaaaaccuccaaagacuuucgggugcaauggacgcccugcauaaugaaaucuuggagcuagaugagaagguagacgaucugagggcugacaccauaucuucccagauugaacucgcgguucugcuuucaaacgaggggaucaucaauagugaagaugagcaccuguuggcacucgaacggaaacugaagaaaauguuaggccccagcgccguggagauuggaaacggcuguuucgagacuaagcacaagugcaaucagacgugccuggaccguaucgcugccgggacauuuaacgcaggagaguucucccuaccaaccuuugauucucucaauauuacugccgcuagccugaacgacgauggucuugacaaucauaccauauugcuguacuauucaacagccgcaaguucccucgcggucacccugaugcuugcuaucuucauuguguacauggucagccgcgauaacgugucuuguucaaucugccuguga

SEQ ID NO: 155597 - RNA, 1755 nt, Artificial Sequence; identical to SEQ ID NO: 155071
  derived and/or modified CDS sequence (opt3) from hemagglutinin__InfluenzaB__AGX22062

SEQ ID NO: 155598 - RNA, 1755 nt, Artificial Sequence
  derived and/or modified CDS sequence (opt3) from hemagglutinin__InfluenzaB__AGX22073
augaaggccaucauugugcugcucauggucguuaccagcaacgcugacagaauaugcacaggcaucacuuccucuaauucaccccacgugguaaaaacggcaacccagggggaggugaacgucacaggagugauuccucuuacuaccacaccaaccaagaguuacuucgccaaucugaaagguacuaggacacggggcaaguuguguccggauugcuuaaacuguaccgaccuggauguugcgcuagggcgccccaugugcgugggaacgacuccuagcgcuaaagccuccauccuccaugaaguccgaccagugaccucuggcuguuuucccauuaugcacgaccguacaaagaucagacaacugccuaaucuucugagggguuaugagaacauacgguugucgacucagaauguaaucgaugcagaaaaggccccagggggacccuaccgccucggcaccucaggcagcugcccuaacgcuacaaguaaauccggguucuuugcaaccauggccugggcuguuccaaaggacaauaacaaaaaugccacgaacccgcugacuguggagguccccuauauuuguacagaaggagaggaucagaucaccgugugggguuuccauucugacaauaagacucagaugaaaaaccuguacggcgauagcaauccucaaaaguuuacauccucagcgaacggggugaccacgcacuaugucagucagauuggaggcuucccagaccagaccgaggauggugggcucccccagagcggaagaaucguuguggacuacaugaugcaaaagccuggcaaaacaggcacuauaguauaucagaggggaguguuacugccacagaaggucuggugcgcaucugggcgguccaaagugauuaaggguucacuucccuugaucggcgaagccgauugucugcaugagaaauacgggggacuaaacaagagcaaaccguacuauaccggcgaacacgcuaaggccauugguaauugcccuaucuggguuaagacaccccucaaacuggcaaacgggacuaaguaccgcccuccagcuaaacuucugaaggagcgaggcuuuuucggagccaucgcgggcuuuauugaagggggaugggaggguaugauagccggcuggcacggguauaccagucauggagcacacggcguggcugucgccgcugacuugaaaucuacacaggaggccaucaauaagauuaccaagaaccucaauucccugagcgaauuagaggugaaaaaccugcaaagacucucgggugcaauggacgaacuucauaaugagauccuggaguuggaugaaaagguagacgaucuaagggccgacacuauaucuucccagauugagcuggcuguucuccugucaaacgaagggaucaucaauagugaggaugaacaccuucuggcguuggagcggaaacucaagaaaaugcugggccccagcgcaguggacauuggaaacggcuguuucgagacgaagcacaagugcaaucagacaugcuuagaucguaucgccgcugggaccuuuaacgccggagacuucucccugccaacuuuugauucucuaaauauuaccgcagccagccucaacgacgauggucuggacaaucauacaauacuuuuguacuauucaaccgcugccaguucccuggcagucacucucaugcuggcgaucuucauuguguacauggucagccgcgacaacgugucuuguucaaucugccuuuga

SEQ ID NO: 155599 - RNA, 1755 nt, Artificial Sequence; identical to SEQ ID NO: 155074
  derived and/or modified CDS sequence (opt3) from hemagglutinin__InfluenzaB__AGX22095

SEQ ID NO: 155600 - RNA, 1755 nt, Artificial Sequence; identical to SEQ ID NO: 155072
  derived and/or modified CDS sequence (opt3) from hemagglutinin__InfluenzaB__AGX22106

SEQ ID NO: 155601 - RNA, 1755 nt, Artificial Sequence
  derived and/or modified CDS sequence (opt3) from hemagglutinin__InfluenzaB__AGX22128
augaaggccaucauugugcugcucauggucguuaccagcaacgcugacagaauaugcacaggcaucacuuccucuaauucaccccacgugguaaaaacggcaacccagggggaagugaacgucacaggagugauuccucuuacuaccacaccaaccaagaguuacuucgccaaucugaaagguacuaggacacggggcaaguuguguccggauugcuuaaacuguaccgaccuggauguugcgcuagggcgccccaugugcgugggaacgacuccuagcgcuaaagccuccauccuccaugaaguccgaccagugaccucuggcuguuuucccauuaugcacgaccguacaaagaucagacaacugccuaaucuucugagggguuaugagaacauacgguugucgacucagaauguaaucgaugcagaaaacgccccagggggacccuaccgccucggcaccucaggcagcugcccuaaugcuacaaguaaguccggguucuuugcaaccauggccugggcuguuccaaaagacaacaauaagaacgccacgaauccgcugacuguggagguccccuauguguguacagaaggagaggaucagauuaccgugugggguuuccauucugacaacaaaacucagaugaagaaucuguacggcgauagcaacccucaaaaauuuacauccucagcgaacggggucaccacgcacuauguuagucagaucggaggcuucccagcacagaccgaggacggugggcucccccagagcggaagaauugugguagauuacauggugcaaaagccuaggaagacaggcacuaucgucuaucagcggggcguguuacugccacagaaaguuuggugcgccucugggcgcuccaaggugauaaaaggaucacuucccuugauuggugaagcugacugucugcaugagaaguacggcgggcuaaauaaaagcaagccguacuauaccggagaacacgccaaagcaaucggcaacugcccuauuugggucaagacaccccucaagcuggcuaaugguacuaaauaccgaccuccagccaaacuucugaaggagagaggguuuuucggcgcgaucgccggauuuuuggagggcgggugggaaggaaugaucgcagguuggcacggcuauaccagucauggggcucacggaguggccguagcugccgaucucaagucuacacaggaggcaauuaacaaaauaaccaagaaucugaacuccuuaagcgaacuggagaucaagaaucuccaaaggcuuucgggcgccaugaacgaacugcauaaugagauuuuggagcuagacgaaaaaguugacgaucugcgggcugacacuaucucuucccagauagagcucgcggugcugcuuucaaacgaagguauuaucaauagugaggaugaacaccuguuggcacucgagcguaagcugaaaaagauguuagggcccagcgccgucgacaucggcaacggauguuucgagacgaaacacaagugcaaucagacaugccuggaucgcauugcugccggcaccuuuaacgcaggggaguucucccuaccaacuuuugacucucucaauaucaccgccgcuagccugaacgaugacggacuugauaaccauacaauuuugcuguacuauucaaccgccgcaaguucccucgcggugacucugaugcuugcuauauucaucgucuacauggugagcagagacaauguuucuuguucaauuugccuguga

SEQ ID NO: 155602 - RNA, 1755 nt, Artificial Sequence
  derived and/or modified CDS sequence (opt3) from hemagglutinin__InfluenzaB__AGX22139
augaaggccaucauugugcugcucauggucguuaccagcaacgcugacagaauaugcacaggcaucacuuccucuaauucaccccacgugguaaaaacggcaacccagggggaggugaacgucacaggagugauuccucuuacuaccacaccaaccaagaguuacuucgccaaucugaaagguacuaggacacggggcaaguuguguccggauugcuuaaacuguaccgaccuggauguugcgcuagggcgccccaugugcgugggaacgacuccuagcgcugaagccuccauccuccaugagguccgaccagugaccucuggcuguuuucccauuaugcacgaccguacaaaaaucagacaacugccuaaucuucugagggguuaugaaaacauacgguugucgacucagaauguaaucgaugcagagaaggccccagggggacccuaccgccucggcaccucaggcagcugcccuaacgcuacaaguaaguccggguucuuugcaaccauggccugggcuguuccaaaagacaauaacaagaaugccacgaacccgcugacuguggaaguccccuauauuuguacagagggagaggaucagaucaccgugugggguuuccauucugacaauaaaacucagaugaagaaccuguacggcgauagcaauccucaaaaauuuacauccucagcgaacggggugaccacgcacuaugucagucagauuggaggcuucccagaccagaccgaagauggugggcucccccagagcggaagaaucguuguggacuacaugaugcaaaagccuggcaagacaggcacuauaguauaucagaggggaguguuacugccacagaaagucuggugcgcaucugggcgguccaaggugauuaaagguucacuucccuugaucggcgaggccgauugucugcaugaaaaguacgggggacuaaacaaaagcaagccguacuauaccggcgagcacgcuaaagccauugguaauugcccuaucuggguuaagacaccccucaagcuggcaaacgggacuaaauaccgcccuccagcuaagcugcugaaagagcgaggcuuuuucggagccaucgcgggcuuuuuggaagggggaugggaggguaugauugccggcuggcacggguauaccagucauggagcacacggcguggcugucgccgcugaccucaagucuacacaggaagccauaaauaaaaucaccaagaaccuuaauuccuuaagcgagcuggaagugaagaaccuccaaagacuuucgggugcaauggacgagcugcauaaugagauuuuggaacuagaugagaaaguagacgaucugagggccgacacuaucucuucccagauagaacucgcuguucugcuuucaaacgaggggauuaucaauagugaagaugagcaccuguuggcgcucgagcggaagcugaaaaagauguuaggccccagcgcaguggacaucggaaacggcuguuucgaaacgaaacacaagugcaaucagacaugccuggaucguauugccgcugggaccuuuaacgccggagaguucucccuaccaacuuuugacucucucaauaucaccgcagccagccugaacgaugacggucuugauaaucauacaauuuugcuguacuauucaaccgcugccaguucccucgcagucacucugaugcuugcgauauucaucguguacauggucagccgcgacaacgugucuuguucaauuugccuguga

SEQ ID NO: 155603 - RNA, 1755 nt, Artificial Sequence; identical to SEQ ID NO: 155602
  derived and/or modified CDS sequence (opt3) from hemagglutinin__InfluenzaB__AGX22150

SEQ ID NO: 155604 - RNA, 1755 nt, Artificial Sequence; identical to SEQ ID NO: 155602
  derived and/or modified CDS sequence (opt3) from hemagglutinin__InfluenzaB__AGX22161

SEQ ID NO: 155605 - RNA, 1755 nt, Artificial Sequence; identical to SEQ ID NO: 155071
  derived and/or modified CDS sequence (opt3) from hemagglutinin__InfluenzaB__AGX22172

SEQ ID NO: 155606 - RNA, 1755 nt, Artificial Sequence; identical to SEQ ID NO: 155602
  derived and/or modified CDS sequence (opt3) from hemagglutinin__InfluenzaB__AGX22183

SEQ ID NO: 155607 - RNA, 1755 nt, Artificial Sequence; identical to SEQ ID NO: 155602
  derived and/or modified CDS sequence (opt3) from hemagglutinin__InfluenzaB__AGX22194

SEQ ID NO: 155608 - RNA, 1755 nt, Artificial Sequence; identical to SEQ ID NO: 155602
  derived and/or modified CDS sequence (opt3) from hemagglutinin__InfluenzaB__AGX22205

SEQ ID NO: 155609 - RNA, 1755 nt, Artificial Sequence; identical to SEQ ID NO: 155072
  derived and/or modified CDS sequence (opt3) from hemagglutinin__InfluenzaB__AGX22216

SEQ ID NO: 155610 - RNA, 1755 nt, Artificial Sequence; identical to SEQ ID NO: 155074
  derived and/or modified CDS sequence (opt3) from hemagglutinin__InfluenzaB__AGX22227

SEQ ID NO: 155611 - RNA, 1755 nt, Artificial Sequence
  derived and/or modified CDS sequence (opt3) from hemagglutinin__InfluenzaB__AGX22238
augaaggccaucauugugcugcucauggucguuaccagcaacgcugacagaauaugcacaggcaucacuuccucuaauucaccccacauggugaaaacggcaacccagggggagguaaacgugacaggagucauuccucuuacuaccacaccaaccaagaguuacuucgccaaucugaaagguacuaggacacggggcaaguuguguccggauugcuuaaacuguaccgaccuggauguggcgcuagggcgccccaugugcguuggaacgacuccuagcgcuaaagccuccauccuccaugaagugcgaccagucaccucuggcuguuuucccauuaugcacgaccguacaaagaucagacaacugccuaaucuucugagggguuaugagaacauacgguugucgacucagaaugugaucgaugcagaaaaggccccagggggacccuaccgccucggcaccucaggcagcugcccuaacgcuacaaguaaauccggguucuuugcaaccauggccugggcuguaccaaaggacaauaacaaaaaugccacgaacccgcugacuguugaggugcccuauauuuguacagaaggagaggaucagaucaccgucugggguuuccauucugacaauaagacucagaugaaaaaccuguacggcgauagcaauccucaaaaguuuacauccucagcgaacggggugaccacgcacuaugugagucagauuggaggcuucccagaccagaccgaggauggugggcucccccagagcggaagaaucgucguugacuacaugaugcaaaagccuggcaaaacaggcacuauaguguaucagaggggaguauuacugccacagaagguguggugcgcaucugggcgguccaaagucauuaaggguucacuucccuugaucggcgaagccgauugucugcaugagaaauacgggggacuaaacaagagcaaaccguacuauaccggcgaacacgcuaaggccauugguaauugcccuaucugggugaagacaccccucaaacuggcaaacgggacuaaguaccgcccuccagcuaaacuucugaaggagcgaggcuuuuucggagccaucgcgggcuuuuuggaagggggaugggaagguaugauugccggcuggcacggguauaccagucauggagcacacggcguugcuguggccgcugaccucaaaucuacacaggaggccauaaauaagaucaccaagaacuuaaauucccugagcgaacuggaggucaaaaaccuccaaagacuuucgggugcaauggacgaacugcauaaugagauuuuggagcuagaugaaaagguggacgaucugagggccgacacuaucucuucccagauagagcucgcuguacugcuuucaaacgaagggauuaucaauagugaggaugaacaccuguuggcgcucgagcggaaacugaagaaaauguuaggccccagcgcaguugacaucggaaacggcuguuucgagacgaagcacaagugcaaucagacaugccuggaucguauugccgcugggaccuuuaacgccggagaguucucccuaccaacuuuugacucucucaauaucaccgcagccagccugaacgaugacggucuugauaaucauacaauuuugcuguacuauucaaccgcugccaguucccucgcagugacucugaugcuugcgauauucaucgucuacauggugagccgcgacaacgucucuuguucaauuugccuguga

SEQ ID NO: 155612 - RNA, 1755 nt, Artificial Sequence; identical to SEQ ID NO: 155072
  derived and/or modified CDS sequence (opt3) from hemagglutinin__InfluenzaB__AGX22249

SEQ ID NO: 155613 - RNA, 1755 nt, Artificial Sequence; identical to SEQ ID NO: 155071
  derived and/or modified CDS sequence (opt3) from hemagglutinin__InfluenzaB__AGX22260

SEQ ID NO: 155614 - RNA, 1755 nt, Artificial Sequence
  derived and/or modified CDS sequence (opt3) from hemagglutinin__InfluenzaB__AGX22271
augaaggccaucauugugcugcucauggucguuaccagcaacgcugacagaauaugcacaggcaucacuuccucuaauucaccccacgugguaaaaacggcaacccagggggaggugaacgucacaggagugauuccucuuacuaccacaccaaccaagaguuacuucgccaaucugaaagguacuaggacacggggcaaguuguguccggauugcuuaaacuguaccgaccuggauguugcgcuagggcgccccaugugcgugggaacgacuccuagcgcuaaagccuccauccuccaugaaguccgaccagugaccucuggcuguuuucccauuaugcacgaccguacaaagaucagacaacugccuaaucuucugagggguuaugagaacauacgguugucgacucagaauguaaucgaugcagaaaaggccccagggggacccuaccgccucggcaccucaggcagcugcccuaacgcuacaaguaaauccggguucuuugcaaccauggccugggcuguuccaaaggacaauaacaaaaaugccacgaacccgcugacuguggagguccccuauauuuguacagaaggagaggaucagaucaccgugugggguuuccauucugacaauaagacucagaugaaaaaccuguacggcgauagcaauccucaaaaguuuacauccucagcgaacggggugaccacgcacuaugucagucagauuggaggcuucccagaccagaccgaggauggugggcucccccagagcggaagaaucguuguggacuacaugaugcaaaagccuggcaaaacaggcacuauaguauaucagaggggaguguuacugccacagaaggucuggugcgcaucugggcgguccaaagugauuaaggguucacuucccuugaucggcgaagccgauugucugcaugagaaauacgggggacuaaacaagagcaaaccguacuauaccggcgaacacgcuaaggccauugguaauugcccuaucuggguuaagacaccccucaaacuggcaaacgggacuaaguaccgcccaagugcuaaacuucugaaggagcgaggcuuuuucggagccaucgcgggcuuuuuggaagggggaugggaggguaugauugccggcuggcacggguauaccucucauggagcacacggcguggcugucgccgcugaccucaaauccacacaggaggccauaaauaagaucaccaagaaccugaauagcuuaucggaacuggaggugaaaaaccuccaaagacuuucuggugcaauggacgaacugcauaaugagauuuuggagcuagaugaaaagguagacgaucugagggccgacacuaucuccucacagauagagcucgcuguucugcuuaguaacgaagggauuaucaauagcgaggaugaacaccuguuggcgcucgagcggaaacugaagaaaauguuaggcccuuccgcaguggagaucggaaacggcuguuucgaaacgaagcacaagugcaaucagacaugccuggaccguauugccgcugggaccuuuaacgccggagaguucucucuacccacuuuugauagccucaauaucaccgcagccucacugaacgacgauggucuugacaaucauacaauuuugcuguacuauaguaccgcugccuccagccucgcagucacucugaugcuugcgauauucaucguguacauggucucucgcgauaacgugucauguaguauuugccuguga

SEQ ID NO: 155615 - RNA, 1755 nt, Artificial Sequence
  derived and/or modified CDS sequence (opt3) from hemagglutinin__InfluenzaB__AGX22282
augaaggccaucauugugcugcucauggucguuaccagcaacgcugacagaauaugcacaggcaucacuuccucuaauucaccccacgugguaaaaacggcaacccagggggaagugaacgucacaggagugauuccucuuacuaccacaccaaccaagaguuacuucgccaaucugaaagguacuaggacacggggcaaguuguguccggauugcuuaaacuguaccgaccuggauguugcgcuagggcgccccaugugcgugggaacgacuccuagcgcuaaagccuccauccuccaugaaguccgaccagugaccucuggcuguuuucccauuaugcacgaccguacaaagaucagacaacugccuaaucuucugagggguuaugagaacauacgguugucgacucagaauguaaucgaugcagaaaaggccccagggggacccuaccgccucggcaccucaggcagcugcccuaacgcuacaaguaaauccggguucuuugcaaccauggccugggcuguuccaaaggacaauaacaaaaaugccacgaacccgcugacuguggagguccccuauauuuguacagaaggagaggaucagaucaccgugugggguuuccauucugacaauaagacucagaugaaaaaccuguacggcgauagcaauccucaaaaguuuacauccucagcgaacggggugaccacgcacuaugucagucagauuggagacuucccagaucagaccgaggacggcggucucccccagagcgggagaaucguuguggauuacaugaugcaaaagccuggaaaaacaggcacuauaguauaucagaggggcguguuacugccacagaaggucuggugcgcaucugggcgguccaaagugauuaagggaucacuucccuugaucggugaagccgacugucugcaugagaaauacggcgggcuaaacaagagcaaaccguacuauaccggagaacacgcuaaggccauuggcaauugcccuaucuggguuaagacaccccucaaacuggcaaacgguacuaaguaccgcccuccagcuaaacuucugaaggagcgaggguuuuucggcgccaucgcgggauuuuuggagggcgggugggaaggaaugauugccgguuggcacggcuauaccagucauggggcacacggaguggcugucgccgcugaccucaaaucuacacaggaggccauaaauaagaucaccaagaacuuaaauucccugagcgaacuggaggugaaaaaccuccaaagacuuucgggcgcaauggaugaacugcauaaugagauuuuggagcuagacgaaaagguagaugaccugagggccgauacuaucucuucccagauagagcucgcuguucugcuuucaaacgaagguauuaucaauagugaggacgaacaccuguuggcgcucgagcggaaacugaagaaaauguuagggcccagcgcaguggauaucggcaacggauguuucgagacgaagcacaagugcaaucagacaugccuggaccguauugccgcuggcaccuuuaacgccggggaguucucccuaccaacuuuugauucucucaauaucaccgcagccagccugaacgacgauggacuugacaaucauacaauuuugcuguacuauucaaccgcugccaguucccucgcagucacucugaugcuugcgauauucaucguguacauggucagccgcgacaacgugucuuguucaauuugccuguga

SEQ ID NO: 155616 - RNA, 1755 nt, Artificial Sequence; identical to SEQ ID NO: 155071
  derived and/or modified CDS sequence (opt3) from hemagglutinin__InfluenzaB__AGX22293

SEQ ID NO: 155617 - RNA, 1755 nt, Artificial Sequence
  derived and/or modified CDS sequence (opt3) from hemagglutinin__InfluenzaB__AGX22304
augaaggccaucauugugcugcucauggucguuaccagcaacgcugacagaauaugcacaggcaucacuuccucuaauucaccccacgugguaaaaacggcaacccagggggaggugaacgucacaggagugauuccucuuacuaccacaccaaccaagaguuacuucgccaaucugaaagguacuaggacacggggcaaguuguguccggauugcuuaaacuguaccgaccuggauguugcgcuagggcgccccaugugcgugggaacgacuccuagcgcuaaagccuccauccuccaugaaguccgaccagugaccucuggcuguuuucccauuaugcacgaccguacaaagaucagacaacugccuaaucuucugagggguuaugagaacauacgguugucgacucagaauguaaucgaugcagaaaaggccccagggggacccuaccgccucggcaccucaggcagcugcccuaacgcuacaaguaaauccggguucuuugcaaccauggccugggcuguuccaaaggacaauaacaaaaaugccacgaacccgcugacuguggagguccccuauauuuguacagaaggagaggaucagaucaccgugugggguuuccauucugacaauaagacucagaugaaaaaccuguacggcgauagcaauccucaaaaguuuacauccucaaccaacggggugacgacccacuaugucagucagauuggaggcuucccagaccagacagaggauggugggcucccccagagcggaagaaucguuguggacuacaugaugcaaaagccuggcaaaacuggcaccauaguauaucagaggggaguguuacugccacagaaggucuggugcgcgucugggcgguccaaagugauuaaggguucacuucccuugaucggcgaagcagauugucugcaugagaaauacgggggacuaaacaagagcaaaccguacuauacaggcgaacacgccaaggcuauugguaauugcccuaucuggguuaagacuccccucaaacuggccaacgggaccaaguaccgcccuccagcaaaacuucugaaggagcgaggcuuuuucggagcuaucgccggcuuuuuggaagggggaugggaagguaugauugcgggcuggcacggguauacaagucauggagcccacggcguggcagucgcugccgaccucaaaucuacccaggaggcuauaaauaagaucacuaagaacuuaaauucccugagcgaacuggaggugaaaaaccuccaaagacuuucgggugccauggacgaacugcauaaugagauuuuggagcuagaugaaaagguagacgaucugagggcagacacgaucucuucccagauagagcucgccguucugcuuucaaacgaagggauuaucaauagugaggaugaacaccuguuggcucucgagcggaaacugaagaaaauguuaggccccagcgcgguggacaucggaaacggcuguuucgagacaaagcacaagugcaaucagaccugccuggaucguauugcagccgggacuuuuaacgcuggagaguucucccuaccaaccuuugacucucucaauaucacagccgcaagccugaacgaugacggucuugauaaucauaccauuuugcuguacuauucaacugccgcuaguucccucgccgucacacugaugcuugcaauauucaucguguacauggucagccgcgacaacgugucuuguucaauuugccuguga

SEQ ID NO: 155618 - RNA, 1755 nt, Artificial Sequence; identical to SEQ ID NO: 155071
  derived and/or modified CDS sequence (opt3) from hemagglutinin__InfluenzaB__AGX22315

SEQ ID NO: 155619 - RNA, 1755 nt, Artificial Sequence; identical to SEQ ID NO: 154474
  derived and/or modified CDS sequence (opt3) from hemagglutinin__InfluenzaB__AGX22326

SEQ ID NO: 155620 - RNA, 1755 nt, Artificial Sequence; identical to SEQ ID NO: 155074
  derived and/or modified CDS sequence (opt3) from hemagglutinin__InfluenzaB__AGX22337

SEQ ID NO: 155621 - RNA, 1755 nt, Artificial Sequence; identical to SEQ ID NO: 155074
  derived and/or modified CDS sequence (opt3) from hemagglutinin__InfluenzaB__AGX22348

SEQ ID NO: 155622 - RNA, 1755 nt, Artificial Sequence
  derived and/or modified CDS sequence (opt3) from hemagglutinin__InfluenzaB__AGX22359
augaaggccaucauugugcugcucauggucguuaccagcaacgcugacagaauaugcacaggcaucacuuccucuaauucaccccacgugguaaaaacggcaacccagggggaagugaacgucacaggagugauuccucuuacuaccacaccaaccaagaguuacuucgccaaucugaaagguacuaggacacggggcaaguuguguccggauugcuuaaacuguaccgaccuggauguugcgcuagggcgccccaugugcgugggaacgacuccuagcgcuaaagccuccauccuccaugaaguccgaccagugaccucuggcuguuuucccauuaugcacgaccguacaaagaucagacaacugccuaaucuucugagggguuaugagaacauacgguugucgacucagaauguaaucgaugcagaaaacgccccagggggacccuaccgccucggcaccucaggcagcugcccuaaugcuacaaguaaguccggguucuuugcaaccauggccugggcuguuccaaaagacaacaauaagaacgccacgaauccgcugacuguggagguccccuauguguguacagaaggagaggaucagauuaccgugugggguuuccauucugacaacaaaacucagaugaagaaucuguacggcgauagcaacccucaaaaauuuacauccucagcgaacggggucaccacgcacuauguuagucagaucggaggcuucccagcacagaccgaggacggugggcucccccagagcggaagaauugugguagauuacauggugcaaaagccuaagaaaacaggcacuaucgucuaucagaggggcguguuacugccacagaagguuuggugcgccucugggcgguccaaagugauaaagggaucacuucccuugauuggugaagcugacugucugcaugagaaauacggcgggcuaaauaagagcaaaccguacuauaccggagaacacgccaaggcaaucggcaacugcccuauuugggucaagacaccccucaaacuggcuaaugguacuaaguaccgcccuccagccaaacuucugaaggagcgaggguuuuucggcgcgaucgccggauuuuuggagggcgggugggaaggaaugaucgcagguuggcacggcuauaccagucauggggcucacggaguggccguagcugccgaucucaaaucuacacaggaggcaauuaacaagauaaccaagaaucugaacuccuuaagcgaacuggagaucaaaaaucuccaaagacuuucgggcgccauggacgaacugcauaacgagauuuuggagcuagacgaaaagguugaugaccugagggcugauacuaucucuucccagauagagcucgcggugcugcuuucaaaugaagguauuaucaacagugaggacgaacaccuguuggcacucgagcggaaacugaagaaaauguuagggcccagcgccgucgauaucggcaauggauguuucgagacgaagcacaagugcaaccagacaugccuggaccguauugcugccggcaccuuuaaugcaggggaguucucccuaccaacuuuugauucucucaacaucaccgccgcuagccugaaugacgauggacuugacaaccauacaauuuugcuguacuauucaaccgccgcaaguucccucgcggugacucugaugcuugcuauauucaucgucuacauggugagccgcgauaacguuucuuguucaauuugccuguga

SEQ ID NO: 155623 - RNA, 1755 nt, Artificial Sequence; identical to SEQ ID NO: 155072
  derived and/or modified CDS sequence (opt3) from hemagglutinin__InfluenzaB__AGX22370

SEQ ID NO: 155624 - RNA, 1755 nt, Artificial Sequence
  derived and/or modified CDS sequence (opt3) from hemagglutinin__InfluenzaB__AGX22381
augaaggccaucauugugcugcucauggucguuaccagcaacgcugacagaauaugcacaggcaucacuuccucuaauucaccccacgugguaaaaacggcaacccagggggaggugaacgucacaggagugauuccucuuacuaccacaccaaccaagaguuacuucgccaaucugaaagguacuaggacacggggcaaguuguguccggauugcuuaaacuguaccgaccuggauguugcgcuagggcgccccaugugcgugggaacgacuccuagcgcuaaagccuccauccuccaugaaguccgaccagugaccucuggcuguuuucccauuaugcacgaccguacaaagaucagacaacugucgaaucuucugagggguuaugagaacauacgguugucaacucagaauguaaucgaugcagaaaaggccccugggggaccauaccgccucggcaccagcggcaguugccccaacgcuacauccaaaucuggguucuuugcaaccauggccugggcuguuccuaaggacaauaacaaaaaugccacgaacccacugacuguggaggucccguauauuuguacagaaggagaggaucagaucaccgugugggguuuccauagcgacaauaagacucagaugaaaaaccuguacggcgauuccaauccccaaaaguuuacaucaagugcgaacggggugaccacgcacuaugucagccagauuggaggcuucccugaccagaccgaggauggugggcucccacagucuggaagaaucguuguggacuacaugaugcaaaagcccggcaaaacaggcacuauaguauaucagcgcgggguguuacugccucagaaggucuggugcgcauccggacggucaaaagugauuaaggguagccuuccauugaucggcgaagccgauugucugcaugagaaauacgggggacuaaacaagaguaaacccuacuauaccggcgaacacgcuaaggccauugguaauugcccgaucuggguuaagacaccucucaaacuggcaaacgggacuaaguacaggcccccagcuaaacuucugaaggagcgaggcuuuuucggagccaucgcgggcuuuuuggaagggggaugggaagguaugauugccggcuggcacggguauaccucucauggagcacacggcguggcugucgccgcugaccucaaauccacacaggaggccauaaauaagaucaccaagaaccugaauagcuuaucggaacuggaggugaaaaaccuccaaagacuuucuggugcaauggacgaacugcauaaugagauuuuggagcuagaugaaaagguagacgaucugagggccgacacuaucuccucacagauagagcucgcuguucugcuuaguaacgaagggauuaucaauagcgaggaugaacaccuguuggcgcucgagcggaaacugaagaaaauguuaggcccuuccgcaguggacaucggaaacggcuguuucgagacgaagcacaagugcaaucagacaugccuggaucguauugccgcugggaccuuuaacgccggagaguucucucuacccacuuuugacagccucaauaucaccgcagccucacugaacgaugacggucuugauaaucauacaauuuugcuguacuauaguaccgcugccuccagccucgcagucacucugaugcuugcgauauucaucguguacauggucucucgcgacaacgugucauguaguauuugccuguga

SEQ ID NO: 155625 - RNA, 1755 nt, Artificial Sequence; identical to SEQ ID NO: 155071
  derived and/or modified CDS sequence (opt3) from hemagglutinin__InfluenzaB__AGX22392

SEQ ID NO: 155626 - RNA, 1755 nt, Artificial Sequence
  derived and/or modified CDS sequence (opt3) from hemagglutinin__InfluenzaB__AGX22403
augaaggccaucauugugcugcucauggucguuaccagcaacgcugacagaauaugcacaggcaucacuuccucuaauucaccccacgugguaaaaacggcaacccagggggaggugaacgucacaggagugauuccucuuacuaccacaccaaccaagaguuacuucgccaaucugaaagguacuaggacacggggcaaguuguguccggauugcuuaaacuguaccgaccuggauguugcgcuagggcgccccaugugcgugggaacgacuccuagcgcuaaagccuccauccuccaugaaguccgaccagugaccucuggcuguuuucccauuaugcacgaccguacaaagaucagacaacugccuaaucuucugagggguuaugagaacauacgguugucgacucagaauguaaucgaugcagaaaaggccccagggggacccuaccgccucggcaccucaggcagcugcccuaacgcuacaaguaaauccggguucuuugcaaccauggccugggcuguuccaaaggacaauaacaaaaaugccacgaacccgcugacuguggagguccccuauauuuguacagaaggagaggaucagaucaccgugugggguuuccauucugacaauaagacucagaugaaaaaccuguacggcgauagcaauccucaaaaguuuacauccucagcgaacggggugaccacgcacuaugucagucagauuggaggcuucccagaccagaccgaggauggugggcucccccagagcggaagaaucguuguggacuacaugaugcaaaagccuggcaaaacaggcacuauaguauaucagaggggaguguuacugccacagaaggucuggugcgcaucugggcgguccaaagugauuaaggguucacuucccuugaucggcgaagccgauugucugcaugagaaauacgggggacuaaacaagagcaaaccguacuauaccggcgaacacgcuaaggccauugguaauugcccuaucuggguuaagacaccccucaaacuggcaaacgggacuaaguaccgcccuccagcuaaacuucugaaggagcgaggcuuuuucggagccaucgcgggcuuuuuggaagggggaugggaggguaugauugccggcuggcacggguauaccagucauggagcacacggcguggcugucgccgcugaccucaaaucuacacaggaggccauaaauaagaucaccaagaacuuaaauucccugagcgaacuggaggugaaaaaccuccaaagacuuucgggugcaauggacgaacugcauaaugagauuuuggagcuagaugaaaagguagacgaucugagggccgacacuaucucuucccagauagagcucgcuguucugcuuucaaacgaagggauuaucaauagugaggaugaacaccuguuggcgcucgagcggaaacugaagaaaauguuaggccccagcgcaguggacaucggaaacggcuguuucgagacgaagcacaagugcaaucagacaugccuggaucguauugccgcugggaccuuuaacgccggagacuucucccuaccaacuuuugauucucucaauaucaccgcagccagccugaacgacgauggucuugacaaucauacaauuuugcuguacuauucaaccgcugccaguucccucgcagucacucugaugcuugcgauauucaucguguacauggucagccgcgacaacgugucuuguucaauuugccuguga

SEQ ID NO: 155627 - RNA, 1755 nt, Artificial Sequence; identical to SEQ ID NO: 155071
  derived and/or modified CDS sequence (opt3) from hemagglutinin__InfluenzaB__AGX22414

SEQ ID NO: 155628 - RNA, 1755 nt, Artificial Sequence
  derived and/or modified CDS sequence (opt3) from hemagglutinin__InfluenzaB__AGX22425
augaaggccaucauugugcugcucauggucguuaccagcaacgcugacagaauaugcacaggcaucacuuccucuaauucaccccacgugguaaaaacggcaacccagggggaggugaacgucacaggagugauuccucuuacuaccacaccaaccaagaguuacuucgccaaucugaaagguacuaggacacggggcaaguuguguccggauugcuuaaacuguaccgaccuggauguugcgcuagggcgccccaugugcgugggaacgacuccuagcgcuaaagccuccauccuccaugaaguccgaccagugaccucuggcuguuuucccauuaugcacgaccguacaaagaucagacaacugccuaaucuucugagggguuaugagaacauacgguugucgacucagaauguaaucgaugcagaaaaggccccagggggacccuaccgccucggcaccucaggcagcugcccuaacgcuacaaguaaauccggguucuuugcaaccauggccugggcuguuccaaaggacaauaacaaaaaugccacgaacccgcugacuguggagguccccuauauuuguacagaaggagaggaucagaucaccgugugggguuuccauucugacaauaagauucagaugaaaaaccuguacggcgauagcaauccucaaaaguuuacuuccucagcgaacggggugacaacccacuaugucagucagaucggaggcuucccagaccagacggaggauggugggcucccccagagcggaagaauaguuguggacuacaugaugcaaaagccuggcaaaaccggcacaauuguauaucagaggggaguguuacugccacagaaggucuggugcgcaucugggcgguccaaagugaucaaggguucacuucccuugauuggcgaagccgauugucugcaugagaaauacgggggacuaaacaagagcaaaccguacuauacuggcgaacacgcuaaggccaucgguaauugcccuaucuggguuaagaccccucucaaacuggcaaacgggacaaaguaccgcccacccgcuaaacuucugaaggagcgaggcuuuuucggagccauugcgggcuuuuuggaagggggaugggaggguaugauagccggcuggcacggguauacuucccauggagcacacggcguggcugucgccgcugaccucaaaucuacccaggaggccaucaauaagauuacaaagaaccugaauaguuuaagcgaacuggaggugaaaaaccuccaaagacuuucgggugcaauggacgaacugcauaaugagaucuuggagcuagaugaaaagguagacgaucugagggccgacaccauaucuucccagauugagcucgcuguucugcuuucaaacgaagggaucaucaauagugaggaugaacaccuguuggcgcucgagcggaaacugaagaaaauguuaggccccagcgcaguggagauuggaaacggcuguuucgaaacuaagcacaagugcaaucagacgugccuggaccguaucgccgcugggacauuuaacgccggagaguucucccuaccaaccuuugauucucucaauauuacugcagccagccugaacgacgauggucuugacaaucauaccauauugcuguacuauucaacagcugccaguucccucgcagucacccugaugcuugcgaucuucauuguguacauggucagccgcgauaacgugucuuguucaaucugccuguga

SEQ ID NO: 155629 - RNA, 1755 nt, Artificial Sequence; identical to SEQ ID NO: 155072
  derived and/or modified CDS sequence (opt3) from hemagglutinin__InfluenzaB__AGX22436

SEQ ID NO: 155630 - RNA, 1755 nt, Artificial Sequence; identical to SEQ ID NO: 155072
  derived and/or modified CDS sequence (opt3) from hemagglutinin__InfluenzaB__AGX22445

SEQ ID NO: 155631 - RNA, 1755 nt, Artificial Sequence
  derived and/or modified CDS sequence (opt3) from hemagglutinin__InfluenzaB__AGX22456
augaaggccaucauugugcugcucauggucguuaccagcaacgcugacagaauaugcacaggcaucacuuccucuucaaguccccacgugguaaaaacggcaacccagggggaggugaaugucacaggagugauuccucuuacuaccacaccaaccaagagcuacuucgccaaccugaaagguacuaggacacggggcaaguuguguccggauugcuuaaauuguaccgaccuggauguugcgcuagggcgccccaugugcgugggaacgacuccuuccgcuaaagccucuauccuccaugaaguccgaccagugaccucgggcuguuuucccauuaugcacgaccguacaaagaucagacaacugccuaaccuucugagggguuaugagaauauacgguugucaacucagaacguaaucgaugcagaaaaggccccagggggacccuaccgccucggcaccagcggcaguugcccuaaugcuacauccaaaucuggguucuuugcaaccauggccugggcuguuccaaaggacaacaauaaaaacgccacgaauccgcugacuguggagguccccuauauuuguacagaaggagaggaucagaucaccgugugggguuuccauagcgacaacaagacucagaugaaaaaucuguacggcgauuccaacccucaaaaguuuacaucaagugcgaauggggugaccacgcacuaugucagccagauuggaggcuucccagaccagaccgaggauggugggcucccccagucuggaagaaucguuguggacuacaugaugcaaaagccuggcaaaacaggcacuauaguauaucagaggggaguguuacugccacagaaggucuggugcgcauccgggcggucaaaagugauuaaggguagccuucccuugaucggcgaagccgauugucugcaugagaaauacgggggacuaaacaagaguaaaccguacuauaccggcgaacacgcuaaggccauugguaacugcccuaucuggguuaagacaccccucaaacuggcaaaugggacuaaguaccgcccuccagcuaaacuucugaaggagcgaggcuuuuucggagccaucgcgggcuuuuuggaagggggaugggaagguaugauugccggcuggcacggguauaccucucauggagcacacggcguggcugucgccgcugaccucaaauccacacaggaggccauaaacaagaucaccaagaaucugaacagcuuaucggaacuggaggugaaaaaucuccaaagacuuucuggugcaauggacgaacugcauuccgagauuuuggagcuagaugaaaagguagacgaucugagggccgacacuaucucaagucagauagagcucgcuguucugcuuagcaacgaagggauuaucaauuccgaggaugaacaccuguuggcgcucgagcggaaacugaagaaaauguuaggccccucugcaguggacaucggaaacggcuguuucgagacgaagcacaagugcaaucagacaugccuggaucguauugccgcugggaccuuuaacgccggagaguucagccuaccaacuuuugacucacucaauaucaccgcagccagucugaacgaugacggucuugauaaucauacaauuuugcuguacuauuccaccgcugccagcucucucgcagucacucugaugcuugcgauauucaucguguacauugucucacgcgacaacgugaguuguagcaucugccuguga

SEQ ID NO: 155632 - RNA, 1755 nt, Artificial Sequence; identical to SEQ ID NO: 155071
  derived and/or modified CDS sequence (opt3) from hemagglutinin__InfluenzaB__AGX22467

SEQ ID NO: 155633 - RNA, 1755 nt, Artificial Sequence; identical to SEQ ID NO: 155071
  derived and/or modified CDS sequence (opt3) from hemagglutinin__InfluenzaB__AGX22478

SEQ ID NO: 155634 - RNA, 1755 nt, Artificial Sequence
  derived and/or modified CDS sequence (opt3) from hemagglutinin__InfluenzaB__AGX22489
augaaggccaucauugugcugcucauggucguuaccagcaacgcugacagaauaugcacaggcaucacuuccucuaauucaccccacgugguaaaaacggcaacccagggggaagugaacgucacaggagugauuccucuuacuaccacaccaaccaagaguuacuucgccaaucugaaagguacuaggacacggggcaaguuguguccggauugcuuaaacuguaccgaccuggauguugcgcuagggcgccccaugugcgugggaacgacuccuagcgcuaaagccuccauccuccaugaaguccgaccagugaccucuggcuguuuucccauuaugcacgaccguacaaagaucagacaacugccuaaucuucugagggguuaugagaacauacgguugucgacucagucagcaaucgaugccgaaaaggcuccagggggacccuaccgccucggcaccagcggcaguugcccuaaugcaacauccaaaucuggguucuuugccaccauggcuugggccguaccaaaggacaacaauaaaaacgcgacgaauccgcugacuguugaggugcccuauauuuguacagaaggagaggaucagaucaccgucugggguuuccauagcgacaacaagacucagaugaaaaaucuguacggcgauuccaacccucaaaaguuuacaucaagugcaaauggggugaccacgcacuaugugagccagauuggaggcuucccaggucagaccgaggacgggggacucccccagucuggcagaaucgucguugauuacaugauacaaaagccuggcaaaacagggacuauuguguaucagaggggaguauuacugccacagaagguguggugcgccuccggucggucaaaagucaucaagggcagccuucccuugauuggggaagcugacugucugcaugagaaauacggaggccuaaacaagaguaaaccguacuauaccggugaacacgccaaggcaaucgggaacugcccuaucugggugaagacaccccucaaacuggcuaauggcacuaaguaccgcccuccagccaaacuucugaaggagcgaggauuuuucggcgcgauugccggguuuuuggagggagguugggaaggcaugauagcaggguggcacggauauaccucucauggcgcucacgguguugccguggcugccgaucucaaauccacacaggaggcaaucaacaagauuaccaagaaucugaacagcuuaucggaacuggaggucaaaaaucuccaaagacuuucuggggccauggacgaacugcauaacgagaucuuggagcuagacgaaaagguggaugaccugagggcugauacuauauccgcgcagauugagcucgcaguacugcuuucaaaugaaggcaucaucaacagugaggacgaacaccuguuggcccucgagcggaaacugaagaaaauguuaggacccagcgcuguugauauuggcaauggguguuucgagacgaagcacaagugcaaccagacaugccuggaccguaucgccgcaggaaccuuuaaugccggugaguucucccuaccaacuuuugauucucucaacauuaccgcugccagccugaaugacgauggccuugacaaccauacaauauugcuguacuauucaaccgcagcgaguucccucgcugugacucugaugcuugccaucuucauugucuacauggugagccgcgauaaugucucuuguucaaucugccuguga

SEQ ID NO: 155635 - RNA, 1755 nt, Artificial Sequence
  derived and/or modified CDS sequence (opt3) from hemagglutinin__InfluenzaB__AGX22500
augaaggccaucauugugcugcucauggucguuaccagcaacgcugacagaauaugcacaggcaucacuuccucuaauucaccccacgugguaaaaacggcaacccagggggaagugaacgucacaggagugauuccucuuacuaccacaccaaccaagaguuacuucgccaaucugaaagguacuaggacacggggcaaguuguguccggauugcuuaaacuguaccgaccuggauguugcgcuagggcgccccaugugcgugggaacgacuccuagcgcuaaagccuccauccuccaugaaguccgaccagugaccucuggcuguuuucccauuaugcacgaccguacaaagaucagacaacugccuaaucuucugagggguuaugagaacauacgguugucgacucagaauguaaucgaugcagaaaacgccccagggggacccuaccgccucggcaccucaggcagcugcccuaaugcuacaaguaaguccggguucuuugcaaccauggccugggcuguuccaaaagacaacaauaagaacgccacgaauccgcugacuguggagguccccuauauuuguacagaaggagaggaucagaucaccgugugggguuuccauucugacaacaaaacucagaugaagaaucuguacggcgauagcaacccucaaaaauuuacauccucagcgaacggggugaccacgcacuaugucagucagauuggaggcuucccagcacagaccgaggacggugggcucccccagagcggaagaaucauaguugauuacauggugcaaaagccuaggaagacaggcacuauuguauaucagcggggcguguuacugccacagaaagucuggugcgccucugggcgcuccaaggugaucaaaggaucacuucccuugauuggugaagcugacugucugcaugagaaguacggcgggcuaaauaaaagcaagccguacuauaccggagaacacgccaaagcaaucggcaacugcccuaucuggguuaagacaccccucaagcuggcuaaugguacuaaauaccgaccuccagccaaacuucugaaggagagaggguuuuucggcgcgauugccggauuuuuggagggcgggugggaaggaaugauagcagguuggcacggcuauaccagucauggggcucacggaguggccgucgcugccgaucucaagucuacacaggaggcaaucaacaaaauuaccaagaaucugaacuccuuaagcgaacuggaggugaagaaucuccaaaggcuuucgggcgccauggacgaacugcauaacgagaucuuggagcuagacgaaaaaguagaugaccugcgggcugauacuauaucuucccagauugagcucgcgguucugcuuucaaaugaagguaucaucaacagugaggacgaacaccuguuggcacucgagcguaagcugaaaaagauguuagggcccagcgccguggauauuggcaauggauguuucgagacgaaacacaagugcaaccagacaugccuggaccgcaucgcugccggcaccuuuaaugcaggggaguucucccuaccaacuuuugauucucucaacauuaccgccgcuagccugaaugacgauggacuugacaaccauacaauauugcuguacuauucaaccgucgccaguucccucgcagugacucugaugcuugcgaucuucauugucuacauggugagcagagauaacguuucuuguucaaucugccuguga

SEQ ID NO: 155636 - RNA, 1755 nt, Artificial Sequence; identical to SEQ ID NO: 155072
  derived and/or modified CDS sequence (opt3) from hemagglutinin__InfluenzaB__AGX22511

SEQ ID NO: 155637 - RNA, 1755 nt, Artificial Sequence
  derived and/or modified CDS sequence (opt3) from hemagglutinin__InfluenzaB__AGX22522
augaaggccaucauugugcugcucauggucguuaccagcaacgcugacagaauaugcacaggcaucacuuccucuaauucaccccacgugguaaaaacggcaacccagggggaggugaacgucacaggagugauuccucuuacuaccacaccaaccaagaguuacuucgccaaucugaaagguacuaggacacggggcaaguuguguccggauugcuuaaacuguaccgaccuggauguugcgcuagggcgccccaugugcgugggaacgacuccuagcgcuaaagccuccauccuccaugaaguccgaccagugaccucuggcuguuuucccauuaugcacgaccguacaaagaucagacaacuggcaaaucuucugagggguuaugagaacauacgguugucgacucagaauguaaucgaugccgaaaaggcuccugggggaccauaccgccucggcaccucaggcagcugccccaacgcaacaaguaaauccggguucuuugccaccauggcuugggccguuccuaaggacaauaacaaaaaugcgacgaacccacugacuguggaggucccguauauuuguacagaaggagaggaucagaucaccgugugggguuuccauucugacaauaagacucagaugaaaaaccuguacggcgauagcaauccccaaaaguuuacauccucagcaaacggggugaccaagcacuaugucagucagauuggaggcuucccugaccagacggaggauggugggcucccacagagcggaagaaucguuguggacuacaugaugcaaaaacccggcaagaccggcacaauaguauaucagcgcgggguguuacugccucagaaagucuggugcgccucuggacgguccaaggugauuaaagguucacuuccauugaucggcgaagcugauugucugcaugagaaguacgggggacuaaacaaaagcaagcccuacuauacuggcgaacacgccaaggcaauugguaauugcccgaucuggguuaaaaccccucucaagcuggcuaacgggacaaaauacaggcccccagccaagcugcugaaagagcgaggcuuuuucggagcgaucgccggcuuuuuggaagggggaugggaagguaugauugcaggcuggcacggguauacaagucauggagcucacggcguggccgucgcugccgaccucaagucuacccaggaggcaauaaauaagaucacuaaaaaccuuaauuccuuaagcgaacuggaggugaagaaccuccaaagacuuucgggugccauggacgaacugcauaaugagauuuuggagcuagaugaaaaaguagacgaucugagggcugacaccaucucuucccagauagagcucgcgguucugcuuucaaacgaagggauuaucaauagugaggaugaacaccuguuggcacucgagcggaagcugaaaaagauguuaggcccuagcgccguggacaucggaaacggcuguuucgagacuaagcacaaaugcaaucagacgugccuggaucguauugcugccgggacauuuaacgcaggagaguucucccuacccaccuuugacucucucaauaucacugccgcuagccugaacgaugacggucuugauaaucauaccauuuugcuguacuauucaacagccgcaaguucccucgcggucacccugaugcuugcuauauucaucguguacauggucagccgcgacaacgugucuuguucaauuugccuguga

SEQ ID NO: 155638 - RNA, 1755 nt, Artificial Sequence; identical to SEQ ID NO: 154474
  derived and/or modified CDS sequence (opt3) from hemagglutinin__InfluenzaB__AGX22533

SEQ ID NO: 155639 - RNA, 1755 nt, Artificial Sequence; identical to SEQ ID NO: 155086
  derived and/or modified CDS sequence (opt3) from hemagglutinin__InfluenzaB__AGX22566

SEQ ID NO: 155640 - RNA, 1755 nt, Artificial Sequence; identical to SEQ ID NO: 155072
  derived and/or modified CDS sequence (opt3) from hemagglutinin__InfluenzaB__AGX22577

SEQ ID NO: 155641 - RNA, 1755 nt, Artificial Sequence; identical to SEQ ID NO: 155086
  derived and/or modified CDS sequence (opt3) from hemagglutinin__InfluenzaB__AGX22588

SEQ ID NO: 155642 - RNA, 1755 nt, Artificial Sequence; identical to SEQ ID NO: 154474
  derived and/or modified CDS sequence (opt3) from hemagglutinin__InfluenzaB__AGX22599

SEQ ID NO: 155643 - RNA, 1755 nt, Artificial Sequence
  derived and/or modified CDS sequence (opt3) from hemagglutinin__InfluenzaB__AGX22610
augaaggccaucauugugcugcucauggucguuaccagcaacgcugacagaauaugcacaggcaucacuuccucuaauucaccccacgugguaaaaacggcaacccagggggaggugaacgucacaggagugauuccucuuacuaccacaccaaccaagaguuacuucgccaaucugaaagguacuaggacacggggcaaguuguguccggauugcuuaaacuguaccgaccuggauguugcgcuagggcgccccaugugcgugggaacgacuccuagcgcuaaagccuccauccuccaugaaguccgaccagugaccucuggcuguuuucccauuaugcacgaccguacaaagaucagacaacugccuaaucuucugagggguuaugagaacauacgguugucgacucagaauguaaucgaugcagaaaaggccccagggggacccuaccgccucggcaccucaggcagcugcccuaacgcuacaaguaaauccggguucuuugcaaccauggccugggcuguuccaaaggacaauaacaaaaaugccacgaacccgcugacuguggagguccccuauauuuguacagaaggagaggaucagaucaccgugugggguuuccauucugacaauaagacucagaugaaaaaccuguacggcgauccuaauccacaaaaguuuacaagcuccgcgaacggggugaccacgcacuaugucucacagauuggaggcuuccccgaccagaccgaggauggugggcucccucagaguggaagaaucguuguggacuacaugaugcaaaagccaggcaaaacaggcacuauaguauaucagaggggaguguuacugccccagaaggucuggugcgcaagcgggcggucuaaagugauuaaggguucccuuccguugaucggcgaagccgauugucugcaugagaaauacgggggacuaaacaagucaaaaccuuacuauaccggcgaacacgcuaaggccauugguaauugccccaucuggguuaagacaccacucaaacuggcaaacgggacuaaguaccgcccucccgcuaaacuucugaaggagcgaggcuuuuucggagccaucgcgggcuuuuuggaagggggaugggaagguaugauugccggcuggcacggguauaccagccauggagcacacggcguggcugucgccgcugaccucaaaaguacacaggaggccauaaauaagaucaccaagaacuuaaauucucuguccgaacuggaggugaaaaaccuccaaagacuuagcggugcaauggacgaacugcauaaugagauuuuggagcuagaugaaaagguagacgaucugagggccgacacuaucucgucucagauagagcucgcuguucugcuuuccaacgaagggauuaucaauucagaggaugaacaccuguuggcgcucgagcggaaacugaagaaaauguuaggcccaagugcaguggacaucggaaacggcuguuucgagacgaagcacaagugcaaucagacaugccuggaucguauugccgcugggaccuuuaacgccggagaguucagccuacccacuuuugacucccucaauaucaccgcagccucucugaacgaugacggucuugauaaucauacaauuuugcuguacuauagcaccgcugccucaagucucgcagucacucugaugcuugcgauauucaucguguacauggucucccgcgacaacgugagcuguucuauuugccuguga

SEQ ID NO: 155644 - RNA, 1755 nt, Artificial Sequence
  derived and/or modified CDS sequence (opt3) from hemagglutinin__InfluenzaB__AGX22621
augaaggccaucauugugcugcucauggucguuaccagcaacgcugacagaauaugcacaggcaucacuuccucuaauucaccccacgugguaaaaacggcaacccagggggaggugaacgucacaggagugauuccucuuacuaccacaccaaccaagaguuacuucgccaaucugaaagguacuaggacacggggcaaguuguguccggauugcuuaaacuguaccgaccuggauguugcgcuagggcgccccaugugcgugggaacgacuccuagcgcuaaagccuccauccuccaugaaguccgaccagugaccucuggcuguuuucccauuaugcacgaccguacaaagaucagacaacuggcaaaucuucugagggguuaugagaacauacgguugucgacucagaauguaaucgaugccgaaaaggcuccugggggaccauaccgccucggcaccucaggcagcugccccaacgcaacaaguaaauccggguucuuugccaccauggcuugggccguuccuaaggacaauaacaaaaaugcgacgaacccacugacuguggaggucccguauauuuguacaggaggugaagaucagaucaccguguggggcuuccauucugacaauaagacucagaugaaaaaccuguacggggauagcaauccccaaaaguuuacauccucagcaaacggagugaccacgcacuaugucagucagauuggcgguuucccugaccagaccgaggaugggggacucccacagagcggcagaaucguuguggacuacaugaugcaaaagcccggcaaaacagggacuauaguauaucagaggggaguguuacugccucagaaggucuggugcgccucuggucgguccaaagugauuaagggcucacuuccauugaucggggaggcugauugucugcaugaaaaauacggaggccuaaacaagagcaaacccuacuauaccggugagcacgccaaggcaauugggaauugcccgaucuggguuaagacaccucucaaacuggcuaacggcacuaaguaccgacccccagccaaacuucugaaggaacgcggauuuuucggcgcgaucgccggguuuuuggagggagguugggagggcaugauugcaggguggcacggauauaccagucauggcgcucacgguguggccgucgcugccgaccucaaaucuacacaggaagcaauaaauaagaucaccaagaacuuaaauucccugagcgagcuggaagugaaaaaccuccaaagacuuucgggggccauggacgagcugcauaaugaaauuuuggagcuagaugagaagguagacgaucugagggcugacacuaucucuucccagauagaacucgcgguucugcuuucaaacgagggcauuaucaauagugaagaugagcaccuguuggcacucgaacggaaacugaagaaaauguuaggaccuagcgccguggacaucggcaacggguguuucgagacgaagcacaagugcaaucagacaugccuggaucguauugcugccggaaccuuuaacgccggugaguucucccuacccacuuuugacucucucaauaucaccgcagcuagccugaacgaugacggccuugauaaucauacaauuuugcuguacuauucaaccgccgcaaguucccucgcggucacucugaugcuugcuauauucaucguguacauggucagccgcgacaacgugucuuguucaauuugccuguga

SEQ ID NO: 155645 - RNA, 1755 nt, Artificial Sequence; identical to SEQ ID NO: 154474
  derived and/or modified CDS sequence (opt3) from hemagglutinin__InfluenzaB__AGX22632

SEQ ID NO: 155646 - RNA, 1755 nt, Artificial Sequence
  derived and/or modified CDS sequence (opt3) from hemagglutinin__InfluenzaB__AGX22643
augaaggccaucauugugcugcucauggucguuaccagcaacgcugacagaauaugcacaggcaucacuuccucuaauucaccccacgugguaaaaacggcaacccagggggaggugaacgucacaggagugauuccucuuacuaccacaccaaccaagaguuacuucgccaaucugaaagguacuaggacacggggcaaguuguguccggauugcuuaaacuguaccgaccuggauguugcgcuagggcgccccaugugcgugggaacgacuccuagcgcuaaagccuccauccuccaugaaguccgaccagugaccucuggcuguuuucccauuaugcacgaccguacaaagaucagacaacuggcaaaucuucugagggguuaugagaacauacgguugucgauccagaauguaauugaugccgaaaaggcuccugggggaccauaccgccucggcacuucaggcagcugccccaacgcaaccaguaaauccggguucuuugccacaauggcuugggccguuccuaaggacaauaacaaaaaugcgaccaacccacugacgguggaggucccguauaucuguacugaaggagaggaucagauuacagugugggguuuccauucugacaauaagacccagaugaaaaaccuguacggcgauagcaauccccaaaaguuuacuuccucagcaaacggggugacaacccacuaugucagucagaucggaggcuucccugaccagacggaggauggugggcucccacagagcggaagaauaguuguggacuacaugaugcaaaagcccggcaaaaccggcacaauuguauaucagcgcgggguguuacugccucagaaggucuggugcgccucuggacgguccaaagugaucaaggguucacuuccauugauuggcgaagcugauugucugcaugagaaauacgggggacuaaacaagagcaaacccuacuauacuggcgaacacgccaaggcaaucgguaauugcccgaucuggguuaagaccccucucaaacuggcuaacgggacaaaguacaggcccccagccaaacuucugaaggagcgaggcuuuuucggagcgauugccggcuuuuuggaagggggaugggaagguaugauagcaggcuggcacggguauacuucccauggagcucacggcguggccgucgcugccgaccucaaaucuacccaggaggcaaucaauaagauuacaaagaaccugaauaguuuaagcgaacuggaggugaaaaaccuccaaagacuuucgggugccauggacgaacugcauaaugagaucuuggagcuagaugaaaagguagacgaucugagggcugacaccauaucuucccagauugagcucgcgguucugcuuucaaacgaagggaucaucaauagugaggaugaacaccuguuggcacucgagcggaaacugaagaaaauguuaggcccuagcgccguggacauuggaaacggcuguuucgagacuaagcacaagugcaaucagacgugccuggaucguaucgcugccgggacauuuaacgcaggagaguucucccuacccaccuuugacucucucaauauuacugccgcuagccugaacgaugacggucuugauaaucauaccauauugcuguacuauucaacagccgcaaguucccucgcggucacccugaugcuugcuaucuucauuguguacauggucagccgcgacaacgugucuuguucaaucugccuguga

SEQ ID NO: 155647 - RNA, 1755 nt, Artificial Sequence
  derived and/or modified CDS sequence (opt3) from hemagglutinin__InfluenzaB__AGX22654
augaaggccaucauugugcugcucauggucguuaccagcaacgcugacagaauaugcacaggcaucacuuccucuaauucaccccacgugguaaaaacggcaacccagggggaggugaacgucacaggagugauuccucuuacuaccacaccaaccaagaguuacuucgccaaucugaaagguacuaggacacggggcaaguuguguccggauugcuuaaacuguaccgaccuggauguugcgcuagggcgccccaugugcgugggaacgacuccuagcgcuaaagccuccauccuccaugaaguccgaccagugaccucuggcuguuuucccauuaugcacgaccguacaaagaucagacaacuggcaaaucuucugagggguuaugagaacauacgguugucgacucagaauguaaucgaugccgaaaaggcuccugggggaccauaccgccucggcaccucaggcagcugccccaacgcaacaaguaaauccggguucuuugccaccauggcuugggccguuccuaaggacaauaacaaaaaugcgacgaacccacugacuguggaggucccguauauuuguacagaaggagaggaucagaucaccgugugggguuuccauucugacaauaagacucagaugaaaaaccuguacggcgauagcaauccccaaaaguuuacauccucagcaaacggggugaccacgcacuaugucagucagauuggaggcuucccugaccagaccgaggauggugggcucccacagagcggaagaaucguuguggacuacaugaugcaaaagcccggcaaaacaggcacuauaguauaucagcgcgggguguuacugccucagaaggucuggugcgccucuggacgguccaaagugauuaaggguucacuuccauugaucggcgaagcugauugucugcaugagaaauacgggggacuaaacaagagcaaacccuacuauaccggcgaacacgccaaggcaauugguaauugcccgaucuggguuaagacaccucucaaacuggcuaacgggacuaaguacaggcccccagccaaacuucugaaggagcgaggcuuuuucggagcgaucgccggcuuuuuggaagggggaugggaagguaugauugcaggcuggcacggguauaccagucauggagcucacggcguggccgucgcugccgaccucaaaucuacacaggaggcaauaaauaagaucaccaagaacuuaaauucccugagcgaacuggaggugaaaaaccuccaaagacuuucgggugccauggacgaacugcauucugagauuuuggagcuagaugaaaagguagacgaucugagggcugacacuaucuccucacagauagagcucgcgguucugcuuaguaaugaagggauuaucaacagcgaggaugaacaccuguuggcacucgagcggaaacugaagaaaauguuaggcccuuccgccguggacaucggaaauggcuguuucgagacgaagcacaagugcaaccagacaugccuggaucguauugcugccgggaccuuuaaugcaggagaguucucucuacccacuuuugacagccucaacaucaccgccgcuucacugaaugaugacggucuugauaaccauacaauuuugcuguacuauaguaccgccgcauccagccucgcggucacucugaugcuugcuauauucaucguguacauggucucucgcgacaaugugucauguaguauuugccuguga

SEQ ID NO: 155648 - RNA, 1755 nt, Artificial Sequence; identical to SEQ ID NO: 155086
  derived and/or modified CDS sequence (opt3) from hemagglutinin__InfluenzaB__AGX22665

SEQ ID NO: 155649 - RNA, 1755 nt, Artificial Sequence; identical to SEQ ID NO: 155086
  derived and/or modified CDS sequence (opt3) from hemagglutinin__InfluenzaB__AGX22676

SEQ ID NO: 155650 - RNA, 1755 nt, Artificial Sequence; identical to SEQ ID NO: 154474
  derived and/or modified CDS sequence (opt3) from hemagglutinin__InfluenzaB__AGX22687

SEQ ID NO: 155651 - RNA, 1755 nt, Artificial Sequence; identical to SEQ ID NO: 155086
  derived and/or modified CDS sequence (opt3) from hemagglutinin__InfluenzaB__AGX22698

SEQ ID NO: 155652 - RNA, 1755 nt, Artificial Sequence
  derived and/or modified CDS sequence (opt3) from hemagglutinin__InfluenzaB__AGX22709
augaaggccaucauugugcugcucauggucguuaccagcaacgcugacagaauaugcacaggcaucacuuccucuaauucaccccacgugguaaaaacggcaacccagggggaggugaacgucacaggagugauuccucuuacuaccacaccaaccaagaguuacuucgccaaucugaaagguacuaggacacggggcaaguuguguccggauugcuuaaacuguaccgaccuggauguugcgcuagggcgccccaugugcgugggaacgacuccuagcgcuaaagccuccauccuccaugaaguccgaccagugaccucuggcuguuuucccauuaugcacgaccguacaaagaucagacaacuggcaaaucuucugagggguuaugagaacauacgguugucgacucagaauguaaucgaugccgaaaaggcuccugggggaccauaccgccucggcaccucaggcagcugccccaacgcaacaaguaaauccggguucuuugccaccauggcuugggccguuccuaaggacaauaacaaaaaugcgacgaacccacugacuguggaggucccguauauuuguacagaaggagaggaucagaucaccgugugggguuuccauucugacaauaagacucagaugaaaaaccuguacggcgauagcaauccccaaaaguuuacauccucagcaaacggggugaccacgcacuaugucagucagauuggaggcuucccugaccagaccgaggauggugggcucccacagagcggaagaaucguuguggacuacaugaugcaaaagcccgagaaaacaggcacuauaguauaucagaggggcguguuacugccucagaaggucuggugcgccucugggcgguccaaagugauuaagggaucacuuccauugaucggugaagcugauugucugcaugaaaaauacggcgggcuaaacaagagcaaacccuacuauaccggagagcacgccaaggcaauuggcaauugcccgaucuggguuaagacaccucucaaacuggcuaacgguacuaaguaccgacccccagccaaacuucugaaggagcgcggguuuuucggcgcgaucgccggauuuuuggaaggcgggugggagggaaugauugcagguuggcacggcuauaccagucauggggcucacggaguggccgucgcugccgaccucaaaucuacacaggaagcaauaaauaagaucaccaagaacuuaaauucccugagcgagcuggaagugaaaaaccuccaaagacuuucgggcgccauggacgagcugcauaaugagauuuuggaacuagaugagaagguagacgaucugagggcugacacuaucucuucccagauagaacucgcgguucugcuuucaaacgaggguauuaucaauagugaagaugagcaccuguuggcacucgagcggaaacugaagaaaauguuagggccuagcgccguggacaucggcaacggauguuucgaaacgaagcacaagugcaaucagacaugccuggaucguauugcugccggcaccuuuaacgcaggggaguucucccuacccacuuuugacucucucaauaucaccgccgcuagccugaacgaugacggacuugauaaucauacaauuuugcuguacuauucaaccgccgcaaguucccucgcggucacucugaugcuugcuauauucaucguguacauggucagccgcgacaacgugucuuguucaauuugccuguga

SEQ ID NO: 155653 - RNA, 1755 nt, Artificial Sequence
  derived and/or modified CDS sequence (opt3) from hemagglutinin__InfluenzaB__AGX22720
augaaggccaucauugugcugcucauggucguuaccagcaacgcugacagaauaugcacaggcaucacuuccucuaauucaccccacgugguaaaaacggcaacccagggggaggugaacgucacaggagugauuccucuuacuaccacaccaaccaagaguuacuucgccaaucugaaagguacuaggacacggggcaaguuguguccggauugcuuaaacuguaccgaccuggauguugcgcuagggcgccccaugugcgugggaacgacuccuagcgcuaaagccuccauccuccaugaaguccgaccagugaccucuggcuguuuucccauuaugcacgaccguacaaagaucagacaacugccuaaucuucugagggguuaugagaacauacgguugucgacucagaauguaaucgaugcagaaaaggccccagggggacccuaccgccucggcaccucaggcagcugcccuaacgcuacaaguaaauccggguucuuugcaaccauggccugggcuguuccaaaggacaauaacaaaaaugccacgaacccgcugacuguggagguccccuauauuuguacagaaggagaggaucagaucaccgugugggguuuccauucugacaauaagacucagaugaaaaaccuguacggcgauagcaauccucaaaaguuuacauccucagcgaacggggcaaccacgcacuaugugagucagauuggaggcuucccagaccagaccgaggauggugggcucccccagagcggaagaaucgucguugacuacaugaugcaaaagccuggcaaaacaggcacuauaguguaucagaggggaguauuacugccacagaagguguggugcgccucugggcgguccaaagucauuaaggguucacuucccuugaucggcgaagcugauugucugcaugagaaauacgggggacuaaacaagagcaaaccguacuauaccggcgaacacgccaaggcaauugguaauugcccuaucugggugaagacaccccucaaacuggcuaacgggacuaaguaccgcccuccagccaaacuucugaaggagcgaggcuuuuucggagcgaucgccggcuuuuuggaagggggaugggaagguaugauugcaggcuggcacggguauaccagucauggagcucacggcguugccguggcugccgaccucaaaucuacacaggaggcaauaaauaagaucaccaagaacuuaaauucccugagcgaacuggaggucaaaaaccuccaaagacuuucgggugccauggacgaacugcauaaugagauuuuggagcuagaugaaaagguggacgaucugagggcugacacuaucucuucccagauagagcucgcgguacugcuuucaaacgaagggauuaucaauagugaggaugaacaccuguuggcacucgagcggaaacugaagaaaauguuaggccccagcgccguugacaucggaaacggcuguuucgagacgaagcacaagugcaaucagacaugccuggaucguauugcugccgggaccuuuaacgcaggagaguucucccuaccaacuuuugacucucucaauaucaccgccgcuagccugaacgaugacggucuugauaaucauacaauuuugcuguacuauucaaccgccgcaaguucccucgcggugacucugaugcuugcuauauucaucgucuacauggugagccgcgacaacgucucuuguucaauuugccuguga

SEQ ID NO: 155654 - RNA, 1755 nt, Artificial Sequence; identical to SEQ ID NO: 155086
  derived and/or modified CDS sequence (opt3) from hemagglutinin__InfluenzaB__AGX22731

SEQ ID NO: 155655 - RNA, 1755 nt, Artificial Sequence; identical to SEQ ID NO: 155647
  derived and/or modified CDS sequence (opt3) from hemagglutinin__InfluenzaB__AGX22742

SEQ ID NO: 155656 - RNA, 1755 nt, Artificial Sequence
  derived and/or modified CDS sequence (opt3) from hemagglutinin__InfluenzaB__AGX22753
augaaggccaucauugugcugcucauggucguuaccagcaacgcugacagaauaugcacaggcaucacuuccucuaauucaccccacgugguaaaaacggcaacccagggggaggugaacgucacaggagugauuccucuuacuaccacaccagccaagaguuacuucgcgaaucugaaagguaccaggacucggggcaaguuguguccggauugcuuaaacuguacagaccuggauguugcucuagggcgccccaugugcgugggaaccacgccuagcgccaaagcauccauccuccaugaaguccgaccagugacuucuggcuguuuucccauuaugcacgaccguaccaagaucagacaacuggccaaucuucugagggguuaugagaacauacgguugucgacacagaauguaaucgaugcugaaaaggcaccugggggaccauaccgccucggcacuucaggcagcugccccaacgccaccaguaaauccggguucuuugcuacaauggccugggcgguuccuaaggacaauaacaaaaaugcaaccaacccacugacgguggaggucccguauauuuguaaggaaggagaggaucagaucacugugugggguuuccauucugacaauaaaacacagaugaagaaccuguacggcgauagcaauccccaaaaguuuaccuccucagccaacggggugacuacacacuaugucagucagauuggaggcuucccugaccagaccgaggauggugggcucccacagagcggaagaaucguuguggacuacaugauacaaaaacccggcaagacgggcaccauuguauaucagcgcgggguguuacugccucagaaagucuggugcgcuucuggacgguccaaggugaucaaagguucacuuccauugauuggcgaagccgauugucugcaugagaaguacgggggacuaaacaaaagcaagcccuacuauacaggcgaacacgcaaaggcuaucgguaauugcccgaucuggguuaaaacuccucucaagcuggccaacgggaccaaauacaggcccccagcgaagcugcugaaagagcgaggcuuuuucggagccauugcaggcuuuuuggaagggggaugggaagguaugauagcuggcuggcacggguauacaagucauggagcccacggcguggcugucgccgcagaccucaagucuacucaggaggccaucaauaagauuaccaaaaaccuuaauuccuuaagcgaacuggaggugaagaaccuccaaagacuuucgggugcuauggacgaacugcauaaugagaucuuggagcuagaugaaaaaguagacgaucugagggcggacacaauaucuucccagauugagcucgcaguucugcuuucaaacgaagggaucaucaauagugaggaugaacaccuguuggcccucgagcggaagcugaaaaagauguuaggcccuagcgcuguggacauuggaaacggcuguuucgagaccaagcacaaaugcaaucagacuugccuggaucguaucgccgcagggacguuuaacgccggagaguucucccuacccacauuugacucucucaauauuaccgcugccagccugaacgaugacggucuugauaaucauacuauauugcuguacuauucaaccgcagcgaguucccucgcugucacacugaugcuugccaucuucauuguguacauggucagccgcgacaacgugucuuguucaaucugccuguga

SEQ ID NO: 155657 - RNA, 1755 nt, Artificial Sequence
  derived and/or modified CDS sequence (opt3) from hemagglutinin__InfluenzaB__AGX22764
augaaggccaucauugugcugcucauggucguuaccagcaacgcugacagaauaugcacaggcaucacuuccucuaauucaccccacgugguaaaaacggcaacccagggggaggugaacgucacaggagugauuccucuuacuaccacaccaaccaagaguuacuucgccaaucugaaagguacuaggacacggggcaaguuguguccggauugcuuaaacuguaccgaccuggauguugcgcuagggcgccccaugugcgugggaacgacuccuagcgcuaaagccuccauccuccaugaaguccgaccagugaccucuggcuguuuucccauuaugcacgaccguacaaagaucagacaacuggcaaaucuucugagggguuaugagaacauacgguugucgacucagaauguaaucgaugccgaaaaggcuccugggggaccauaccgccucggcaccucaggcagcugccccaacgcaacaaguaaauccggguucuuugccaccauggcuugggccguuccuaaggacaauaacaaaaaugcgacgaacccacugacuguggaggucccguauauuuguaaggaaggagaggaucagaucacagugugggguuuccauucugacaauaaaacccagaugaagaaccuguacggcgauagcaauccccaaaaguuuacuuccucagcaaacggggugacaacccacuaugucagucagauuggaggcuucccugaccagacggaggauggugggcucccacagagcggaagaaucguuguggacuacaugauacaaaaacccggcaagaccggcacaauuguauaucagcgcgggguguuacugccucagaaagucuggugcgccucuggacgguccaaggugaucaaagguucacuuccauugauuggcgaagcugauugucugcaugagaaguacgggggacuaaacaaaagcaagcccuacuauacuggcgaccacgccaaggcaaucgguaauugcccgaucuggguuaaaaccccucucaagcuggcuaacgggacaaaauacaggcccccagccaagcugcugaaagaacgaggcuuuuucggagcgauugccggcuuuuuggaagggggaugggaggguaugauagcaggcuggcacggguauacaagucauggagcucacggcguggccgucgcugccgaccucaagucuacccaggaggcaaucaauaagauuacuaaaaaccuuaauuccuuaagcgagcuggaagugaagaaccuccaaagacuuucgggugccauggaugagcugcauaaugaaaucuuggagcuagacgagaaaguagaugaccugagggcugauaccauaucuucccagauugaacucgcgguucugcuuucaaacgaggggaucaucaauagugaagacgagcaccuguuggcacucgaacggaagcugaaaaagauguuaggcccuagcgccguggauauuggaaacggcuguuucgagacuaagcacaaaugcaaucagacgugccuggaccguaucgcugccgggacauuuaacgcaggagaguucucccuacccaccuuugauucucucaauauuacugccgcuagccugaacgacgauggucuugacaaucauaccauauugcuguacuauucaacagccgcaaguucccucgcggucacccugaugcuugcuaucuucauuguguacauggucagccgcgacaacgugucuuguucaaucugccuguga

SEQ ID NO: 155658 - RNA, 1755 nt, Artificial Sequence
  derived and/or modified CDS sequence (opt3) from hemagglutinin__InfluenzaB__AGX22775
augaaggccaucauugugcugcucauggucguuaccagcaacgcugacagaauaugcacaggcaucacuuccucuaauucaccccacgugguaaaaacggcaacccagggggaggugaacgucacaggagugauuccucuuacuaccacaccaaccaagaguuacuucgccaaucugaaagguacuaggacacggggcaaguuguguccggauugcuuaaacuguaccgaccuggauguugcgcuagggcgccccaugugcgugggaacgacuccuagcgcuaaagccuccauccuccaugaaguccgaccagugaccucuggcuguuuucccauuaugcacgaccguacaaagaucagacaacugccuaaucuucugagggguuaugagaacauacgguugucgacucagaauguaaucgaugcagaaaaggccccagggggacccuaccgccucggcaccucaggcagcugcccuaacgcuacaaguaaauccggguucuuugcaaccauggccugggcuguuccaaaggacaauaacaaaaaugccacgaacccgcugacuguggagguccccuauauuuguacagaaggagaggaucagaucaccgugugggguuuccauucugacaauaagacucagaugaaaaaccuguacggcgauagcaauccucaaaaguuuacauccucagcgaacggggugaccacgcacuaugucagucagauuggaggcuucccagaccagaccgaggauggugggcucccccagagcggaagaaucguuguggacuacaugaugcaaaagccuggcaaaacaggcacuauaguauaucagaggggaguguuacugccacagaaggucuggugcgcaucugggcgguccaaagugauuaaggguucacuucccuugaucggcgaagccgauugucugcaugagaaauacgggggacuaaacaagagcaaaccguacuauaccggcgaacacgcuaaggccauugguaauugcccuaucuggguuaagacaccccucaaacuggcaaacgggacuaaguaccgcccuccagcuaaacuucugaaggagcgaggcuuuuucggagccaucgcgggcuuuuuggaagggggaugggaggguaugauugccggcuggcacggguauaccagucauggagcacacggcguggcugucgccgcugaccucaaaucuacacaggaggccauaaauaagaucaccaagaacuuaaauucccugagcgaacuggaggugaaaaaccuccaaagacuuucgggugcaauggacgaacugcauaaugagauuuuggagcuagaugaaaagguagacgaucugagggccgacacuaucucuucccagauagagcucgcuguucugcuuucaaacgaagggauuaucaauagugaggaugaacaccuguuggcgcucgagcggcgucugaaaaagauguuaggccccagcgcaguggagaucggaaacggcuguuucgaaacgaaacacaagugcaaucagacaugccuggaccgcauugccgcugggaccuuuaacgccggagaguucucccuaccaacuuuugauucucucaauaucaccgcagccagccugaacgacgauggucuugacaaucauacaauuuugcuguacuauucaaccgcugccaguucccucgcagucacucugaugcuugcgauauucaucguguacauggucagcagagauaacgugucuuguucaauuugccuguga

SEQ ID NO: 155659 - RNA, 1755 nt, Artificial Sequence; identical to SEQ ID NO: 155086
  derived and/or modified CDS sequence (opt3) from hemagglutinin__InfluenzaB__AGX22786

SEQ ID NO: 155660 - RNA, 1755 nt, Artificial Sequence
  derived and/or modified CDS sequence (opt3) from hemagglutinin__InfluenzaB__AGX22797
augaaggccaucauugugcugcucauggucguuaccagcaacgcugacagaauaugcacaggcaucacuuccucuaauucaccccacgugguaaaaacggcaacccagggggaggugaacgucacaggagugauuccucuuacuaccacaccaaccaagaguuacuucgccaaucugaaagguacuaggacacggggcaaguuguguccggauugcuuaaacuguaccgaccuggauguugcgcuagggcgccccaugugcgugggaacgacuccuagcgcuaaagccuccauccuccaugaaguccgaccagugaccucuggcuguuuucccauuaugcacgaccguacaaagaucagacaacuggcaaaucuucugagggguuaugagaacauacgguugucgacucagaauguaaucgaugccgaaaaggcuccugggggaccauaccgccucggcaccucaggcagcugccccaacgcaacaaguaaauccggguucuuugccaccauggcuugggccguuccuaaggacaauaacaaaaaugcgacgaacccacugacuguggaggucccguauauuuguaaggaaggagaggaucagaucacagugugggguuuccauucugacaauaaaacccagaugaagaaccuguacggcgauagcaauccccaaaaguuuacuuccucagcaaacggggugacaacccacuaugucagucagauuggaggcuucccugaccagacggaggauggugggcucccacagagcggaagaaucguuguggacuacaugauacaaaaacccggcaagaccggcacaauuguauaucagcgcgggguguuauuuccucagaaagucuggugcgccucuggacgguccaaggugaucaaagguucacugccacuuauuggcgaagcugauuguuugcaugagaaguacgggggacugaacaaaagcaagcccuacuauacuggcgaacacgccaaggcaaucgguaauugcccgaucuggguuaaaaccccucuaaagcucgcuaacgggacaaaauacaggcccccagccaagcugcuuaaagagcgaggcuucuuuggagcgauugccggcuuccuggaagggggaugggaggguaugauagcaggcuggcacggguauacaagucauggagcucacggcguggccgucgcugccgacuugaagucuacccaggaggcaaucaauaagauuacuaaaaaccucaauucccugagcgaauuagaggugaagaaccugcaaagacucucgggugccauggacgaacuucauaaugagauccuggaguuggaugaaaaaguagacgaucuaagggcugacaccauaucuucccagauugagcuggcgguucuccugucaaacgaagggaucaucaauagugaggaugaacaccuucuggcauuggagcggaagcucaaaaagaugcugggcccuagcgccguggacauuggaaacggcuguuuugagacuaagcacaaaugcaaucagacgugcuuagaucguaucgcugccgggacauucaacgcaggagaauuuucccugcccaccuucgacucucuaaauauuacugccgcuagccucaacgaugacggucuggauaaucauaccauacuuuuguacuauucaacagccgcaaguucccuggcggucacccucaugcuggcuaucuucauuguguacauggucagccgcgacaacgugucuuguucaaucugccuuuga

SEQ ID NO: 155661 - RNA, 1755 nt, Artificial Sequence; identical to SEQ ID NO: 155086
  derived and/or modified CDS sequence (opt3) from hemagglutinin__InfluenzaB__AGX22808

SEQ ID NO: 155662 - RNA, 1755 nt, Artificial Sequence; identical to SEQ ID NO: 155086
  derived and/or modified CDS sequence (opt3) from hemagglutinin__InfluenzaB__AGX22819

SEQ ID NO: 155663 - RNA, 1755 nt, Artificial Sequence; identical to SEQ ID NO: 155086
  derived and/or modified CDS sequence (opt3) from hemagglutinin__InfluenzaB__AGX22830

SEQ ID NO: 155664 - RNA, 1755 nt, Artificial Sequence
  derived and/or modified CDS sequence (opt3) from hemagglutinin__InfluenzaB__AGX22841
augaaggccaucauugugcugcucauggucguuaccagcaacgcugacagaauaugcacaggcaucacuuccucuaauucaccccacgugguaaaaacggcaacccagggggaggugaacgucacaggagugauuccucuuacuaccacaccaaccaagaguuacuucgccaaucugaaagguacuaggacacggggcaaguuguguccggauugcuuaaacuguaccgaccuggauguugcgcuagggcgccccaugugcgugggaacgacuccuagcgcuaaagccuccauccuccaugaaguccgaccagugaccucuggcuguuuucccauuaugcacgaccguacaaagaucagacaacuggcaaaucuucugagggguuaugagaacauacgguugucgacucagaauguaaucgaugccgaaaaggcuccugggggaccauaccgccucggcaccucaggcagcugccccaacgcaacaaguaaauccggguucuuugccaccauggcuugggccguuccuaaggacaauaacaaaaaugcgacgaacccacugacuguggaggucccguauauuuguaaggaaggagaggaucagaucacagugugggguuuccauucugacaauaaaacccagaugaagaaccuguacggcgauagcaauccccaaaaguuuacuuccucagcagacggggugacaacccacuaugucagucagauuggaggcuucccugaucagacggaggacggugggcucccacagagcggaagaaucguuguggauuacaugauacaaaaacccggcaagaccggcacaauuguauaucagcgcgggguguuacugccucagaaagucuggugcgccucuggacgguccaaggugaucaaagguucacuuccauugauuggcgaagcugacugucugcaugagaaguacgggggacuaaacaaaagcaagcccuacuauacuggcgaacacgccaaggcaaucgguaacugcccgaucuggguuaaaaccccucucaagcuggcuaaugggacaaaauacaggcccccagccaaacuucugaaggagcgaggcuuuuucggagcgauugccggcuuuuuggaagggggaugggaagguaugauagcaggcuggcacggguauacaagucauggagcucacggcguggccgucgcugccgaccucaagucuacccaggaggcaaucaacaagauuacuaaaaaucugaacuccuuaagcgaacuggaggugaagaaucuccaaagacuuucgggugccauggaugaacugcauaacgagaucuuggagcuagacgaaaaaguagaugaccugagggcugauaccauaucuucccagauugagcucgcgguucugcuuucaaaugaagggaucaucaacagugaggacgaacaccuguuggcacucgagcggaagcugaaaaagauguuaggcccuagcgccguggauauuggaaauggcuguuucgagacuaagcacaaaugcaaccagacgugccuggaccguaucgcugccgggacauuuaaugcaggagaguucucccuacccaccuuugauucucucaacauuacugccgcuagccugaaugacgauggucuugacaaccauaccauauugcuguacuauucaacagccgcaaguucccucgcggucacccugaugcuugcuaucuucauuguguacauggucagccgcgacaaugugucuuguucaaucugccuguga

SEQ ID NO: 155665 - RNA, 1755 nt, Artificial Sequence; identical to SEQ ID NO: 154474
  derived and/or modified CDS sequence (opt3) from hemagglutinin__InfluenzaB__AGX22852

SEQ ID NO: 155666 - RNA, 1755 nt, Artificial Sequence; identical to SEQ ID NO: 155086
  derived and/or modified CDS sequence (opt3) from hemagglutinin__InfluenzaB__AGX22863

SEQ ID NO: 155667 - RNA, 1755 nt, Artificial Sequence; identical to SEQ ID NO: 155086
  derived and/or modified CDS sequence (opt3) from hemagglutinin__InfluenzaB__AGX22874

SEQ ID NO: 155668 - RNA, 1755 nt, Artificial Sequence; identical to SEQ ID NO: 154474
  derived and/or modified CDS sequence (opt3) from hemagglutinin__InfluenzaB__AGX22885

SEQ ID NO: 155669 - RNA, 1755 nt, Artificial Sequence; identical to SEQ ID NO: 155647
  derived and/or modified CDS sequence (opt3) from hemagglutinin__InfluenzaB__AGX22896

SEQ ID NO: 155670 - RNA, 1755 nt, Artificial Sequence
  derived and/or modified CDS sequence (opt3) from hemagglutinin__InfluenzaB__AGX22907
augaaggccaucauugugcugcucauggucguuaccagcaacgcugacagaauaugcacaggcaucacuuccucuaauucaccccacgugguaaaaacggcaacccagggggaggugaacgucacaggagugauuccucuuacuaccacaccaaccaagaguuacuucgccaaucugaaagguacuaggacacggggcaaguuguguccggauugcuuaaacuguaccgaccuggauguugcgcuagggcgccccaugugcgugggaacgacuccuagcgcuaaagccuccauccuccaugaaguccgaccagugaccucuggcuguuuucccauuaugcacgaccguacaaagaucagacaacuggcaaaucuucugagggguuaugagaacauacgguugucgacucagaauguaaucgaugccgaaaaggcuccugggggaccauaccgccucggcaccucaggcagcugccccaacgcaacaaguaaauccggguucuuugccaccauggcuugggccguuccuaaggacaauaacaaaaaugcgacgaacccacugacuguggaggucccguauauuuguacagaaggagaggaucagaucaccgugugggguuuccauucugacaauaagacucagaugaaaaaccuguacggcgauagcaauccccaaaaguuuacauccucagcaaacggggugaccacgcacuaugucagucagauuggaggcuucccugaccagaccgaggauggugggcucccacagagcggaagaaucguuguggacuacaugaugcaaaagcccggcaaaacaggcacuauaguauaucagcgcgggguguuacugccucagaaggucuggugcgccucuggacgguccaaagugauuaaggguucacuuccauugaucggcgaagcugauugucugcaugagaaauacgggggacuaaacaagagcaaacccuacuauaccggcgaacacgccaaggcaauugguaauugcccgaucuggguuaagacaccucucaaacuggcuaacgggacuaaguacaggcccccagccaaacuucugaaggagcgaggcuuuuucggagcgaucgccggcuuuuuggaagggggaugggaagguaugauugcaggcuggcacggguauaccagucauggagcucacggcguggccgucgcugccgaccucaaaucuacacaggaggcaauaaauaagaucaccaagaacuuaaauucccugagcgaacuggaggugaaaaaccuccaaagacuuucgggugccauggacgaacugcauaaugagauuuuggagcuagaugaaaagguagacgaucugagggcugacacuaucucuucccagauagagcucgcgguucugcuuucaaacgaagggauuaucaauagugaggaugaacaccuguuggcacucgagcggaaacugaagaaaauguuaggcccuagcgccguggacaucggaaacggcuguuucgagacgaagcacaagugcaaucagacaugccuggaucguauugcugccgggaccuuuaacgcaggagaguucucccuacccacuuuugacucucucaauaucaccgccgcuagccugaacgaugacggucuugauaaucauacaauuuugcuguacuauucaaccgccgcaaguucccucgcggucacucugaugcuugcuauauucaucguguacauggucagccgcgacucugugucauguaguauuugccuguga

SEQ ID NO: 155671 - RNA, 1755 nt, Artificial Sequence; identical to SEQ ID NO: 154474
  derived and/or modified CDS sequence (opt3) from hemagglutinin__InfluenzaB__AGX22918

SEQ ID NO: 155672 - RNA, 1755 nt, Artificial Sequence; identical to SEQ ID NO: 154474
  derived and/or modified CDS sequence (opt3) from hemagglutinin__InfluenzaB__AGX22929

SEQ ID NO: 155673 - RNA, 1755 nt, Artificial Sequence; identical to SEQ ID NO: 155086
  derived and/or modified CDS sequence (opt3) from hemagglutinin__InfluenzaB__AGX22940

SEQ ID NO: 155674 - RNA, 1755 nt, Artificial Sequence; identical to SEQ ID NO: 154474
  derived and/or modified CDS sequence (opt3) from hemagglutinin__InfluenzaB__AGX22951

SEQ ID NO: 155675 - RNA, 1755 nt, Artificial Sequence; identical to SEQ ID NO: 154474
  derived and/or modified CDS sequence (opt3) from hemagglutinin__InfluenzaB__AGX22962

SEQ ID NO: 155676 - RNA, 1755 nt, Artificial Sequence; identical to SEQ ID NO: 154474
  derived and/or modified CDS sequence (opt3) from hemagglutinin__InfluenzaB__AGX22973

SEQ ID NO: 155677 - RNA, 1755 nt, Artificial Sequence; identical to SEQ ID NO: 154474
  derived and/or modified CDS sequence (opt3) from hemagglutinin__InfluenzaB__AGX22984

SEQ ID NO: 155678 - RNA, 1755 nt, Artificial Sequence; identical to SEQ ID NO: 154474
  derived and/or modified CDS sequence (opt3) from hemagglutinin__InfluenzaB__AGX22995

SEQ ID NO: 155679 - RNA, 1755 nt, Artificial Sequence; identical to SEQ ID NO: 154474
  derived and/or modified CDS sequence (opt3) from hemagglutinin__InfluenzaB__AGX23006

SEQ ID NO: 155680 - RNA, 1755 nt, Artificial Sequence
  derived and/or modified CDS sequence (opt3) from hemagglutinin__InfluenzaB__AGX23017
augaaggccaucauugugcugcucauggucguuaccagcaacgcugacagaauaugcacaggcaucacuuccucuaauucaccccacgugguaaaaacggcaacccagggggaggugaacgucacaggagugauuccucuuacuaccacaccaaccaagaguuacuucgccaaucugaaagguacuaggacacggggcaaguuguguccggauugcuuaaacuguaccgaccuggauguugcgcuagggcgccccaugugcgugggaacgacuccuagcgcuaaagccuccauccuccaugaaauucgaccagucaccucuggcuguuuucccaucaugcacgaccguacaaagauaagacaacuggcaaaucuucugagggguuaugagaacauccgguugucgacucagaaugugauugaugccgaaaaggcuccugggggaccauaccgccucggcaccucaggcagcugccccaacgcaacaaguaaauccggguucuuugccaccauggcuugggccguaccuaaggacaauaacaaaaaugcgacgaacccacugacuguugaggugccguauaucuguacagaaggagaggaucagauuaccgucugggguuuccauucugacaauaagacucagaugaaaaaccuguacggcgauagcaauccccaaaaguuuacauccucagcaaacggggugaccacgcacuaugugagucagaucggaggcuucccugaccagaccgaggauggugggcucccacagagcggaagaauagucguugacuacaugaugcaaaagcccggcaaaacaggcacuauuguguaucagcgcgggguauuacugccucagaagguguggugcgccucuggacgguccaaagucaucaaggguucacuuccauugauuggcgaagcugauugucugcaugagaaauacgggggacuaaacaagagcaaacccuacuauaccggcgaacacgccaaggcaaucgguaauugcccgaucugggugaagacaccucucaaacuggcuaacgggacuaaguacaggcccccagccaaacuucugaaggagcgaggcuuuuucggagcgauugccggcuuuuuggaagggggaugggaagguaugauagcaggcuggcacggguauaccagucauggagcucacggcguugccguggcugccgaccucaaaucuacacaggaggcaaucaauaagauuaccaagaacuuaaauucccugagcgaacuggaggucaaaaaccuccaaagacuuucgggugccauggacgaacugcauaaugagaucuuggagcuagaugaaaagguggacgaucugagggcugacacuauaucuucccagauugagcucgcgguacugcuuucaaacgaagggaucaucaauagugaggaugaacaccuguuggcacucgagcggaaacugaagaaaauguuaggcccuagcgccguugacauuggaaacggcuguuucgagacgaagcacaagugcaaucagacaugccuggaucguaucgcugccgggaccuuuaacgcaggagaguucucccuacccacuuuugacucucucaauauuaccgccgcuagccugaacgaugacggucuugauaaucauacaauauugcuguacuauucaaccgccgcaaguucccucgcggugacucugaugcuugcuaucuucauugucuacauggugagccgcgacaacgucucuuguucaaucugccuguga

SEQ ID NO: 155681 - RNA, 1755 nt, Artificial Sequence
  derived and/or modified CDS sequence (opt3) from hemagglutinin__InfluenzaB__AGX23028
augaaggccaucauugugcugcucauggucguuaccagcaacgcugacagaauaugcacaggcaucacuuccucuaauucaccccacgugguaaaaacggcaacccagggggaggugaacgucacaggagugauuccucuuacuaccacaccaaccaagaguuacuucgccaaucugaaagguacuaagacaaggggcaaauuguguccggauugcuuaaacuguaccgaccuggauguugcgcuagggcggcccaugugcgugggaacgacuccuagcgcuaaggccuccauccuccaugaaguccgcccagugaccucuggcuguuuucccauuaugcacgaccgaacaaagauccgucaacuggcaaaucuucugagagguuaugagaacauaagguugucgacucagaauguaaucgaugccgaaaaagcuccugggggaccauacaagcucggcaccucaggcagcugccccaacgcaacaaguaaauccggguucuuugccaccauggcuugggccguuccuaaggacaauaacaaaaaugcgacgaacccacugacuguggaggucccguauauuuguacagaaggagaggaucagaucaccgugugggguuuccauucugacaauaagacucagaugaagaaccuguacggcgauagcaauccccaaaaauuuacauccucagcaaacggggugaccacgcacuaugucagucagauuggaggcuucccugaccagaccgaggauggugggcucccacagagcggacggaucguuguggacuacaugaugcaaaagcccggcaaaacaggcacuauaguauaucagcgcgggguguuacugccucagaaggucuggugcgccucuggaagauccaaagugauuaaggguucacuuccauugaucggcgaagcugauugucugcaugagaaauacgggggacuaaacaagagcaagcccuacuauaccggcgaacacgccaaagcaauugguaauugcccgaucuggguuaagacaccucucaaacuggcuaacgggacuaaguacaggcccccagccaaacuucugaaggagcggggcuuuuucggagcgaucgccggcuuuuuggaagggggaugggaagguaugauugcaggcuggcacggguauaccagucauggagcucacggcguggccgucgcugccgaccucaagucuacacaggaggcaauaaauaaaaucaccaagaacuuaaauucccugagcgaacuggaggugaaaaaccuccaacgccuuucgggugccauggacgaacugcauaaugagauuuuggagcuagaugaaaagguagacgaucugcgagcugacacuaucucuucccagauagagcucgcgguucugcuuucaaacgaagggauuaucaauagugaggaugaacaccuguuggcacucgagagaaaacugaagaagauguuaggcccuagcgccguggacaucggaaacggcuguuucgagacgaaacacaagugcaaucagacaugccuggauaggauugcugccgggaccuuuaacgcaggagaguucucccuacccacuuuugacucucucaauaucaccgccgcuagccugaacgaugacggucuugauaaucauacaauuuugcuguacuauucaaccgccgcaaguucccucgcggucacucugaugcuugcuauauucaucguguacauggucagccgggacaacgugucuuguucaauuugccuguga

SEQ ID NO: 155682 - RNA, 1755 nt, Artificial Sequence; identical to SEQ ID NO: 154474
  derived and/or modified CDS sequence (opt3) from hemagglutinin__InfluenzaB__AGX23039

SEQ ID NO: 155683 - RNA, 1755 nt, Artificial Sequence
  derived and/or modified CDS sequence (opt3) from hemagglutinin__InfluenzaB__AGX23050
augaaggccaucauugugcugcucauggucguuaccagcaacgcugacagaauaugcacaggcaucacuuccucuaauucaccccacgugguaaaaacggcaacccagggggaggugaacgucacaggagugauuccucuuacuaccacaccaaccaagaguuacuucgccaaucugaaagguacuaggacacggggcaaguuguguccggauugcuuaaacuguaccgaccuggauguugcgcuagggcgccccaugugcgugggaacgacuccuagcgcuaaagccuccauccuccaugaagucucuccagugaccucgggcuguuuucccauuaugcacgaccgaacaaagauccgucaacuggcaaaucuucugagagguuaugagaacauaagguugucaacucagaauguaaucgaugccgaaaaggcuccugggggaccauaccggcucggcaccagcggcaguugccccaacgcaacauccaaaucuggguucuuugccaccauggcuugggccguuccuaaggacaauaacaaaaaugcgacgaacccacugacuguggaggucccguauauuuguacagaaggagaggaucagaucaccgugugggguuuccauagcgacaauaagacucagaugaaaaaccuguacggcgauuccaauccccaaaaguuuacaucaagugcaaacggggugaccacgcacuaugucagccagauuggaggcuucccugaccagaccgaggauggugggcucccacagucuggacgcaucguuguggacuacaugaugcaaaagcccggcaaaacaggcacuauaguauaucagagagggguguuacugccucagaaggucuggugcgccuccggaaggucaaaagugauuaaggguagccuuccauugaucggcgaagcugauugucugcaugagaaauacgggggacuaaacaagaguaaacccuacuauaccggcgaacacgccaaggcaauugguaauugcccgaucuggguuaagacaccucuccggcuggcuaacgggacuaaauaccgacccccagccaaacuucugaaggagcgcggcuuuuucggagcgaucgccggcuuuuuggaagggggaugggaagguaugauugcaggcuggcacggguauaccucucauggagcucacggcguggccgucgcugccgaccucaaguccacacaggaggcaauaaauaaaaucaccaagaaccugaauagcuuaucggaacuggaggugaagaaccuccaaagacuuucuggugccauggacgaacugcauaaugagauuuuggagcuagaugaaaaaguagacgaucugagggcugacacuaucuccucacagauagagcucgcgguucugcuuaguaacgaagggauuaucaauagcgaggaugaacaccuguuggcacucgagcggaagcugaaaaagauguuaggcccuuccgccguggacaucggaaacggcuguuucgagacgaaacacaagugcaaucagacaugccuggaucguauugcugccgggaccuuuaacgcaggagaguucucucuacccacuuuugacagccucaauaucaccgccgcuucacugaacgaugacggucuugauaaucauacaauuuugcuguacuauaguaccgccgcauccagccucgcggucacucugaugcuugcuauauucaucguguacauggucucucgcgacaacgugucauguaguauuugccuguga

SEQ ID NO: 155684 - RNA, 1755 nt, Artificial Sequence
  derived and/or modified CDS sequence (opt3) from hemagglutinin__InfluenzaB__AGX23061
augaaggccaucauugugcugcucauggucguuaccagcaacgcugacagaauaugcacaggcaucacuuccucuaauucaccccacgugguaaaaacggcaacccagggggaggugaacgucacaggagugauuccucuuacuaccacaccaaccaagaguuacuucgccaaucugaaagguacuaggacacggggcaaguuguguccggauugcuuaaacuguaccgaccuggauguugcgcuagggcgccccaugugcgugggaacgacuccuagcgcuaaagccuccauccuccaugaaguccgaccagugaccucuggcuguuuucccauuaugcacgaccguacaaagaucagacaacuggcaaaucuucugagggguuaugagaacauacgguugucgacucagaauguaaucgaugccgaaaaggcuccugggggaccauaccgccucggcaccucaggcagcugccccaacgcaacaaguaaauccggguucuuugccaccauggcuugggccguuccuaaggacaauaacaaaaaugcgacgaacccacugacuguggaggucccguauauuuguacagaaggagaggaucagaucaccgugugggguuuccauucugacaauaagacucagaugaaaaaccuguacggcgauagcaauccccaaaaguuuacauccucagcaaacggggugaccacgcacuaugucagucagauuggaggcuucccugaccagaccgaggauggugggcucccacagagcggaagaaucguuguggacuacaugaugcaaaagcccggcaaaacaggcacuauaguauaucagaggggaguguuacugccucagaaggucuggugcgccucugggcgguccaaagugauuaaggguucacuuccauugaucggcgaagcugauugucugcaugagaaauacgggggacuaaacaagagcaaacccuacuauaccggcgaacacgccaaggcaauugguaauugcccgaucuggguuaagacaccucuccgccuggcuaacgggacuaaauaccgacccccagccaagcugcugaaagagagaggcuuuuucggagcgaucgccggcuuuuuggaagggggaugggaagguaugauugcaggcuggcacggguauaccagucauggagcucacggcguggccgucgcugccgaccucaagucuacacaggaggcaauaaauaaaaucaccaagaaccuuaauuccuuaagcgaacuggaggugaagaaccuccaaaggcuuucgggugccauggacgaacugcauaaugagauuuuggagcuagaugaaaaaguagacgaucugcgggcugacacuaucucuucccagauagagcucgcgguucugcuuucaaacgaagggauuaucaauagugaggaugaacaccuguuggcacucgagcguaagcugaaaaagauguuaggcccuagcgccguggacaucggaaacggcuguuucgagacgaaacacaagugcaaucagacaugccuggaucgcauugcugccgggaccuuuaacgcaggagaguucucccuacccacuuuugacucucucaauaucaccgccgcuagccugaacgaugacggucuugauaaucauacaauuuugcuguacuauucaaccgccgcaaguucccucgcggucacucugaugcuugcuauauucaucguguacauggucagcagagacaacgugucuuguucaauuugccuguga

SEQ ID NO: 155685 - RNA, 1755 nt, Artificial Sequence; identical to SEQ ID NO: 154474
  derived and/or modified CDS sequence (opt3) from hemagglutinin__InfluenzaB__AGX23072

SEQ ID NO: 155686 - RNA, 1755 nt, Artificial Sequence; identical to SEQ ID NO: 155086
  derived and/or modified CDS sequence (opt3) from hemagglutinin__InfluenzaB__AGX23083

SEQ ID NO: 155687 - RNA, 1755 nt, Artificial Sequence; identical to SEQ ID NO: 154474
  derived and/or modified CDS sequence (opt3) from hemagglutinin__InfluenzaB__AGX23094

SEQ ID NO: 155688 - RNA, 1755 nt, Artificial Sequence; identical to SEQ ID NO: 154474
  derived and/or modified CDS sequence (opt3) from hemagglutinin__InfluenzaB__AGX23105

SEQ ID NO: 155689 - RNA, 1755 nt, Artificial Sequence; identical to SEQ ID NO: 155086
  derived and/or modified CDS sequence (opt3) from hemagglutinin__InfluenzaB__AGX23116

SEQ ID NO: 155690 - RNA, 1755 nt, Artificial Sequence; identical to SEQ ID NO: 154474
  derived and/or modified CDS sequence (opt3) from hemagglutinin__InfluenzaB__AGX23127

SEQ ID NO: 155691 - RNA, 1755 nt, Artificial Sequence; identical to SEQ ID NO: 154474
  derived and/or modified CDS sequence (opt3) from hemagglutinin__InfluenzaB__AGX23138

SEQ ID NO: 155692 - RNA, 1755 nt, Artificial Sequence
  derived and/or modified CDS sequence (opt3) from hemagglutinin__InfluenzaB__AGX23149
augaaggccaucauugugcugcucauggucguuaccagcaacgcugacagaauaugcacaggcaucacuuccucugauucaccccacgugguaaaaacggcaacccagggggaggugaaugucacaggagugauuccucuuacuaccacaccaaccaagaguuacuucgccaaccugaaagguacuaggacacggggcaaguuguguccggacugcuuaaauuguaccgaucuggacguugcgcuagggcgccccaugugcgugggaacgacuccuagcgcuaaagccuccauccuccaugaaguccgaccagugaccucuggcuguuuucccauuaugcacgaucguacaaagaucagacaacuggcaaaccuucugagggguuaugagaauauacgguugucgacucagaacguaaucgacgccgaaaaggcuccugggggaccauaccgccucggcaccucaggcagcugccccaaugcaacaaguaaauccggguucuuugccaccauggcuugggccguuccuaaggauaacaauaaaaacgcgacgaauccacugacuguggaggucccguauauuuguacagaaggagaggaccagaucaccgugugggguuuccauucugauaacaagacucagaugaaaaaucuguacggcgacagcaacccccaaaaguuuacauccucagcaaauggggugaccacgcacuaugucagucagauuggaggcuucccugaucagaccgaggacggugggcucccacagagcggaagaaucguuguggauuacaugaugcaaaagcccggcaaaacaggcacuauaguauaucagcgcgggguguuacugccucagaaggucuggugcgccucuggacgguccaaagugauuaaggguucacuuccauugaucggcgaagcugacugucugcaugagaaauacgggggacuaaacaagagcaaacccuacuauaccggcgaacacgccaaggcaauugguaacugcccgaucuggguuaagacaccucucaaacuggcuaaugggacuaaguacaggcccccagccaaacuucugaaggagcgaggcuuuuucggagcgaucgccggcuuuuuggaagggggaugggaagguaugauugcaggcuggcacggguauaccagucauggagcucacggcguggccgucgcugccgaccucaaaucuacacaggaggcaauaaacaagaucaccaagaaucugaacuccuuaagcgaacuggaggugaaaaaucuccaaagacuuucgggugccauggaugaacugcauaacgagauuuuggagcuagacgaaaagguagaugaccugagggcugauacuaucucuucccagauagagcucgcgguucugcuuucaaaugaagggauuaucaacagugaggacgaacaccuguuggcacucgagcggaaacugaagaaaauguuaggcccuagcgccguggauaucggaaauggcuguuucgagacgaagcacaagugcaaccagacaugccuggaccguauugcugccgggaccuuuaaugcaggagaguucucccuacccacuuuugauucucucaacaucaccgccgcuagccugaaugacgauggucuugacaaccauacaauuuugcuguacuauucaaccgccgcaaguucccucgcggucacucugaugcuugcuauauucaucguguacauggucagccgcgacaaugugucuuguucaauuugccuguga

SEQ ID NO: 155693 - RNA, 1755 nt, Artificial Sequence
  derived and/or modified CDS sequence (opt3) from hemagglutinin__InfluenzaB__AGX23160
augaaggccaucauugugcugcucauggucguuaccagcaacgcugacagaauaugcacaggcaucacuuccucuaauucaccccacgugguaaaaacggcaacccagggggaggugaacgucacaggagugauuccucuuacuaccacaccaaccaagaguuacuucgccaaucugaaagguacuaggacacggggcaaguuguguccggauugcuuaaacuguaccgaccuggauguugcgcuagggcgccccaugugcgugggaaucacgccuagcgcuaaagccuccauucuccaugaaguccgaccagugacuucuggcuguuuucccaucaugcacgaccguaccaagauaagacaacuggcaaaucuucugagggguuaugagaacauccgguugucgacacagaauguaauugaugccgaaaaggcuccugggggaccauaccgccucggcacuucaggcagcugccccaacgcaaccaguaaauccggguucuuugccacaauggcuugggccguuccuaaggacaauaacaaaaaugcgaccaacccacugacgguggaggucccguauaucuguacugaaggagaggaucagauuacagugugggguuuccauucugacaauaagacccagaugaaaaaccuguacggcgauagcaauccccaaagauuuacuuccucagcaaacggggugacaacccacuaugucagucagaucggaggcuucccugaccagacggaggauggugggcucccacagagcggaaggauaguuguggacuacaugaugcaaaagcccggcaagaccggcacaauuguauaucagcgcgggguguuacugccucagaaagucuggugcgccucuggacgguccaaggugaucaaagguucacuuccauugauuggcgaagcugauugucugcaugagaaguacgggggacuaaacaaaagcaagcccuacuauacuggcgaacacgccaaagcaaucgguaauugcccgaucuggguuaagaccccucuccgacuggcuaacgggacaaaguacagacccccagccaaacuucugaaggagaggggcuuuuucggagcgauugccggcuuuuuggaagggggaugggaagguaugauagcaggcuggcacggguauacaagucauggagcucacggcguggccgucgcugccgaccucaaaucuacccaggaggcaaucaauaagauuacuaaaaacuuaaauucccugagcgaacuggaggugaagaaccuccaacggcuuucgggugccauggacgaacugcauaaugagaucuuggagcuagaugaaaagguagacgaucugcgugcugacaccauaucuucccagauugagcucgcgguucugcuuucaaacgaagggaucaucaauagugaggaugaacaccuguuggcacucgagcgcaaacugaagaaaauguuaggcccuagcgccguggacauuggaaacggcuguuucgagacuaagcacaaaugcaaucagacgugccuggauagaaucgcugccgggacauuuaacgcaggagaguucucccuacccaccuuugacucucucaauauuacugccgcuagccugaacgaugacggucuugauaaucauaccauauugcuguacuauucaacagccgcaaguucccucgcggucacccugaugcuugcuaucuucauuguguacauggucagcagggacaacgugucuuguucaaucugccuguga

SEQ ID NO: 155694 - RNA, 1755 nt, Artificial Sequence
  derived and/or modified CDS sequence (opt3) from hemagglutinin__InfluenzaB__AGX23171
augaaggccaucauugugcugcucauggucguuaccagcaacgcugacagaauaugcacaggcaucacuuccucuaauucaccccacgugguaaaaacggcaacccagggggaggugaacgucacaggagugauuccucuuacuaccacaccaaccaagaguuacuucgccaaucugaaagguacuaggacacggggcaaguuguguccggauugcuuaaacuguaccgaccuggauguugcgcuagggcgccccaugugcgugggaacgacuccuagcgcuaaagccuccauccuccaugaaguccgaccagugaccucuggcuguuuucccauuaugcacgaccguacaaagaucagacaacuggcaaaucuucugagggguuaugagaacauacgguugucgacucagaauguaaucgaugccgaaaaggcuccugggggaccauaccgccucggcaccucaggcagcugccccaacgcaacaaguaaauccggguucuuugccaccauggcuugggccguuccuaaggacaauaacaaaaaugcgacgaacccacugacuguggaggucccguauauuuguacagaaggagaggaucagaucaccgugugggguuuccauucugacaauaagacucagaugaaaaaccuguacggcgauagcaauccccaaagauuuacauccucagcaaacggggugaccacgcacuaugucagucagauuggaggcuucccugaccagaccgaggauggugggcucccacagagcggaaggaucguuguggacuacaugaugcaaaagcccggcaagacaggcacuauaguauaucagcgcgggguguuacugccucagaaagucuggugcgccucuggacgguccaaggugauuaaagguucacuuccauugaucggcgaagcugauugucugcaugagaaguacgggggacuaaacaaaagcaagcccuacuauaccggcgaacacgccaaagcaauugguaauugcccgaucuggguuaagacaccucuccgacuggcuaacgggacuaaguacagacccccagccaaacuucugaaggagaggggcuuuuucggagcgaucgccggcuuuuuggaagggggaugggaagguaugauugcaggcuggcacggguauaccagucauggagcucacggcguggccgucgcugccgaccucaaaucuacacaggaggcaauaaauaagaucaccaaaaacuuaaauucccugagcgaacuggaggugaagaaccuccaacggcuuucgggugccauggacgaacugcauaaugagauuuuggagcuagaugaaaagguagacgaucugcgugcugacacuaucucuucccagauagagcucgcgguucugcuuucaaacgaagggauuaucaauagugaggaugaacaccuguuggcacucgagcgcaaacugaagaaaauguuaggcccuagcgccguggacaucggaaacggcuguuucgagacgaagcacaaaugcaaucagacaugccuggauagaauugcugccgggaccuuuaacgcaggagaguucucccuacccacuuuugacucucucaauaucaccgccgcuagccugaacgaugacggucuugauaaucauacaauuuugcuguacuauucaaccgccgcaaguucccucgcggucacucugaugcuugcuauauucaucguguacauggucagcagggacaacgugucuuguucaauuugccuguga

SEQ ID NO: 155695 - RNA, 1755 nt, Artificial Sequence; identical to SEQ ID NO: 154474
  derived and/or modified CDS sequence (opt3) from hemagglutinin__InfluenzaB__AGX23182

SEQ ID NO: 155696 - RNA, 1755 nt, Artificial Sequence; identical to SEQ ID NO: 154474
  derived and/or modified CDS sequence (opt3) from hemagglutinin__InfluenzaB__AGX23193

SEQ ID NO: 155697 - RNA, 1755 nt, Artificial Sequence; identical to SEQ ID NO: 155086
  derived and/or modified CDS sequence (opt3) from hemagglutinin__InfluenzaB__AGX23204

SEQ ID NO: 155698 - RNA, 1755 nt, Artificial Sequence; identical to SEQ ID NO: 154474
  derived and/or modified CDS sequence (opt3) from hemagglutinin__InfluenzaB__AGX23215

SEQ ID NO: 155699 - RNA, 1755 nt, Artificial Sequence
  derived and/or modified CDS sequence (opt3) from hemagglutinin__InfluenzaB__AGX23226
augaaggccaucauugugcugcucauggucguuaccagcaacgcugacagaauaugcacaggcaucacuuccucuaauucaccccacgugguaaaaacggcaacccagggggaggugaacgucacaggagugauuccucuuacuaccacaccaaccaagaguuacuucgccaaucugaaagguacuaggacacggggcaaguuguguccggauugcuuaaacuguaccgaccuggauguugcgcuagggcgccccaugugcgugggaacgacuccuagcgcuaaagccuccauccuccaugaaguccgaccagugaccucuggcuguuuucccauuaugcacgaccguacaaagaucagacaacuggcaaaucuucugagggguuaugagaacauacgguugucgacucagaauguaaucgaugccgaaaaggcuccugggggaccauaccgccucggcaccucaggcagcugccccaacgcaacaaguaaauccggguucuuugccaccauggcuugggccguuccuaaggacaauaacaaaaaugcgacgaacccacugacuguggaggucccguauauuuguaaggaaggagaggaucagaucacagugugggguuuccauucugacaauaaaacccagaugaagaaccuguacggcgauagcaauccccaaaaguuuacuuccucagcaaguggggugacaacccacuaugucagccagauuggaggcuucccugaccagacggaggauggugggcucccacagucuggaagaaucguuguggacuacaugauacaaaaacccggcaagaccggcacaauuguauaucagcgcgggguguuacugccucagaaagucuggugcgccuccggacggucaaaggugaucaaagguagccuuccauugauuggcgaagcugauugucugcaugagaaguacgggggacuaaacaaaaguaagcccuacuauacuggcgaacacgccaaggcaaucgguaacugcccgaucuggguuaaaaccccucucaagcuggcuaaugggacaaaauacaggcccccagccaaacuucugaaagagcgaggcuuuuucggagcgauugccggcuuuuuggaagggggaugggaagguaugauagcaggcuggcacggguauacuucucauggagcucacggcguggccgucgcugccgaccucaaguccacccaggaggcaaucaacaagauuacaaagaaucugaacagcuuaucggaacuggaggugaagaaucuccaaagacuuucuggugccauggacgaacugcauaacgagaucuuggagcuagaugaaaaaguagacgaucugagggcugacaccauauccucacagauugagcucgcgguucugcuuaguaaugaagggaucaucaacagcgaggaugaacaccuguuggcacucgagcggaagcugaaaaagauguuaggcccuuccgccguggacauuggaaauggcuguuucgagacuaagcacaaaugcaaccagacgugccuggaucguaucgcugccgggacauuuaaugcaggagaguucucucuacccaccuuugacagccucaacauuacugccgcuucacugaaugaugacggucuugauaaccauaccauauugcuguacuauaguacagccgcauccagccucgcggucacccugaugcuugcuaucuucauuguguacauggucucucgcgacaaugugucauguaguaucugccuguga

SEQ ID NO: 155700 - RNA, 1755 nt, Artificial Sequence; identical to SEQ ID NO: 155647
  derived and/or modified CDS sequence (opt3) from hemagglutinin__InfluenzaB__AGX23237

SEQ ID NO: 155701 - RNA, 1755 nt, Artificial Sequence
  derived and/or modified CDS sequence (opt3) from hemagglutinin__InfluenzaB__AGX23248
augaaggccaucauugugcugcucauggucguuaccagcaacgcugacagaauaugcacaggcaucacuuccucuaauucaccccacgugguaaaaacggcaacccagggggaggugaacgucacaggagugauuccucuuacuaccacaccaaccaagaguuacuucgccaaucugaaagguacuaggacacggggcaaguuguguccggauugcuuaaacuguaccgaccuggauguugcgcuagggcgccccaugugcgugggaacgacuccuagcgcuaaagccuccauccuccaugaaguccgaccagugaccucuggcuguuuucccauuaugcacgaccguacaaagaucagacaacuggcaaaucuucugagggguuaugagaacauacgguugucgacucagaauguaaucgaugccgaaaaggcuccugggggaccauaccgccucggcaccucaggcagcugccccaacgcaacaaguaaauccggguucuuugccaccauggcuugggccguuccuaaggacaauaacaaaaaugcgacgaacccacugacuguggaggucccguauauuuguaaggaaggagaggaucagaucacagugugggguuuccauucugacaauaaaacccagaugaagaaccuguacggcgauagcaauccccaaaaguuuacuuccucagcaaguggggugacaacccacuaugucagccagauuggaggcuucccugaccagacggaggauggugggcucccacagucuggaagaaucguuguggacuacaugauacaaaaacccggcaagaccggcacaauuguauaucagcgcgggguguuacugccucagaaagucuggugcgccuccggacggucaaaggugaucaaagguagccuuccauugauuggcgaagcugauugucugcaugagaaguacgggggacuaaacaaaaguaagcccuacuauacuggcgaacacgccaaggcaaucgguaacugcccgaucuggguuaaaaccccucucaagcuggcuaaugggacaaaauacaggcccccagccaaacuucugaaagagcgaggcuuuuucggagcgauugccggcuuuuuggaagggggaugggaagguaugauagcaggcuggcacggguauacuucucauggagcucacggcguggccgucgcugccgaccucaaguccacccaggaggcaaucaacaagauuacaaagaaucugaacagcuuaucggaacuggaggugaagaaucuccaaagacuuucuggugccauggacgaacugcauaacgagaucuuggagcuagaugaaaaaguagacgaucugagggcugacaccauauccucacagauugagcucgcgguucugcuuaguaaugaagggaucaucaacagcgaggaugaacaccuguuggcacucgagcggaagcugaaaaagauguuaggcccuuccgccguggacauuggaaauggcuguuucgagacuaagcacaaaugcaaccagacgugccugaaucguaucgcugccgggacauuuaacgcaggagaguucucucuacccaccuuugauagccucaauauuacugccgcuucacugaacgacgauggucuugacaaucauaccauauugcuguacuauaguacagccgcauccagccucgcggucacccugaugcuugcuaucuucauuguguacauggucucucgcgauaacgugucauguaguaucugccuguga

SEQ ID NO: 155702 - RNA, 1755 nt, Artificial Sequence; identical to SEQ ID NO: 154474
  derived and/or modified CDS sequence (opt3) from hemagglutinin__InfluenzaB__AGX23259

SEQ ID NO: 155703 - RNA, 1755 nt, Artificial Sequence; identical to SEQ ID NO: 154474
  derived and/or modified CDS sequence (opt3) from hemagglutinin__InfluenzaB__AGX23270

SEQ ID NO: 155704 - RNA, 1755 nt, Artificial Sequence
  derived and/or modified CDS sequence (opt3) from hemagglutinin__InfluenzaB__AGX23281
augaaggccaucauugugcugcucauggucguuaccagcaacgcugacagaauaugcacaggcaucacuuccucuaauucaccccacgugguaaaaacggcaacccagggggaggugaacgucacaggagugauuccucuuacuaccacaccaaccaagaguuacuucgccaaucugaaagguacuaggacacggggcaaguuguguccggauugcuuaaacuguaccgaccuggauguugcgcuagggcgccccaugugcgugggaacgacuccuagcgcuaaagccuccauccuccaugaaguccgaccagugaccucuggcuguuuucccauuaugcacgaccguacaaagaucagacaacuggcaaaucuucugagggguuaugagaacauacgguugucgacucagaauguaaucgaugccgaaaaggcuccugggggaccauaccgccucggcaccucaggcagcugccccaacgcagccaguaaauccggguucuuugcuacaauggccugggcgguuccuaaggacaauaacaaaaaugcaaccaacccacugacgguggaggucccguauauuuguacugaaggagaggaucagaucacagugugggguuuccauucugacaauaagacccagaugaaaaaccuguacggcgauagcaauccccaaaaguuuacuuccucagccaacggggugacaacccacuaugucagucagauuggaggcuucccugaccagacggaggauggugggcucccacagagcggaagaaucguuguggacuacaugaugcaaaagcccggcaaaaccggcacaauaguauaucagcgcgggguguuacugccucagaaggucuggugcgcuucuggacgguccaaagugauuaaggguucacuuccauugaucggcgaagccgauugucugcaugagaaauacgggggacuaaacaagagcaaacccuacuauacuggcgaacacgcaaaggcuauugguaauugcccgaucuggguuaagaccccucucaaacuggccaacgggacaaaguacaggcccccagcgaaacuucugaaggagcgaggcuuuuucggagccaucgcaggcuuuuuggaagggggaugggaagguaugauugcuggcuggcacggguauacuucccauggagcccacggcguggcugucgccgcagaccucaaaucuacccaggaggccauaaauaagaucacaaagaaccugaauaguuuaagcgaacuggaggugaaaaaccuccaaagacuuucgggugcuauggacgaacugcauucugagauuuuggagcuagaugaaaagguagacgaucugagggcggacaccaucuccucacagauagagcucgcaguucugcuuaguaaugaagggauuaucaacagcgaggaugaacaccuguuggcccucgagcggaaacugaagaaaauguuaggcccuuccgcuguggacaucggaaauggcuguuucgagacuaagcacaagugcaaccagacgugccuggaucguauugccgcagggacauuuaaugccggagaguucucucuacccaccuuugacagccucaacaucacugcugccucacugaaugaugacggucuugauaaccauaccauuuugcuguacuauaguacagcagcguccagccucgcugucacccugaugcuugccauauucaucguguacauggucucucgcgacaaugugucauguaguauuugccuguga

SEQ ID NO: 155705 - RNA, 1755 nt, Artificial Sequence
  derived and/or modified CDS sequence (opt3) from hemagglutinin__InfluenzaB__AGX23292
augaaggccaucauugugcugcucauggucguuaccagcaacgcugacagaauaugcacaggcaucacuuccucuaauucaccccacgugguaaaaacggcaacccagggggaggugaacgucacaggagugauuccucuuacuaccacaccaaccaagaguuacuucgccaaucugaaagguacuaggacacggggcaaguuguguccggauugcuuaaacuguaccgaccuggauguugcgcuagggcgccccaugugcgugggaacgacuccuagcgcuaaagccuccauccuccaugaaguccgaccagugaccucuggcuguuuucccauuaugcacgaccguacaaagaucagacaacuggcaaaucuucugagggguuaugagaacauacgguugucgacucagaauguaaucgaugccgaaaaggcuccugggggaccauaccgccucggcaccucaggcagcugccccaacgcaaauaguaaauccggguucuuugccacaauggcuugggccguuccuaaggacaacaauaaaaacgcgaccaauccacugacgguggaggucccguauauuuguacugaaggagaggaucagaucacagugugggguuuccauucugacaacaagacccagaugaaaaaucuguacggcgauagcaacccccaaaaguuuacuuccucagcaaacggggugacaacccacuaugucagucagauuggaggcuucccugaccagacggaggauggugggcucccacagagcggaagaaucguuguggacuacaugaugcaaaagcccggcaaaaccggcacaauaguauaucagcgcgggguguuacugccucagaaggucuggugcgccucuggacgguccaaagugauuaaggguucacuuccauugaucggcgaagcugauugucugcaugagaaauacgggggacuaaauaagagcaaacccuacuauacuggcgaacacgccaaggcaauugguaacugcccgaucuggguuaagaccccucucaaacuggcuaaugggacaaaguacaggcccccagccaaacuucugaaggagcgaggcuuuuucggagcgaucgccggcuuuuuggaagggggaugggaagguaugauugcaggcuggcacggguauaccagucauggagcucacggcguggccgucgcugccgaccucaaaucuacucaggaggcaauaaacaagaucacaaagaaucugaacuccuuaagcgaacuggaggugaaaaaucuccaaagacuuucgggugccauggacgaacugcauaacgagauuuuggagcuagaugaaaagguagacgaucugagggcugacaccaucucuucccagauagagcucgcgguucugcuuucaaaugaagggauuaucaacagugaggaugaacaccuguuggcacucgagcggaaacugaagaaaauguuaggcccuagcgccguggacaucggaaauggcuguuucgagacuaagcacaagugcaaccagacgugccuggaucguauugcugccgggacauuuaaugcaggagaguucucccuacccaccuuugacucucucaacaucacugccgcuagccugaaugaugacggucuugauaaccauaccauuuugcuguacuauucaacagccgcaaguucccucgcggucacccugaugcuugcuauauucaucguguacauggucagccgcgacaacgugucuuguucaauuugccuguga

SEQ ID NO: 155706 - RNA, 1755 nt, Artificial Sequence
  derived and/or modified CDS sequence (opt3) from hemagglutinin__InfluenzaB__AGX23314
augaaggccaucauugugcugcucauggucguuaccagcaacgcugacagaauaugcacaggcaucacuuccucuaauucaccccacgugguaaaaacggcaacccagggggaggugaacgucacaggagugauuccucuuacuaccacaccaaccaagaguuacuucgccaaucugaaagguacuaggacacggggcaaguuguguccggauugcuuaaacuguaccgaccuggauguugcgcuagggcgccccaugugcgugggaacgacuccuagcgcuaaagccuccauccuccaugaaguccgaccagugaccucuggcuguuuucccauuaugcacgaccguacaaagaucagacaacuggcaaaucuucugagggguuaugagaacauacgguugucgacucagaauguaaucgaugccgaacgcgcuccugggggaccauacagacucggcaccucaggcagcugccccaacgcaacaaguaaguccggguucuuugccaccauggcuugggccguuccuaaagacaauaacaagaaugcgacgaacccacugacuguggaggucccguauauuuguacagaaggagaggaucagaucaccgugugggguuuccauucugacaauaaaacucagaugaagaaccuguacggcgauagcaauccccaaaaauuuacauccucagcaaacggggugaccacgcacuaugucagucagauuggaggcuucccugaccagaccgaggauggugggcucccacagagcggaaggaucguuguggacuacaugaugcaaaagcccggcaagacaggcacuauaguauaucagcgcgggguguuacugccucagaaagucuggugcgccucuggacgguccaaggugauuaaagguucacuuccauugaucggcgaagcugauugucugcaugagaaguacgggggacuaaacaaaagcaagcccuacuauaccggcgaacacgccaaagcaauugguaauugcccgaucuggguuaagacaccucucaagcuggcuaacgggacuaaauaccgacccccagccaagcugcugaaagagagaggcuuuuucggagcgaucgccggcuuuuuggaagggggaugggaagguaugauugcaggcuggcacggguauaccagucauggagcucacggcguggccgucgcugccgaccucaagucuacacaggaggcaauaaauaaaaucaccaagaaccuuaauuccuuaagcgaacuggaggugaagaaccuccaaaggcuuucgggugccauggacgaacugcauaaugagauuuuggagcuagaugaaaaaguagacgaucugcgggcugacacuaucucuucccagauagagcucgcgguucugcuuucaaacgaagggauuaucaauagugaggaugaacaccuguuggcacucgagcguaagcugaaaaagauguuaggcccuagcgccguggacaucggaaacggcuguuucgagacgaaacacaagugcaaucagacaugccuggaucgcauugcugccgggaccuuuaacgcaggagaguucucccuacccacuuuugacucucucaauaucaccgccgcuagccugaacgaugacggucuugauaaucauacaauuuugcuguacuauucaaccgccgcaaguucccucgcggucacucugaugcuugcuauauucaucguguacauggucagcagagacaacgugucuuguucaauuugccuguga

SEQ ID NO: 155707 - RNA, 1755 nt, Artificial Sequence; identical to SEQ ID NO: 155706
  derived and/or modified CDS sequence (opt3) from hemagglutinin__InfluenzaB__AGX23325

SEQ ID NO: 155708 - RNA, 1755 nt, Artificial Sequence; identical to SEQ ID NO: 155706
  derived and/or modified CDS sequence (opt3) from hemagglutinin__InfluenzaB__AGX23336

SEQ ID NO: 155709 - RNA, 1755 nt, Artificial Sequence; identical to SEQ ID NO: 155706
  derived and/or modified CDS sequence (opt3) from hemagglutinin__InfluenzaB__AGX23347

SEQ ID NO: 155710 - RNA, 1755 nt, Artificial Sequence; identical to SEQ ID NO: 155706
  derived and/or modified CDS sequence (opt3) from hemagglutinin__InfluenzaB__AGX23358

SEQ ID NO: 155711 - RNA, 1755 nt, Artificial Sequence; identical to SEQ ID NO: 155706
  derived and/or modified CDS sequence (opt3) from hemagglutinin__InfluenzaB__AGX23369

SEQ ID NO: 155712 - RNA, 1755 nt, Artificial Sequence; identical to SEQ ID NO: 155706
  derived and/or modified CDS sequence (opt3) from hemagglutinin__InfluenzaB__AGX23380

SEQ ID NO: 155713 - RNA, 1755 nt, Artificial Sequence; identical to SEQ ID NO: 154474
  derived and/or modified CDS sequence (opt3) from hemagglutinin__InfluenzaB__AGX23391

SEQ ID NO: 155714 - RNA, 1755 nt, Artificial Sequence
  derived and/or modified CDS sequence (opt3) from hemagglutinin__InfluenzaB__AGX23413
augaaggccaucauugugcugcucauggucguuaccagcaacgcugacagaauaugcacaggcaucacuuccucuaauucaccccacgugguaaaaacggcaacccagggggaggugaacgucacaggagugauuccucuuacuaccacaccaaccaagaguuacuucgccaaucugaaagguacuaggacacggggcaaguuguguccggauugcuuaaacuguaccgaccuggauguugcgcuagggcgccccaugugcgugggaacgacuccuagcgcuaaagccuccauccuccaugaaguccgaccagugaccucuggcuguuuucccauuaugcacgaccguacaaagaucagacaacuggcaaaucuucugagggguuaugagaacauacgguugucgaaucagaacguaaucgaugccgaacgcgcuccugggggaccauacagacucggcacuucaggcagcugccccaaugcaaccaguaaguccggguucuuugccacaauggcuugggccguuccuaaagacaacaauaagaacgcgaccaauccacugacgguggaggucccguauauuuguacugaaggagaggaucagaucacagugugggguuuccauucugacaacaaaacccagaugaagaaucuguacggcgauagcaacccccaaaaauuuacuuccucagcaaacggggugacaacccacuaugucagucagauuggaggcuucccugaccagacggaggauggugggcucccacagagcggaaggaucguuguggacuacaugaugcaaaagcccggcaagaccggcacaauaguauaucagcgcgggguguuacugccucagaaagucuggugcgccucuggacgguccaaggugauuaaagguucacuuccauugaucggcgaagcugauugucugcaugagaaguacgggggacuaaauaaaagcaagcccuacuauacuggcgaacacgccaaagcaauugguaacugcccgaucuggguuaagaccccucucaagcuggcuaaugggacaaaauaccgacccccagccaaacuucugaaggagagaggcuuuuucggagcgaucgccggcuuuuuggaagggggaugggaagguaugauugcaggcuggcacggguauaccagucauggagcucacggcguggccgucgcugccgaccucaagucuacucaggaggcaauaaacaaaaucacaaagaaucugaacuccuuaagcgaacuggaggugaagaaucuccaaaggcuuucgggugccauggacgaacugcauaacgagauuuuggagcuagaugaaaaaguagacgaucugcgggcugacaccaucucuucccagauagagcucgcgguucugcuuucaaaugaagggauuaucaacagugaggaugaacaccuguuggcacucgagcguaagcugaaaaagauguuaggcccuagcgccguggacaucggaaauggcuguuucgagacuaaacacaagugcaaccagacgugccuggaucgcauugcugccgggacauuuaaugcaggagaguucucccuacccaccuuugacucucucaacaucacugccgcuagccugaaugaugacggucuugauaaccauaccauuuugcuguacuauucaacagccgcaaguucccucgcggucacccugaugcuugcuauauucaucguguacauggucagcagagacaacgugucuuguucaauuugccuguga

SEQ ID NO: 155715 - RNA, 1755 nt, Artificial Sequence; identical to SEQ ID NO: 155714
  derived and/or modified CDS sequence (opt3) from hemagglutinin__InfluenzaB__AGX23424

SEQ ID NO: 155716 - RNA, 1755 nt, Artificial Sequence; identical to SEQ ID NO: 154868
  derived and/or modified CDS sequence (opt3) from hemagglutinin__InfluenzaB__AGX23435

SEQ ID NO: 155717 - RNA, 1755 nt, Artificial Sequence; identical to SEQ ID NO: 154779
  derived and/or modified CDS sequence (opt3) from hemagglutinin__InfluenzaB__AGX23446

SEQ ID NO: 155718 - RNA, 1755 nt, Artificial Sequence; identical to SEQ ID NO: 154868
  derived and/or modified CDS sequence (opt3) from hemagglutinin__InfluenzaB__AGX23457

SEQ ID NO: 155719 - RNA, 1755 nt, Artificial Sequence; identical to SEQ ID NO: 154779
  derived and/or modified CDS sequence (opt3) from hemagglutinin__InfluenzaB__AGX23468

SEQ ID NO: 155720 - RNA, 1755 nt, Artificial Sequence; identical to SEQ ID NO: 154474
  derived and/or modified CDS sequence (opt3) from hemagglutinin__InfluenzaB__AGX23479

SEQ ID NO: 155721 - RNA, 1755 nt, Artificial Sequence; identical to SEQ ID NO: 154474
  derived and/or modified CDS sequence (opt3) from hemagglutinin__InfluenzaB__AGX23490

SEQ ID NO: 155722 - RNA, 1755 nt, Artificial Sequence; identical to SEQ ID NO: 155095
  derived and/or modified CDS sequence (opt3) from hemagglutinin__InfluenzaB__AGX23501

SEQ ID NO: 155723 - RNA, 1755 nt, Artificial Sequence
  derived and/or modified CDS sequence (opt3) from hemagglutinin__InfluenzaB__AGX23512
augaaggccaucauugugcugcucauggucguuaccagcaacgcugacagaauaugcacaggcaucacuuccucuaauucaccccacgugguaaaaacggcaacccagggggaggugaacgucacaggagugauuccucuuacuaccacaccaaccaagaguuacuucgccaaucugaaagguacuaagacaaggggcaaauuguguccggauugcuuaaacuguaccgaccuggauguugcgcuagggcggcccaugugcgugggaacgacuccuagcgcuaaggccuccauccuccaugaaguccgcccagugaccucuggcuguuuucccauuaugcacgaccgaacaaagauccgucaacuggcaaaucuucugagagguuaugagaacauaagguugucgacucagaauguaaucgaugccgaaaaagcuccugggggaccauaccggcucggcaccucaggcagcugccccaacgcaacaaguaaguccggguucuuugccaccauggcuugggccguuccuaaagacaauaacaagaaugcgacgaacccacugacuguggaggucccguauauuuguacagaaggagaggaucagaucaccgugugggguuuccauucugacaauaaaacucagaugaagacacuguacggcgauagcaacccccaaaaguuuaccuccucagcaaauggggugacgacccacuaugucagucagauuggaggcuucccugaccagacagaggauggugggcucccacagagcggacgcaucguuguggacuacaugaugcaaaaacccggcaagacuggcaccauaguauaucagagagggguguuacugccucagaaagucuggugcgccucuggaagguccaaggugauuaaagguucacuuccauugaucggcgaagcugauugucugcaugagaaguacgggggacuaaacaaaagcaagcccuacuauacaggcgaacacgccaaggcaauugguaacugcccgaucuggguuaaaacuccucucaagcuggcuaaugggaccaaauaccggcccccagccaaacuucugaaggagcgcggcuuuuucggagcgaucgccggcuuuuuggaagggggaugggaagguaugauugcaggcuggcacggguauacaagucauggagcucacggcguggccgucgcugccgaccucaagucuacccaggaggcaauaaacaagaucacuaaaaaucugaacuccuuaagcgaacuggaggugaagaaucuccaacgacuuucgggugccauggacgaacugcauaacgagauuuuggagcuagaugaaaaaguagacgaucugagagcugacacgaucucuucccagauagagcucgcgguucugcuuucaaaugaagggauuaucaacagugaggaugaacaccuguuggcacucgagaggaagcugaaaaagauguuaggcccuagcgccguggacaucggaaauggcuguuucgagacaaagcacaaaugcaaccagaccugccuggaucggauugcugccgggacuuuuaaugcaggagaguucucccuacccaccuuugacucucucaacaucacagccgcuagccugaaugaugacggucuugauaaccauaccauuuugcuguacuauucaacugccgcaaguucccucgcggucacacugaugcuugcuauauucaucguguacauggucagccgugacaaugugucuuguucaauuugccuguga

SEQ ID NO: 155724 - RNA, 1755 nt, Artificial Sequence; identical to SEQ ID NO: 154474
  derived and/or modified CDS sequence (opt3) from hemagglutinin__InfluenzaB__AGX23523

SEQ ID NO: 155725 - RNA, 1755 nt, Artificial Sequence; identical to SEQ ID NO: 154779
  derived and/or modified CDS sequence (opt3) from hemagglutinin__InfluenzaB__AGX23534

SEQ ID NO: 155726 - RNA, 1755 nt, Artificial Sequence; identical to SEQ ID NO: 154779
  derived and/or modified CDS sequence (opt3) from hemagglutinin__InfluenzaB__AGX23545

SEQ ID NO: 155727 - RNA, 1755 nt, Artificial Sequence; identical to SEQ ID NO: 154474
  derived and/or modified CDS sequence (opt3) from hemagglutinin__InfluenzaB__AGX23556

SEQ ID NO: 155728 - RNA, 1755 nt, Artificial Sequence; identical to SEQ ID NO: 154474
  derived and/or modified CDS sequence (opt3) from hemagglutinin__InfluenzaB__AGX23567

SEQ ID NO: 155729 - RNA, 1755 nt, Artificial Sequence; identical to SEQ ID NO: 154474
  derived and/or modified CDS sequence (opt3) from hemagglutinin__InfluenzaB__AGX23578

SEQ ID NO: 155730 - RNA, 1755 nt, Artificial Sequence; identical to SEQ ID NO: 154474
  derived and/or modified CDS sequence (opt3) from hemagglutinin__InfluenzaB__AGX23600

SEQ ID NO: 155731 - RNA, 1755 nt, Artificial Sequence
  derived and/or modified CDS sequence (opt3) from hemagglutinin__InfluenzaB__AGX23611
augaaggccaucauugugcugcucauggucguuaccagcaacgcugacagaauaugcacaggcaucacuuccucuaauucaccccacgugguaaaaacggcaacccagggggaggugaacgucacaggagugauuccucuuacuaccacaccaaccaagaguuacuucgccaaucugaaagguacuaggacacggggcaaguuguguccggauugcuuaaacuguaccgaccuggauguugcgcuagggcgccccaugugcgugggaacgacuccuagcgcuaaagccuccauccuccaugaaguccgaccagugaccucuggcuguuuucccauuaugcacgaccguacaaagaucagacaacuggcaaaucuucugagggguuaugagaacauacgguugucgacucagaauguaaucgaugccgaaaaggcuccugggggaccauaccgccucggcaccucaggcagcugccccaacgcaacaaguaaauccggguucuuugccaccauggcuugggccguuccuaaggacaauaacaaaaaugcgacgaacccacugacuguggaggucccguauauuuguacagaaggagaggaucagaucaccgugugggguuuccauucugacaauaagacucagaugaaaaaccuguacggcgauagcaauccccaaaaguuuacauccucagcaaacggggugaccacgcacuaugucagucagauuggaggcuucccugaccagaccgaggauggugggcucccacagagcggaagaaucguuguggacuacaugaugcaaaagcccggcaaaacaggcacuauaguauaucagcgcgggguguuacugccucagaaggucuggugcgccucuggacgguccaaagugauuaaggguucacuuccauugaucggcgaagcugauugucugcaugagaaauacgggggacuaaacaagagcaaacccuacuauaccggcgaacacgccaaggcaauugguaauugcccgaucuggguuaagacaccucucaaacuggcuaacgggacuaaguacaggcccccagccaaacuucugaaggagcgaggcuuuuucggagcgaucgccggcuuuuuggaagggggaugggaagguaugauugcaggcuggcacggguauaccagucauggagcucacggcguggccgucgcugccgaccucaaaucuacacaggaggcaauaaauaagaucaccaagaacuuaaauucccugagcgaacuggagauuaaaaaccuccaaagacuuucgggugccauggacgaacugcauaaugagaucuuggagcuagaugaaaagguggacgaucugagggcugacacuauaucuucccagauugagcucgcgguacugcuuucaaacgaagggaucaucaauagugaggaugaacaccuguuggcacucgagcggaaacugaagaaaauguuaggcccuagcgccguugacauuggaaacggcuguuucgagacgaagcacaagugcaaucagacaugccuggaucguaucgcugccgggaccuuuaacgcaggagaguucucccuacccacuuuugacucucucaauauuaccgccgcuagccugaacgaugacggucuugauaaucauacaauauugcuguacuauucaaccgccgcaaguucccucgcggugacucugaugcuugcuaucuucauugucuacauggugagccgcgacaacgucucuuguucaaucugccuguga

SEQ ID NO: 155732 - RNA, 1755 nt, Artificial Sequence; identical to SEQ ID NO: 154474
  derived and/or modified CDS sequence (opt3) from hemagglutinin__InfluenzaB__AGX23622

SEQ ID NO: 155733 - RNA, 1755 nt, Artificial Sequence; identical to SEQ ID NO: 154779
  derived and/or modified CDS sequence (opt3) from hemagglutinin__InfluenzaB__AGX23633

SEQ ID NO: 155734 - RNA, 1755 nt, Artificial Sequence; identical to SEQ ID NO: 154779
  derived and/or modified CDS sequence (opt3) from hemagglutinin__InfluenzaB__AGX23644

SEQ ID NO: 155735 - RNA, 1755 nt, Artificial Sequence; identical to SEQ ID NO: 154474
  derived and/or modified CDS sequence (opt3) from hemagglutinin__InfluenzaB__AGX23655

SEQ ID NO: 155736 - RNA, 1755 nt, Artificial Sequence; identical to SEQ ID NO: 154779
  derived and/or modified CDS sequence (opt3) from hemagglutinin__InfluenzaB__AGX23666

SEQ ID NO: 155737 - RNA, 1755 nt, Artificial Sequence
  derived and/or modified CDS sequence (opt3) from hemagglutinin__InfluenzaB__AGX23677
augaaggccaucauugugcugcucauggucguuaccagcaacgcugacagaauaugcacaggcaucacuuccucuaauucaccccacgugguaaaaacggcaacccagggggaggugaacgucacaggagugauuccucuuacuaccacaccaaccaagaguuacuucgccaaucugaaagguacuaagacaaggggcaaauuguguccggauugcuuaaacuguaccgaccuggauguugcgcuagggcggcccaugugcgugggaacgacuccuagcgcuaaggccuccauccuccaugaaguccgcccagugaccucuggcuguuuucccauuaugcacgaccgaacaaagauccgucaacuggcaaaucuucugagagguuaugagaaaauaagguugucgacucagaacguaaucgaugccgaaaaggcuccugggggaccauaccggcucggcaccucaggcagcugccccaaugcaacaaguaaauccggguucuuugccaccauggcuugggccguuccuaaggacaacaauaaaaacgcgacgaauccacugacuguggaggucccguauauuuguaucgaaggagaggaucagauuacagugugggguuuccauucugacaacaagacccagaugaagaaucuguacggcgauagcaacccccaaaaauuuacuuccucagcaaauggggugacaacccacuaugucagucagaucggaggcuucccugaccagacggaggauggugggcucccacagagcggacgcauaguuguggacuacaugaugcaaaagcccggcaaaaccggcacaauuguauaucagagagggguguuacugccucagaaggucuggugcgccucuggaagguccaaagugaucaaggguucacuuccauugauuggcgaagcugauugucugcaugagaaauacgggggacuaaacaagagcaagcccuacuauacuggcgaacacgccaaagcaaucgguaacugcccgaucuggguuaagaccccucucaaacuggcuaaugggacaaaguaccggcccccagccaaacuucugaaggagcgcggcuuuuucggagcgauugccggcuuuuuggaagggggaugggaagguaugauagcaggcuggcacggguauaccagucauggagcucacggcguggccgucgcugccgaccucaagucuacucaggaggcaaucaacaaaauuacaaagaaucugaacuccuuaagcgaacuggaggugaaaaaucuccaacgacuuucgggugccauggacgaacugcauaacgagaucuuggagcuagaugaaaagguagacgaucugagagcugacaccauaucuucccagauugagcucgcgguucugcuuucaaaugaagggaucaucaacagugaggaugaacaccuguuggcacucgagaggaaacugaagaagauguuaggcccuagcgccguggacauuggaaauggcuguuucgagacuaaacacaagugcaaccagacgugccuggaucggaucgcugccgggacauuuaaugcaggagaguucucccuacccaccuuugacucucucaacauuacugccgcuagccugaaugaugacggucuugauaaccauaccauauugcuguacuauucaacagccgcaaguucccucgcggucacccugaugcuugcuaucuucauuguguacauggucagccgugacaaugugucuuguucaaucugccuguga

SEQ ID NO: 155738 - RNA, 1755 nt, Artificial Sequence; identical to SEQ ID NO: 154779
  derived and/or modified CDS sequence (opt3) from hemagglutinin__InfluenzaB__AGX23688

SEQ ID NO: 155739 - RNA, 1755 nt, Artificial Sequence; identical to SEQ ID NO: 154779
  derived and/or modified CDS sequence (opt3) from hemagglutinin__InfluenzaB__AGX23699

SEQ ID NO: 155740 - RNA, 1755 nt, Artificial Sequence; identical to SEQ ID NO: 154474
  derived and/or modified CDS sequence (opt3) from hemagglutinin__InfluenzaB__AGX23710

SEQ ID NO: 155741 - RNA, 1755 nt, Artificial Sequence; identical to SEQ ID NO: 154779
  derived and/or modified CDS sequence (opt3) from hemagglutinin__InfluenzaB__AGX23721

SEQ ID NO: 155742 - RNA, 1755 nt, Artificial Sequence; identical to SEQ ID NO: 154474
  derived and/or modified CDS sequence (opt3) from hemagglutinin__InfluenzaB__AGX23732

SEQ ID NO: 155743 - RNA, 1755 nt, Artificial Sequence; identical to SEQ ID NO: 154779
  derived and/or modified CDS sequence (opt3) from hemagglutinin__InfluenzaB__AGX23743

SEQ ID NO: 155744 - RNA, 1755 nt, Artificial Sequence; identical to SEQ ID NO: 154779
  derived and/or modified CDS sequence (opt3) from hemagglutinin__InfluenzaB__AGX23754

SEQ ID NO: 155745 - RNA, 1755 nt, Artificial Sequence; identical to SEQ ID NO: 154474
  derived and/or modified CDS sequence (opt3) from hemagglutinin__InfluenzaB__AGX23765

SEQ ID NO: 155746 - RNA, 1755 nt, Artificial Sequence; identical to SEQ ID NO: 154779
  derived and/or modified CDS sequence (opt3) from hemagglutinin__InfluenzaB__AGX23776

SEQ ID NO: 155747 - RNA, 1755 nt, Artificial Sequence; identical to SEQ ID NO: 154779
  derived and/or modified CDS sequence (opt3) from hemagglutinin__InfluenzaB__AGX23787

SEQ ID NO: 155748 - RNA, 1755 nt, Artificial Sequence; identical to SEQ ID NO: 154474
  derived and/or modified CDS sequence (opt3) from hemagglutinin__InfluenzaB__AGX23798

SEQ ID NO: 155749 - RNA, 1755 nt, Artificial Sequence; identical to SEQ ID NO: 154474
  derived and/or modified CDS sequence (opt3) from hemagglutinin__InfluenzaB__AGX23809

SEQ ID NO: 155750 - RNA, 1755 nt, Artificial Sequence; identical to SEQ ID NO: 154474
  derived and/or modified CDS sequence (opt3) from hemagglutinin__InfluenzaB__AGX23820

SEQ ID NO: 155751 - RNA, 1755 nt, Artificial Sequence; identical to SEQ ID NO: 154779
  derived and/or modified CDS sequence (opt3) from hemagglutinin__InfluenzaB__AGX23831

SEQ ID NO: 155752 - RNA, 1755 nt, Artificial Sequence; identical to SEQ ID NO: 154474
  derived and/or modified CDS sequence (opt3) from hemagglutinin__InfluenzaB__AGX23842

SEQ ID NO: 155753 - RNA, 1755 nt, Artificial Sequence
  derived and/or modified CDS sequence (opt3) from hemagglutinin__InfluenzaB__AGX23853
augaaggccaucauugugcugcucauggucguuaccagcaacgcugacagaauaugcacaggcaucacuuccucuaauucaccccacgugguaaaaacggcaacccagggggaggugaacgucacaggagugauuccucuuacuaccacaccaaccaagaguuacuucgccaaucugaaagguacuaggacacggggcaaguuguguccggauugcuuaaacuguaccgaccuggauguugcgcuagggcgccccaugugcgugggaacgacuccuagcgcuaaagccuccauccuccaugaaguccgaccagugaccucuggcuguuuucccauuaugcacgaccguacaaagaucagacaacuggcaaaucuucugagggguuaugagaacauacgguugucgauccagaauguaauugaugccgaaaaggcuccugggggaccauaccgccucggcacuucaggcagcugccccaacgcaaccaguaaauccggguucuuugccacaauggcuugggccguuccuaaggacaauaacaaaaaugcgaccaacccacugacgguggaggucccguauaucuguacugaaggagaggaucagauuacagugugggguuuccauucugacaauaagacccagaugaaaaaccuguacggcgauagcaauccccaaaaguuuacuuccucagcaaacggggugacaacccacuaugucagucagaucggaggcuucccugaccagacggaggauggugggcucccacagagcggaagaauaguuguggacuacaugaugcaaaagucuggcaaaaccggcacaauuguauaucagaggggaguguuacugccccagaaggucuggugcgccuccgggcggucaaaagugaucaaggguagccuuccuuugauuggcgaagcugauugucugcaugagaaauacgggggacuaaacaagaguaaaccauacuauacuggcgaacacgccaaggcaaucgguaauugccccaucuggguuaagaccccgcucaaacuggcuaacgggacaaaguaccgcccucccgccaaacuucugaaggagcgaggcuuuuucggagcgauugccggcuuuuuggaagggggaugggaagguaugauagcaggcuggcacggguauacuucucauggagcucacggcguggccgucgcugccgaccucaaauccacccaggaggcaaucaauaagauuacaaagaaccugaauagcuuaucggaacuggaggugaaaaaccuccaaagacuuucuggugccauggacgaacugcauaaugagaucuuggagcuagaugaaaagguagacgaucugagggcugacaccauauccucacagauugagcucgcgguucugcuuaguaacgaagggaucaucaauagcgaggaugaacaccuguuggcacucgagcggaaacugaagaaaauguuaggcccauccgccguggacauuggaaacggcuguuucgagacuaagcacaagugcaaucagacgugccuggaucguaucgcugccgggacauuuaacgcaggagaguucucucuaccuaccuuugacagccucaauauuacugccgcuucacugaacgaugacggucuugauaaucauaccauauugcuguacuauaguacagccgcauccagccucgcggucacccugaugcuugcuaucuucauuguguacauggucucucgcgacaacgugucauguaguaucugccuguga

SEQ ID NO: 155754 - RNA, 1755 nt, Artificial Sequence; identical to SEQ ID NO: 154474
  derived and/or modified CDS sequence (opt3) from hemagglutinin__InfluenzaB__AGX23864

SEQ ID NO: 155755 - RNA, 1755 nt, Artificial Sequence; identical to SEQ ID NO: 154779
  derived and/or modified CDS sequence (opt3) from hemagglutinin__InfluenzaB__AGX23875

SEQ ID NO: 155756 - RNA, 1755 nt, Artificial Sequence; identical to SEQ ID NO: 154474
  derived and/or modified CDS sequence (opt3) from hemagglutinin__InfluenzaB__AGX23886

SEQ ID NO: 155757 - RNA, 1755 nt, Artificial Sequence
  derived and/or modified CDS sequence (opt3) from hemagglutinin__InfluenzaB__AGX23897
augaaggccaucauugugcugcucauggucguuaccagcaacgcugacagaauaugcacaggcaucacuuccucuaauucaccccacgugguaaaaacggcaacccagggggaggugaacgucacaggagugauuccucuuacuaccacaccaaccaagaguuacuucgccaaucugaaagguacuaggacacggggcaaguuguguccggauugcuuaaacuguaccgaccuggauguugcgcuagggcgccccaugugcgugggaacgacuccuagcgcuaaagccuccauccuccaugaaguccgaccagugaccucuggcuguuuucccauuaugcacgaccguacaaagaucagacaacuggcaaaucuucugagggguuaugagaacauacgguugucgacucagaauguaaucgaugccgaaaaggcuccugggggaccauaccgccucggcaccucaggcagcugccccaacgcaacaaguaaauccggguucuuugccaccauggcuugggccguuccuaaggacaauaacaaaaaugcgacgaacccacugacuguggaggucccguauauuuguacagaaggagaggaucagaucaccgugugggguuuccauucugacaauaagacucagaugaaaaaccuguacggcgauagcaauccccaaaaguuuacauccucagcaaacggggugaccacgcacuaugucagucagauuggaggcuucccugaccagaccgaggauggugggcucccacagagcggaagaaucguuguggacuacaugaugcaaaagucuggcaaaacaggcacuauaguauaucagaggggaguguuacugccccagaaggucuggugcgccuccgggcggucaaaagugauuaaggguagccuuccuuugaucggcgaagcugauugucugcaugagaaauacgggggacuaaacaagaguaaaccauacuauaccggcgaacacgccaaggcaauugguaauugccccaucuggguuaagacaccgcucaaacuggcuaacgggacuaaguaccgcccucccgccaaacuucugaaggagcgaggcuuuuucggagcgaucgccggcuuuuuggaagggggaugggaagguaugauugcaggcuggcacggguauaccucucauggagcucacggcguggccgucgcugccgaccucaaauccacacaggaggcaauaaauaagaucaccaagaaccugaauagcuuaucggaacuggaggugaaaaaccuccaaagacuuucuggugccauggacgaacugcauaaugagauuuuggagcuagaugaaaagguagacgaucugagggcugacacuaucuccucacagauagagcucgcgguucugcuuaguaacgaagggauuaucaauagcgaggaugaacaccuguuggcacucgagcggaaacugaagaaaauguuaggcccauccgccguggacaucggaaacggcuguuucgagacgaagcacaagugcaaucagacaugccuggaucguauugcugccgggaccuuuaacgcaggagaguucucucuaccuacuuuugacagccucaauaucaccgccgcuucacugaacgaugacggucuugauaaucauacaauuuugcuguacuauaguaccgccgcauccagccucgcggucacucugaugcuugcuauauucaucguguacauggucucucgcgacaacgugucauguaguauuugccuguga

SEQ ID NO: 155758 - RNA, 1755 nt, Artificial Sequence
  derived and/or modified CDS sequence (opt3) from hemagglutinin__InfluenzaB__AGX23908
augaaggccaucauugugcugcucauggucguuaccagcaacgcugacagaauaugcacaggcaucacuuccucuaauucaccccacgugguaaaaacggcaacccagggggaggugaacgucacaggagugauuccucuuacuaccacaccaaccaagaguuacuucgccaaucugaaagguacuaggacacggggcaaguuguguccggauugcuuaaacuguaccgaccuggauguugcgcuagggcgccccaugugcgugggaacgacuccuagcgcuaaagccuccauccuccaugaaguccgaccagugaccucuggcuguuuucccauuaugcacgaccguacaaagaucagacaacuggcaaaucuucugagggguuaugagaacauacgguugucgacucagaauguaaucgaugccgaaaaggcuccugggggaccauaccgccucggcaccucaggcagcugccccaacgcaacaaguaaauccggguucuuuguuaccauggccugggcugugccuaaggacaauaacaaaaaugccacgaacccacugacugucgaggugccguauauuuguacagaaggagaggaucagaucaccgugugggguuuccauucugacaauaagacucagaugaaaaaccuguacggcgauagcaauccccaaaaguuuacauccucagcgaacggggucaccacgcacuauguuagucagauuggaggcuucccugaccagaccgaggauggugggcucccacagagcggaagaaucgugguagacuacaugaugcaaaagcccggcaaaacaggcacuauaguguaucagcgcggggucuuacugccucagaagguguggugcgcaucuggacgguccaaaguuauuaaggguucacuuccauugaucggcgaagccgauugucugcaugagaaauacgggggacuaaacaagagcaaacccuacuauaccggcgaacacgcuaaggccauugguaauugcccgaucugggugaagacaccucucaaacuggcaaacgggacuaaguacaggcccccagcuaaacuucugaaggagcgaggcuuuuucggagccaucgcgggcuuuuuggaagggggaugggaagguaugauugccggcuggcacggguauaccagucauggagcacacggcgucgcuguggccgcugaccucaaaucuacacaggaggccauaaauaagaucaccaagaacuuaaauucccugagcgaacuggagguuaaaaaccuccaaagacuuucgggugcaauggacgaacugcauaaugagauuuuggagcuagaugaaaagguagacgaucugagggccgacacuaucucuucccagauagagcucgcugugcugcuuucaaacgaagggauuaucaauagugaggaugaacaccuguuggcgcucgagcggaaacugaagaaaauguuaggcccuagcgcagucgacaucggaaacggcuguuucgagacgaagcacaagugcaaucagacaugccuggaucguauugccgcugggaccuuuaacgccggagaguucucccuacccacuuuugacucucucaauaucaccgcagccagccugaacgaugacggucuugauaaucauacaauuuugcuguacuauucaaccgcugccaguucccucgcagugacucugaugcuugcgauauucaucgucuacauggugagccgcgacaacguuucuuguucaauuugccuguga

SEQ ID NO: 155759 - RNA, 1755 nt, Artificial Sequence; identical to SEQ ID NO: 154615
  derived and/or modified CDS sequence (opt3) from hemagglutinin__InfluenzaB__AGX23919

SEQ ID NO: 155760 - RNA, 1755 nt, Artificial Sequence; identical to SEQ ID NO: 155095
  derived and/or modified CDS sequence (opt3) from hemagglutinin__InfluenzaB__AGX23930

SEQ ID NO: 155761 - RNA, 1755 nt, Artificial Sequence; identical to SEQ ID NO: 154474
  derived and/or modified CDS sequence (opt3) from hemagglutinin__InfluenzaB__AGX23941

SEQ ID NO: 155762 - RNA, 1755 nt, Artificial Sequence; identical to SEQ ID NO: 154779
  derived and/or modified CDS sequence (opt3) from hemagglutinin__InfluenzaB__AGX23952

SEQ ID NO: 155763 - RNA, 1755 nt, Artificial Sequence; identical to SEQ ID NO: 154779
  derived and/or modified CDS sequence (opt3) from hemagglutinin__InfluenzaB__AGX23963

SEQ ID NO: 155764 - RNA, 1755 nt, Artificial Sequence; identical to SEQ ID NO: 155095
  derived and/or modified CDS sequence (opt3) from hemagglutinin__InfluenzaB__AGX23974

SEQ ID NO: 155765 - RNA, 1755 nt, Artificial Sequence; identical to SEQ ID NO: 154615
  derived and/or modified CDS sequence (opt3) from hemagglutinin__InfluenzaB__AGX23985

SEQ ID NO: 155766 - RNA, 1755 nt, Artificial Sequence
  derived and/or modified CDS sequence (opt3) from hemagglutinin__InfluenzaB__AGX23996
augaaggccaucauugugcugcucauggucguuaccagcaacgcugacagaauaugcacaggcaucacuuccucuaauucaccccacgugguaaaaacggcaacccagggggaggugaacgucacaggagugauuccucuuacuaccacaccaaccaagaguuacuucgccaaucugaaagguacuaggacacggggcaaguuguguccggauugcuuaaacuguaccgaccuggauguugcgcuagggcgccccaugugcgugggaacgacuccuagcgcuaaagccuccauccuccaugaaguccgaccaauuaccucuggcuguuuucccaucaugcacgaccguacaaagauaagacaacuggcaaaucuucugagggguuaugagaacauccgguugucgacucagaaugugauugaugccgaaaaggcuccugggggaccauaccgccucggcaccucaggcagcugccccaacgcaacaaguaaauccggguucuuugccaccauggcuugggccguaccuaaggacaauaacaaaaaugcgacgaacccacugacuguugaggugccguauaucuguacagaaggagaggaucagauuaccgucugggguuuccauucugacaauaagacucagaugaaaaaccuguacggcgauagcaauccccaaaaguuuacauccucagcaaacggggugaccacgcacuaugugagucagaucggaggcuucccugaccagaccgaggauggugggcucccacagagcggaagaauagucguugacuacaugaugcaaaagcccggcaaaacaggcacuauuguguaucagcgcgggguauuacugccucagaagguguggugcgccucuggacgguccaaagucaucaaggguucacuuccauugauuggcgaagcugauugucugcaugagaaauacgggggacuaaacaagagcaaacccuacuauaccggcgaacacgccaaggcaaucgguaauugcccgaucugggugaagacaccucucaaacuggcuaacgggacuaaguacaggcccccagccaaacuucugaaggagcgaggcuuuuucggagcgauugccggcuuuuuggaagggggaugggaagguaugauagcaggcuggcacggguauaccagucauggagcucacggcguugccguggcugccgaccucaaaucuacacaggaggcaaucaauaagauuaccaagaacuuaaauucccugagcgaacuggaggucaaaaaccuccaaagacuuucgggugccauggacgaacugcauaaugagaucuuggagcuagaugaaaagguggacgaucugagggcugacacuauaucuucccagauugagcucgcgguacugcuuucaaacgaagggaucaucaauagugaggaugaacaccuguuggcacucgagcggaaacugaagaaaauguuaggcccuagcgccguugacauuggaaacggcuguuucgagacgaagcacaagugcaaucagacaugccuggaucguaucgcugccgggaccuuuaacgcaggagaguucucccuacccacuuuugacucucucaauauuaccgccgcuagccugaacgaugacggucuugauaaucauacaauauugcuguacuauucaaccgccgcaaguucccucgcggugacucugaugcuugcuaucuucauugucuacauggugagccgcgacaacgucucuuguucaaucugccuguga

SEQ ID NO: 155767 - RNA, 1755 nt, Artificial Sequence; identical to SEQ ID NO: 155095
  derived and/or modified CDS sequence (opt3) from hemagglutinin__InfluenzaB__AGX24007

SEQ ID NO: 155768 - RNA, 1755 nt, Artificial Sequence; identical to SEQ ID NO: 155095
  derived and/or modified CDS sequence (opt3) from hemagglutinin__InfluenzaB__AGX24018

SEQ ID NO: 155769 - RNA, 1755 nt, Artificial Sequence
  derived and/or modified CDS sequence (opt3) from hemagglutinin__InfluenzaB__AGX24029
augaaggccaucauugugcugcucauggucguuaccagcaacgcugacagaauaugcacaggcaucacuuccucuaauucaccccacgugguaaaaacggcaacccagggggaggugaacgucacaggagugauuccucuuacuaccacaccaaccaagaguuacuucgccaaucugaaagguacuaggacacggggcaaguuguguccggauugcuuaaacuguaccgaccuggauguugcgcuagggcgccccaugugcgugggaacgacuccuagcgcuaaagccuccauccuccaugaaguccgaccagugaccucuggcuguuuucccauuaugcacgaccguacaaagaucagacaacugccuaaucuucugagggguuaugagaacauacgguugucgacucagaauguaaucgaugcagaaaaggccccagggggacccuaccgccucggcaccucaggcagcugcccuaacgcuacaaguaaauccggguucuuugcaaccauggccugggcuguuccaaaggacaauaacaaaaaugccacgaacccgcugacuguggagguccccuauauuuguaaggaaggagaggaucagaucacagugugggguuuccauucugacaauaaaacccagaugaagaaccuguacggcgauagcaauccucaaaaguuuacuuccucagcgaacggggugacaacccacuaugucagucagauuggcagcuucccagaccagacggaggauggaggucucccccagucugggagaaucguuguggacuacaugaugcaaaaaccuggaaagaccggcacaauaguauaucagaggggcguguuacugccacagaaagucuggugcgcauccgggcggucaaaggugauuaaaggaagccuucccuugaucggugaagccgauugucugcaugagaaguacggcgggcuaaacaaaaguaagccguacuauacuggagaacacgcuaaggccauuggcaauugcccuaucuggguuaaaaccccucucaagcuggcaaacgguacaaaauaccgcccacccgcuaaacuucugaaagagcgaggguuuuucggcgccaucgcgggauuuuuggagggcgggugggaaggaaugauugccgguuggcacggcuauacuucucauggggcacacggaguggcugucgccgcugaccucaaguccacccaggaggccauaaauaagaucacaaagaaccugaauagcuuaucggaacuggaggugaagaaccuccaaagacuuucuggcgcaauggacgaacugcauaaugagauuuuggagcuagaugaaaaaguagacgaucugagggccgacaccaucuccucacagauagagcucgcuguucugcuuaguaacgaagguauuaucaauagcgaggaugaacaccuguuggcgcucgagcggaagcugaaaaagauguuagggcccuccgcaguggagaucggcaacggauguuucgaaacuaagcacaaaugcaaucagacgugccugaaccguauugccgcuggcacauuuaaugccggggaguucucucuaccaaccuuugacagccucaacaucacugcagccucacugaaugaugacggacuugauaaccauaccauuuugcuguacuauaguacagcugccuccagccucgcagucacccugaugcuugcgauauucaucguguacauggucucucgcgacaacgugucauguaguauuugccuguga

SEQ ID NO: 155770 - RNA, 1755 nt, Artificial Sequence; identical to SEQ ID NO: 155095
  derived and/or modified CDS sequence (opt3) from hemagglutinin__InfluenzaB__AGX24040

SEQ ID NO: 155771 - RNA, 1755 nt, Artificial Sequence; identical to SEQ ID NO: 154779
  derived and/or modified CDS sequence (opt3) from hemagglutinin__InfluenzaB__AGX24051

SEQ ID NO: 155772 - RNA, 1755 nt, Artificial Sequence; identical to SEQ ID NO: 154868
  derived and/or modified CDS sequence (opt3) from hemagglutinin__InfluenzaB__AGX24062

SEQ ID NO: 155773 - RNA, 1755 nt, Artificial Sequence; identical to SEQ ID NO: 154615
  derived and/or modified CDS sequence (opt3) from hemagglutinin__InfluenzaB__AGX24073

SEQ ID NO: 155774 - RNA, 1755 nt, Artificial Sequence
  derived and/or modified CDS sequence (opt3) from hemagglutinin__InfluenzaB__AGX24084
augaaggccaucauugugcugcucauggucguuaccagcaacgcugacagaauaugcacaggcaucacuuccucuaauucaccccacgugguaaaaacggcaacccagggggaggugaacgucacaggagugauuccucuuacuaccacaccaaccaagaguuacuucgccaaucugaaagguacuaggacacggggcaaguuguguccggauugcuuaaacuguaccgaccuggauguugcgcuagggcgccccaugugcgugggaacgacuccuagcgcuaaagccuccaucauucaugaaguccgaccagugaccucuggcuguuuucccaucaugcacgaccguacaaagauaagacaacucgcaaaucugcuuagggguuaugagaacauccggcugucgacucagaauguaauugaugccgaaaaggcuccugggggaccauaccgcuugggcaccucaggcagcugccccaacgcaacaaguaaauccggguucuuugccaccauggcuugggccguuccuaaggacaauaacaaaaaugcgacgaacccacucacuguggaggucccguauaucuguacagaaggagaggaucagauuaccgugugggguuuccauucugacaauaagacucagaugaaaaaccuguacggcgauagcaauccccaaaaguuuacauccucagcaaacggggugaccacgcacuaugucagucagaucggaggcuucccugaccagaccgaggauggugggcugccacagagcggaagaauaguuguggacuacaugaugcaaaagcccggcaaaacaggcacuauuguauaucagcgcggggugcucuuaccucagaaggucuggugcgccucuggacgguccaaagugaucaaggguucacugccacuuauuggcgaagcugauuguuugcaugagaaauacgggggacugaacaagagcaaacccuacuauaccggcgaacacgccaaggcaaucgguaauugcccgaucuggguuaagacaccucuaaaacucgcuaacgggacuaaguacaggcccccagccaaacugcuuaaggagcgaggcuuuuucggagcgauugccggcuuucuggaagggggaugggaagguaugauagcaggcuggcacggguauaccagucauggagcucacggcguggccgucgcugccgacuugaaaucuacacaggaggcaaucaauaagauuaccaagaaccucaauucccugagcgaauuagaggugaaaaaccugcaaagacucucgggugccauggacgaacuucauaaugagauccuggaguuggaugaaaagguagacgaucuaagggcugacacuauaucuucccagauugagcuggcgguucuccugucaaacgaagggaucaucaauagugaggaugaacaccuucuggcauuggagcggaaacucaagaaaaugcugggcccuagcgccguggacauuggaaacggcuguuucgagacgaagcacaagugcaaucagacaugcuuagaucguaucgcugccgggaccuuuaacgcaggagaguucucccugcccacuuuugacucucuaaauauuaccgccgcuagccucaacgaugacggucuggauaaucauacaauacuuuuguacuauucaaccgccgcaaguucccuggcggucacucucaugcuggcuaucuucauuguguacauggucagccgcgacaacgugucuuguucaaucugccuuuga

SEQ ID NO: 155775 - RNA, 1755 nt, Artificial Sequence; identical to SEQ ID NO: 155095
  derived and/or modified CDS sequence (opt3) from hemagglutinin__InfluenzaB__AGX24095

SEQ ID NO: 155776 - RNA, 1755 nt, Artificial Sequence
  derived and/or modified CDS sequence (opt3) from hemagglutinin__InfluenzaB__AGX24106
augaaggccaucauugugcugcucauggucguuaccagcaacgcugacagaauaugcacaggcaucacuuccucuaauucaccccacgugguaaaaacggcaacccagggggaggugaacgucacaggagugauuccucuuacuaccacaccaaccaagaguuacuucgccaaucugaaagguacuaggacacggggcaaguuguguccggauugcuuaaacuguaccgaccuggauguugcgcuagggcgccccaugugcgugggaacgacuccuagcgcuaaagccuccauccuccaugaaguccgaccagugaccucuggcuguuuucccauuaugcacgaccguacaaagaucagacaacuggcaaaucuucugagggguuaugagaacauacgguugucgacucagaauguaaucgaugccgaaaaggcuccugggggaccauaccgccucggcaccucaggcagcugccccaacacaaccaguaaauccggguucuuugcaacgauggccugggcuguuccuaaggacaauaacaaaaaugccacuaacccacugacaguggaggucccguauauuuguaccgaaggagaggaucagaucacugugugggguuuccauucugacaauaagacacagaugaaaaaccuguacggcgauagcaauccccaaaaguuuaccuccucagcgaacggggugacgacccacuaugucagucagauuggaggcuucccugaccagacagaggauggugggcucccacagagcggaagaaucguuguggacuacaugaugcaaaagcccggcaaaacuggcaccauaguauaucagcgcgggguguuacugccucagaaggucuggugcgcaucuggacgguccaaagugauuaaggguucacuuccauugaucggcgaagccgauugucugcaugagaaauacgggggacuaaacaagagcaaacccuacuauacaggcgaacacgcuaaggccauugguaauugcccgaucuggguuaagacuccucucaaacuggcaaacgggaccaaguacaggcccccagcuaaacuucugaaggagcgaggcuuuuucggagccaucgcgggcuuuuuggaagggggaugggaagguaugauugccggcuggcacggguauacaagucauggagcacacggcguggcugucgccgcugaccucaaaucuacccaggaggccauaaauaagaucacuaagaacuuaaauucccugagcgaacuggaggugaaaaaccuccaaagacuuucgggugcaauggacgaacugcauaaugagauuuuggagcuagaugaaaagguagacgaucugagggccgacacgaucucuucccagauagagcucgcuguucugcuuucaaacgaagggauuaucaauagugaggaugaacaccuguuggcgcucgagcggaaacugaagaaaauguuaggcccuagcgcaguggacaucggaaacggcuguuucgagacaaagcacaagugcaaucagaccugccuggaucguauugccgcugggacuuuuaacgccggagaguucucccuacccaccuuugacucucucaauaucacagcagccagccugaacgaugacggucuugauaaucauaccauuuugcuguacuauucaacugcugccaguucccucgcagucacacugaugcuugcgauauucaucguguacauggucagccgcgacaacgugucuuguucaauuugccuguga

SEQ ID NO: 155777 - RNA, 1755 nt, Artificial Sequence
  derived and/or modified CDS sequence (opt3) from hemagglutinin__InfluenzaB__AGX24117
augaaggccaucauugugcugcucauggucguuaccagcaacgcugacagaauaugcacaggcaucacuuccucuaauucaccccacgugguaaaaacggcaacccagggggaggugaacgucacaggagugauuccucuuacuaccacaccaaccaagaguuacuucgccaaucugaaagguacuaggacacggggcaaguuguguccggauugcuuaaacuguaccgaccuggauguugcgcuagggcgccccaugugcgugggaacgacuccuagcgcuaaagccuccauccuccaugaaguccgaccagugaccucuggcuguuuucccauuaugcacgaccguacaaagaucagacaacugccuaaucuucugagggguuaugagaacauacgguugucgacucagaauguaaucgaugcagaaaaggccccagggggacccuaccgccucggcaccucaggcagcugcccuaacacaaccaguaaauccggguucuuugcuacgauggcaugggccguuccaaaggacaauaacaaaaaugcuacuaacccgcugacaguggagguccccuauauuuguaccgaaggagaggaucagaucacugugugggguuuccauucugacaauaagacacagaugaaaaaccuguacggcgauagcaauccucaaaaguuuaccuccucagccaacggggugacgacccacuaugucagucagauuggcagcuucccagaccagacagaggauggaggucucccccagucugggagaaucguuguggacuacaugaugcaaaagccuggaaaaacuggcaccauaguauaucagaggggcauuuuacugccacagaagguguggugcgcguccgggcggucaaaagucaucaagggaagccuucccuugauuggugaagcagauugucugcaugagaaauacggcgggcuaaacaagaguaaaccguacuauacaggagaacacgccaaggcuaucggcaauugcccuaucugggugaagacuccccucaaacuggccaacgguaccaaguaccgcccuccagcaaaacuucugaaggagcgaggguuuuucggcgcuauugccggauuuuuggagggcgggugggaaggaaugauagcggguuggcacggcuauacaucucauggggcccacggaguugcaguggcugccgaccucaaauccacccaggaggcuaucaauaagauuacuaagaaccugaauagcuuaucggaacuggaggucaaaaaccuccaaagacuuucuggcgccauggacgaacugcauaaugagaucuuggagcuagaugaaaagguggacgaucugagggcagacacgauauccucacagauugagcucgccguacugcuuaguaacgaagguaucaucaauagcgaggaugaacaccuguuggcucucgagcggaaacugaagaaaauguuagggcccuccgcgguugagauuggcaacggauguuucgaaacaaagcacaagugcaaucagaccugccuggaccguaucgcagccggcacuuuuaacgcuggggaguucucucuaccaaccuuugauagccucaauauuacagccgcaucacugaacgacgauggacuugacaaucauaccauauugcuguacuauaguacugccgcuuccagccucgccgugacacugaugcuugcaaucuucauugucuacauggugucucgcgauaacgucucauguaguaucugccuguga

SEQ ID NO: 155778 - RNA, 1755 nt, Artificial Sequence
  derived and/or modified CDS sequence (opt3) from hemagglutinin__InfluenzaB__AGX24128
augaaggccaucauugugcugcucauggucguuaccagcaacgcugacagaauaugcacaggcaucacuuccucuaauucaccccacgugguaaaaacggcaacccagggggaagugaacgucacaggagugauuccucuuacuaccacaccaaccaagaguuacuucgccaaucugaaagguacuaggacacggggcaaguuguguccggauugcuuaaacuguaccgaccuggauguugcgcuagggcgccccaugugcgugggaacgacuccuagcgcuaaagccuccauccuccaugaaguccgaccagugaccucuggcuguuuucccauuaugcacgaccguacaaagaucagacaacugccuaaucuucugagggguuaugagaacauacgguugucgacucagaauguaaucgaugcagaaaaggccccagggggacccuaccgccucggcaccucaggcagcugcccuaacgcuacaaguaaaauuggguucuuugcaaccauggccugggcuguuccaaaggacaauuauaaaaacgccacgaauccgcugacuguggagguccccuacaucuguacagaaggagaggaucagauuaccgugugggguuuccauuccgacaacaagacucagaugaaaaaucuguauggcgauucuaacccucaaaaguuuacaagcuccgcgaauggggugaccacgcacuacgucucacagaucggagacuucccagaucagaccgaggacggcggucucccccagagugggagaauaguuguggauuauaugaugcaaaagccuggaaaaacaggcacuauuguauaccagaggggcguguuacugccacagaaggucuggugcgcaagcgggcggucuaaagugaucaagggaucccuucccuugauuggugaagccgacuguauccaugagaaauacggcgggcugaacaagucaaaaccguauuacaccggagaacacgcuaaggccaucggcaacugcccuauuuggguuaagacaccccuaaaacucgcaaaugguacuaaguaucgcccuccagcuaaacugcuuaaggagcgaggguuuuucggcgccauagcgggauuucuggagggcgggugggaaggaaugaucgccgguuggcacggcuacaccagccauggggcacacggaguggcugucgccgcugacuugaaaaguacacaggaggccauuaacaagaucaccaagaaucucaacucucuguccgaauuagaggugaaaaaucugcaaagacucagcggcgcaauggaugaacuucauaacgagauacuggaguuggacgaaaagguagaugaccuaagggccgauacuauuucgucucagaucgagcuggcuguucuccuguccaaugaagguaucauuaacucagaggacgaacaccuucuggcguuggagcggaaacucaagaaaaugcuggggcccagugcaguggauaucggcaauggauguuucgagacgaagcacaagugcaaccagacaugcuuagaccguauugccgcuggcaccuuuaaugccggggaguucagccugccaacuuuugauucccuaaacauaaccgcagccucucucaaugacgauggacuggacaaccauacaauccuuuuguauuacagcaccgcugccucaagucuggcagucacucucaugcuggcgauuuucaucguguauauggucucccgcgacaaugugagcuguucuaucugccuuuga

SEQ ID NO: 155779 - RNA, 1755 nt, Artificial Sequence; identical to SEQ ID NO: 154474
  derived and/or modified CDS sequence (opt3) from hemagglutinin__InfluenzaB__AGX24139

SEQ ID NO: 155780 - RNA, 1755 nt, Artificial Sequence
  derived and/or modified CDS sequence (opt3) from hemagglutinin__InfluenzaB__AGX24150
augaaggccaucauugugcugcucauggucguuaccagcaacgcugacagaauaugcacaggcaucacuuccucuaauucaccccacgugguaaaaacggcaacccagggggaggugaacgucacaggagugauuccucuuacuaccacaccaaccaagaguuacuucgccaaucugaaagguacuaggacacggggcaaguuguguccguauugcuuaaacuguaccgaucuggacguugcgcuagggcgccccaugugcgugggaacgacuccuagcgcuaaagccuccauccuccaugaaguccgaccagugaccucuggcuguuuucccauuaugcacgaucguacaaagaucagacaacugccuaaucuucugagggguuacgagaacauacgguugucgacucagaauguaaucgacgcagaaaaggccccagggggacccuaucgccucggcaccucaggcagcugcccuaacgcuacaaguaaauccggguucuuugcaaccauggccugggcuguuccaaaggauaauaacaaaaaugccacgaacccgcugacuguggagguccccuacauuuguacagaaggagaggaccagaucaccgugugggguuuccauucugauaauaagacucagaugaaaaaccuguauggcgacagcaauccucaaaaguuuacauccucagcgaacggggugaccacgcacuacgucagucagauuggcagcuucccagaucagaccgaggacggaggucucccccagucugggagaaucguuguggauuauaugaugcaaaagccuggaaaaacaggcacuauaguauaccagaggggcauuuuacugccacagaagguguggugcgcauccgggcggucaaaagucaucaagggaagccuucccuugauuggugaagccgacugucugcaugagaaauacggcgggcuaaacaagaguaaaccguauuacaccggagaacacgcuaaggccaucggcaauugcccuaucugggugaagacaccccucaaacuggcaaacgguacuaaguaucgcccuccagcuaaacuucugaaggagcgaggguuuuucggcgccauugcgggauuuuuggagggcgggugggaaggaaugauagccgguuggcacggcuacaccucucauggggcacacggaguugcuguggccgcugaucucaaauccacacaggaggccaucaauaagauuaccaagaaccugaauagcuuaucggaacuggaggucaaaaaccuccaaagacuuucuggcgcaauggacgaacugcauaaugagaucuuggagcuagacgaaaagguggaugaccugagggccgauacuauauccucacagauugagcucgcuguacugcuuaguaacgaagguaucaucaauagcgaggacgaacaccuguuggcgcucgagcggaaacugaagaaaauguuagggcccuccgcaguugagauuggcaacggauguuucgaaacgaagcacaagugcaaucagacaugccuggaucguaucgccgcuggcaccuuuaacgccggggaguucucucuaccaacuuuugacagccucaauauuaccgcagccucacugaacgaugacggacuugauaaucauacaauauugcuguauuacaguaccgcugccuccagccucgcagugacucugaugcuugcgaucuucauugucuauauggugucucgcgacaacgucucauguaguaucugccuguga

SEQ ID NO: 155781 - RNA, 1755 nt, Artificial Sequence; identical to SEQ ID NO: 155095
  derived and/or modified CDS sequence (opt3) from hemagglutinin__InfluenzaB__AGX24161

SEQ ID NO: 155782 - RNA, 1755 nt, Artificial Sequence; identical to SEQ ID NO: 154868
  derived and/or modified CDS sequence (opt3) from hemagglutinin__InfluenzaB__AGX24172

SEQ ID NO: 155783 - RNA, 1755 nt, Artificial Sequence; identical to SEQ ID NO: 154868
  derived and/or modified CDS sequence (opt3) from hemagglutinin__InfluenzaB__AGX24183

SEQ ID NO: 155784 - RNA, 1755 nt, Artificial Sequence; identical to SEQ ID NO: 154868
  derived and/or modified CDS sequence (opt3) from hemagglutinin__InfluenzaB__AGX24194

SEQ ID NO: 155785 - RNA, 1755 nt, Artificial Sequence; identical to SEQ ID NO: 154615
  derived and/or modified CDS sequence (opt3) from hemagglutinin__InfluenzaB__AGX24205

SEQ ID NO: 155786 - RNA, 1755 nt, Artificial Sequence; identical to SEQ ID NO: 154779
  derived and/or modified CDS sequence (opt3) from hemagglutinin__InfluenzaB__AGX24227

SEQ ID NO: 155787 - RNA, 1755 nt, Artificial Sequence; identical to SEQ ID NO: 154868
  derived and/or modified CDS sequence (opt3) from hemagglutinin__InfluenzaB__AGX24238

SEQ ID NO: 155788 - RNA, 1755 nt, Artificial Sequence
  derived and/or modified CDS sequence (opt3) from hemagglutinin__InfluenzaB__AGX24249
augaaggccaucauugugcugcucauggucguuaccagcaacgcugacagaauaugcacaggcaucacuuccucuaaaucaccccacgugguaaagacggcaacccagggggaagugaaugucacaggagugauuccucuuacuaccacaccaaccaaaaguuacuucgccaaccugaaggguacuaggacacggggcaaauuguguccggauugcuuaaauuguaccgaccuggauguugcgcuagggcgccccaugugcgugggaacgacuccuagcgcuaaggccuccauccuccaugaaguccgaccagugaccucuggcuguuuucccauuaugcacgaccguacaaagaucagacaacugccuaaccuucugagggguuaugagaauauacgguugucgacucagaacguaaucgaugcagaaaaagccccagggggacccuaccgccucggcaccucaggcagcugcccuaaugcuacaaguaagauuggguucuuugcaaccauggccugggcuguuccaaaagacaacuauaagaaugccacgaacccgcugacuguggagguccccuacaucuguacagaaggagaggaucagauuaccgugugggguuuccauuccgacaauaaaacucagaugaagaaccuguauggcgauucuaauccucaaaaguuuacaagcuccgcgaacggggugaccacgcacuacgucucacagaucggagacuucccagaucagaccgaggacggcggucucccccagagugggagaauaguuguggauuauaugaugcaaaaaccuggaaagacaggcacuauuguauaccagaggggcguguuacugccacagaaagucuggugcgcaagcgggcggucuaaggugaucaaaggaucccuucccuugauuggugaagccgacugucugcaugagaaguacggcgggcuaaauaaaucaaagccguauuacaccggagaacacgcuaaggccaucggcaacugcccuaucuggguuaaaacaccccucaagcuggcaaacgguacuaaauaucgcccuccagcuaagcugcugaaagagcgaggguuuuucggcgccauugcgggauuuuuggagggcgggugggaaggaaugauagccgguuggcacggcuacaccagccauggggcacacggaguggcugucgccgcugaccucaagaguacacaggaggccaucaauaagauuaccaaaaaccuuaauucuuuauccgaacuggaggugaagaaccuccaaagacuuagcggcgcaauggaugaacugcauaaugagaucuuggagcuagacgaaaaaguagaugaccugagggccgauacuauaucgucucagauugagcucgcuguucugcuuuccaacgaagguaucaucaauucagaggacgaacaccuguuggcgcucgagcggaagcugaaaaagauguuagggcccagugcaguggauauuggcaacggauguuucgagacgaagcacaaaugcaaucagacaugccuggaccguaucgccgcuggcaccuuuaacgccggggaguucagccuaccaacuuuugauucccucaauauuaccgcagccucucugaacgacgauggacuugacaaucauacaauauugcuguauuacagcaccgcugccucaagucucgcagucacucugaugcuugcgaucuucauuguguauauggucucccgcgacaacgugagcuguucuaucugccuguga

SEQ ID NO: 155789 - RNA, 1755 nt, Artificial Sequence; identical to SEQ ID NO: 154615
  derived and/or modified CDS sequence (opt3) from hemagglutinin__InfluenzaB__AGX24260

SEQ ID NO: 155790 - RNA, 1755 nt, Artificial Sequence; identical to SEQ ID NO: 155104
  derived and/or modified CDS sequence (opt3) from hemagglutinin__InfluenzaB__AGX24271

SEQ ID NO: 155791 - RNA, 1755 nt, Artificial Sequence
  derived and/or modified CDS sequence (opt3) from hemagglutinin__InfluenzaB__AGX24282
augaaggccaucauugugcugcucauggucguuaccagcaacgcugacagaauaugcacaggcaucacuuccucuaauucaccccacgugguaaaaacggcaacccagggggaagugaacgucacaggagugauuccucuuacuaccacaccaaccaagaguuacuucgccaaucugaaagguacuaggacacggggcaaguuguguccggauugcuuaaacuguaccgaccuggauguugcgcuagggcgccccaugugcgugggaacgacuccuagcgcuaaagccuccauccuccaugaaguccgaccagugaccucuggcuguuuucccauuaugcacgaccguacaaagaucagacaacugccuaaucuucugagggguuaugagaacauacgguugucgacucagaauguaaucgaugcagaaaaggccccagggggacccuaccgccucggcaccucaggcagcugcccuaacgcuacaaguaaauccggguucuuugcaaccauggccugggcuguuccaaaggacaauaacaaaaaugccacgaacccgcugacuguggagguccccuauauuuguacaaagggagaagaucagaucaccgugugggguuuccauucugacaauaaaacucagaugaagaaccuguacggcgauagcaauccucaaaaguuuacauccucagcgaacggggugaccacgcacuaugucagucagauuggcagcuucccagaccagaccgaggauggaggucucccccagucugggagaaucguuguggacuacaugaugcaaaaaccuggaaagacaggcacuauaguauaucagaggggcguguuacugccacagcgggucuggugcgcauccgggcgcucaaaagugauuaagggaagccuucccuugaucggugaggccgauugucugcaugaaaaauacggcgggcuaaacaagaguaaaccguacuauaccggagagcacgcuaaggccauuggcaauugcccuaucuggguuaagacaccccucaaacuggcaaacgguacuaaguaccgaccuccagcuaaacuucugaaggaaagaggguuuuucggcgccaucgcgggauuuuuggagggcgggugggagggaaugauugccgguuggcacggcuauaccucucauggggcacacggaguggcugucgccgcugaccucaaauccacacaggaagccauaaauaagaucaccaagaaccugaauagcuuaucggagcuggaagugaaaaaccuccaaaggcuuucuggcgcaauggacgagcugcauaaugaaauuuuggagcuagaugagaagguagacgaucugcgggccgacacuaucuccucacagauagaacucgcuguucugcuuaguaacgaggguauuaucaauagcgaagaugagcaccuguuggcgcucgaacguaaacugaagaaaauguuagggcccuccgcaguggagaucggcaacggauguuucgagacgaagcacaagugcaaucagacaugccuggaccgcauugccgcuggcaccuuuaacgccggggaguucucucuaccaacuuuugauagccucaauaucaccgcagccucacugaacgacgauggacuugacaaucauacaauuuugcuguacuauaguaccgcugccuccagccucgcagucacucugaugcuugcgauauucaucguguacauggucucuagagauaacgugucauguaguauuugccuguga

SEQ ID NO: 155792 - RNA, 1755 nt, Artificial Sequence; identical to SEQ ID NO: 154615
  derived and/or modified CDS sequence (opt3) from hemagglutinin__InfluenzaB__AGX24293

SEQ ID NO: 155793 - RNA, 1755 nt, Artificial Sequence; identical to SEQ ID NO: 154615
  derived and/or modified CDS sequence (opt3) from hemagglutinin__InfluenzaB__AGX24304

SEQ ID NO: 155794 - RNA, 1755 nt, Artificial Sequence; identical to SEQ ID NO: 155104
  derived and/or modified CDS sequence (opt3) from hemagglutinin__InfluenzaB__AGX24315

SEQ ID NO: 155795 - RNA, 1755 nt, Artificial Sequence
  derived and/or modified CDS sequence (opt3) from hemagglutinin__InfluenzaB__AGX24326
augaaggccaucauugugcugcucauggucguuaccagcaacgcugacagaauaugcacaggcaucacuuccucuaauucaccccacgugguaaaaacggcaacccagggggaggugaacgucacaggagugauuccucuuacuaccacaccaaccaagaguuacuucgccaaucugaaagguacuaggacacggggcaaguuguguccggauugcuuaaacuguaccgaccuggauguugcgcuagggcgccccacgugcgugggaacuaccccuagcgcuaaagccuccauccuccaugaaguccgaccagugacaucuggcuguuuucccauuaugcacgaccguacuaagaucagacaacugccuaaucuucugagggguuaugagaacauacgguugucgacccagaauguaaucgaugcagaaaaggccccagggggacccuaccgccucggcacaucaggcagcugcccuaacgcuaccaguaaauccggguucuuugcaacgauggccugggcuguuccaaaggacaauaacaaaaaugccacuaacccgcugacaguggagguccccuauauuuguaccgaaggagaggaucagaucacugugugggguuuccauucugacaauaagacacagaugaaaaaccuguacggcgauagcaauccucaaaaguuuaccuccucagcgaacggggugacgacccacuaugucagucagauuggcagcuucccagaccagacagaggauggaggucucccccagucugggagaaucguuguggacuacaugaugcaaaagccuggaaaaacuggcaccauaguauaucagaggggcauuuuacugccacagaagguguggugcgcauccgggcggucaaaagucaucaagggaagccuucccuugauuggugaagccgauugucugcaugagaaauacggcgggcuaaacaagaguaaaccguacuauacaggagaacacgcuaaggccaucggcaauugcccuaucugggugaagacuccccucaaacuggcaaacgguaccaaguaccgcccuccagcuaaacuucugaaggagcgaggguuuuucggcgccauugcgggauuuuuggagggcgggugggaaggaaugauagccgguuggcacggcuauacaucucauggggcacacggaguugcuguggccgcugaccucaaauccacccaggaggccaucaauaagauuacuaagaaccugaauagcuuaucggaacuggaggucaaaaaccuccaaagacuuucuggcgcaauggacgaacugcauaaugagaucuuggagcuagaugaaaagguggacgaucugagggccgacacgauauccucacagauugagcucgcuguacugcuuaguaacgaagguaucaucaauagcgaggaugaacaccuguuggcgcucgagcggaaacugaagaaaauguuagggcccuccgcaguugagauuggcaacggauguuucgaaacaaagcacaagugcaaucagaccugccuggaccguaucgccgcuggcacuuuuaacgccggggaguucucucuaccaaccuuugauagccucaauauuacagcagccucacugaacgacgauggacuugacaaucauaccauauugcuguacuauaguacugcugccuccagccucgcagugacacugaugcuugcgaucuucauugucuacauggugucucgcgauaacgucucauguaguaucugccuguga

SEQ ID NO: 155796 - RNA, 1755 nt, Artificial Sequence
  derived and/or modified CDS sequence (opt3) from hemagglutinin__InfluenzaB__AGX24337
augaaggccaucauugugcugcucauggucguuaccagcaacgcugacagaauaugcacaggcaucacuuccucuaauucaccccacgugguaaaaacggcaacccagggggaagugaacgucacaggagugauuccucuuacuaccacaccaaccaagaguuacuucgccaaucugaaagguacuaggacacggggcaaguuguguccggauugcuuaaacuguaccgaccuggauguugcgcuagggaugcccaugugcgugggaacgacuccuagcgcuaaagccuccauccuccaugaaguccgcccagugaccucuggcuguuuucccauuaugcacgaccgaacaaagauccgucaacugccuaaucuucugagagguuaugagaacauaagguugucgacucagaauguaaucgaugcagaaaaggccccagggggacccuaccggcucggcaccucaggcagcugcccuaacgcuacaaguaaaauuggguucuuugcaaccauggccugggcuguuccaaaggacaauuauaaaaacgccacgaauccgcugacuguggagguccccuacaucuguacagaaggagaggaucagauuaccgugugggguuuccauuccgacaacaagacucagaugaaaaaucuguauggcgauucuaacccucaaaaguuuacaagcuccgcgaauggggugaccacgcacuacgucucacagaucggagacuucccagaucagaccgaggacggcggucucccccagagugggcgcauaguuguggauuauaugaugcaaaagccuggaaaaacaggcacuauuguauaccagagaggcguguuacugccacagaaggucuggugcgcaagcgggaggucuaaagugaucaagggaucccuucccuugauuggugaagccgacugucugcaugagaaauacggcgggcuaaacaagucaaaaccguauuacaccggagaacacgcuaaggccaucggcaacugcccuaucuggguuaagacaccccucaaacuggcaaaugguacuaaguaucggccuccagcuaaacuucugaaggagcgcggguuuuucggcgccauugcgggauuuuuggagggcgggugggaaggaaugauagccgguuggcacggcuacaccagccauggggcacacggaguggcugucgccgcugaccucaaaaguacacaggaggccaucaacaagauuaccaagaaucugaacucuuuauccgaacuggaggugaaaaaucuccaacgacuuagcggcgcaauggaugaacugcauaacgagaucuuggagcuagacgaaaagguagaugaccugagagccgauacuauaucgucucagauugagcucgcuguucugcuuuccaaugaagguaucaucaacucagaggacgaacaccuguuggcgcucgagaggaaacugaagaaaauguuagggcccagugcaguggauauuggcaauggauguuucgagacgaagcacaagugcaaccagacaugccuggaccggaucgccgcuggcaccuuuaaugccggggaguucagccuaccaacuuuugauucccucaacauuaccgcagccucucugaaugacgauggacuugacaaccauacaauauugcuguauuacagcaccgcugccucaagucucgcagucacucugaugcuugcgaucuucauuguguauauggucucccgugacaaugugagcuguucuaucugccuguga

SEQ ID NO: 155797 - RNA, 1755 nt, Artificial Sequence; identical to SEQ ID NO: 154868
  derived and/or modified CDS sequence (opt3) from hemagglutinin__InfluenzaB__AGX24348

SEQ ID NO: 155798 - RNA, 1755 nt, Artificial Sequence; identical to SEQ ID NO: 154615
  derived and/or modified CDS sequence (opt3) from hemagglutinin__InfluenzaB__AGX24359

SEQ ID NO: 155799 - RNA, 1755 nt, Artificial Sequence; identical to SEQ ID NO: 154868
  derived and/or modified CDS sequence (opt3) from hemagglutinin__InfluenzaB__AGX24381

SEQ ID NO: 155800 - RNA, 1755 nt, Artificial Sequence
  derived and/or modified CDS sequence (opt3) from hemagglutinin__InfluenzaB__AGX24392
augaaggccaucauugugcugcucauggucguuaccagcaacgcugacagaauaugcacaggcaucacuuccucuaauucaccccacgugguaaaaacggcaacccagggggaggugaacgucacaggagugauuccucuuacuaccacaccaaccaagaguuacuucgccaaucugaaagguacuaggacacggggcaaguuguguccggauugcuuaaacuguaccgaccuggauguugcgcuagggcgccccaugugcgugggaacgacuccuagcgcuaaagccuccauccuccaugaaguccgaccagugaccucuggcuguuuucccauuaugcacgaccguacaaagaucagacaacugccuaaucuucugagggguuaugagaacauacgguugucgacucagaauguaaucgaugcagaaaaggccccagggggacccuaccgccucggcaccucaggcagcugcccuaacgcuacaaguaaauccggguucuuugcaaccauggccugggcuguuccaaaggacaauaacaaaaaugccacgaacccgcugacuguggagauucccuauaucuguacagaaggagaggaucagauuaccgucugggguuuccauucugacaauaagacucagaugaaaaaccuguacggcgauagcaauccucaaaaguuuacauccucagcgaacggggugaccacgcacuaugugagucagaucggcagcuucccagaccagaccgaggauggaggucucccccagucugggagaauagucguugacuacaugaugcaaaagccuggaaaaacaggcacuauuguguaucagaggggcguauuacugccacagaagguguggugcgcauccgggcggucaaaagucaucaagggaagccuucccuugauuggugaagccgauugucugcaugagaaauacggcgggcuaaacaagaguaaaccguacuauaccggagaacacgcuaaggccaucggcaauugcccuaucugggugaagacaccccucaaacuggcaaacgguacuaaguaccgcccuccagcuaaacuucugaaggagcgaggguuuuucggcgccauugcgggauuuuuggagggcgggugggaaggaaugauagccgguuggcacggcuauaccucucauggggcacacggaguugcuguggccgcugaccucaaauccacacaggaggccaucaauaagauuaccaagaaccugaauagcuuaucggaacuggaggucaaaaaccuccaaagacuuucuggcgcaauggacgaacugcauaaugagaucuuggagcuagaugaaaagguggacgaucugagggccgacacuauauccucacagauugagcucgcuguacugcuuaguaacgaagguaucaucaauagcgaggaugaacaccuguuggcgcucgagcggaaacugaagaaaauguuagggcccuccgcaguugagauuggcaacggauguuucgaaacgaagcacaagugcaaucagacaugccuggaccguaucgccgcuggcaccuuuaacgccggggaguucucucuaccaacuuuugauagccucaauauuaccgcagccucacugaacgacgauggacuugacaaucauacaauauugcuguacuauaguaccgcugccuccagccucgcagugacucugaugcuugcgaucuucauugucuacauggugucucgcgauaacgucucauguaguaucugccuguga

SEQ ID NO: 155801 - RNA, 1755 nt, Artificial Sequence; identical to SEQ ID NO: 154615
  derived and/or modified CDS sequence (opt3) from hemagglutinin__InfluenzaB__AGX24403

SEQ ID NO: 155802 - RNA, 1755 nt, Artificial Sequence; identical to SEQ ID NO: 154868
  derived and/or modified CDS sequence (opt3) from hemagglutinin__InfluenzaB__AGX24414

SEQ ID NO: 155803 - RNA, 1755 nt, Artificial Sequence; identical to SEQ ID NO: 154615
  derived and/or modified CDS sequence (opt3) from hemagglutinin__InfluenzaB__AGX24425

SEQ ID NO: 155804 - RNA, 1755 nt, Artificial Sequence; identical to SEQ ID NO: 154615
  derived and/or modified CDS sequence (opt3) from hemagglutinin__InfluenzaB__AGX24436

SEQ ID NO: 155805 - RNA, 1755 nt, Artificial Sequence; identical to SEQ ID NO: 155104
  derived and/or modified CDS sequence (opt3) from hemagglutinin__InfluenzaB__AGX24447

SEQ ID NO: 155806 - RNA, 1755 nt, Artificial Sequence; identical to SEQ ID NO: 155795
  derived and/or modified CDS sequence (opt3) from hemagglutinin__InfluenzaB__AGX24458

SEQ ID NO: 155807 - RNA, 1755 nt, Artificial Sequence
  derived and/or modified CDS sequence (opt3) from hemagglutinin__InfluenzaB__AGX24469
augaaggccaucauugugcugcucauggucguuaccagcaacgcugacagaauaugcacaggcaucacuuccucuaauucaccccacgugguaaaaacggcaacccagggggaggugaacgucacaggagugauuccucuuacuaccacaccaaccaagaguuacuucgccaaucugaaagguacuaggacacggggcaaguuguguccggauugcuuaaacuguaccgaccuggauguugcgcuagggcgccccacgugcgugggaacuaccccuagcgcuaaagccuccauccuccaugaaguccgaccagugacaucuggcuguuuucccauuaugcacgaccguacuaagaucagacaacugccuaaucuucugagggguuaugagaacauacgguugucgacccagaauguaaucgaugcagaaaaggccccagggggacccuaccgccucggcacaucaggcagcugcccuaacgcuaccaguaaauccggguucuuugcaacgauggccugggcuguuccaaaggacaauaacaaaaaugccacuaacccgcugacaguggagguccccuauauuuguaccgaaggagaggaucagaucacugugugggguuuccauucugacaauaagacacagaugaaaaaccuguacggcgauagcaauccucaaaaguuuaccuccucagcgaacggggugacgacccacuaugucagucagauuggcagcuucccagaccagacagaggauggaggucucccccagucugggagaaucguuguggacuacaugaugcaaaagccuggaaaaacuggcaccauaguauaucagaggggcauuuuacugccacagaagguguggugcgcauccgggcggucaaaagucaucaagggaagccuucccuugauuggugaagccgauugucugcaugagaaauacggcgggcuaaacaagaguaaaccguacuauacaggagaacacgcuaaggccaucggcaauugcccuaucugggugaagacuccccucaaacuggcaaacgguaccaaguaccgcccuccagcuaaacuucugaaggagcgaggguuuuucggcgccauugcgggauuuuuggagggcgggugggaaggaaugguugccgguuggcacggcuauacaucucauggggcacacggaguggcugucgccgcugaccucaaauccacccaggaggccauaaauaagaucacuaagaaccugaauagcuuaucggaacuggaggugaaaaaccuccaaagacuuucuggcgcaauggacgaacugcauaaugagauuuuggagcuagaugaaaagguagacgaucugagggccgacacgaucuccucacagauagagcucgcuguucugcuuaguaacgaagguauuaucaauagcgaggaugaacaccuguuggcgcucgagcggaaacugaagaaaauguuagggcccuccgcaguggagaucggcaacggauguuucgaaacaaagcacaagugcaaucagaccugccuggaccguauugccgcuggcacuuuuaacgccggggaguucucucuaccaaccuuugauagccucaauaucacagcagccucacugaacgacgauggacuugacaaucauaccauuuugcuguacuauaguacugcugccuccagccucgcagucacacugaugcuugcgauauucaucguguacauggucucucgcgauaacgugucauguaguauuugccuguga

SEQ ID NO: 155808 - RNA, 1755 nt, Artificial Sequence; identical to SEQ ID NO: 155104
  derived and/or modified CDS sequence (opt3) from hemagglutinin__InfluenzaB__AGX24480

SEQ ID NO: 155809 - RNA, 1755 nt, Artificial Sequence; identical to SEQ ID NO: 155104
  derived and/or modified CDS sequence (opt3) from hemagglutinin__InfluenzaB__AGX24491

SEQ ID NO: 155810 - RNA, 1755 nt, Artificial Sequence
  derived and/or modified CDS sequence (opt3) from hemagglutinin__InfluenzaB__AGX24502
augaaggccaucauugugcugcucauggucguuaccagcaacgcugacagaauaugcacaggcaucacuuccucuaauucaccccacgugguaaaaacggcaacccagggggaggugaacgucacaggagugauuccucuuacuaccacaccaaccaagaguuacuucgccaaucugaaagguacuaggacacggggcaaguuguguccggauugcuuaaacuguaccgaccuggauguugcgcuagggcgccccaugugcgugggaacgacuccuagcgcuaaagccuccauccuccaugaaguccgaccagugaccucuggcuguuuucccauuaugcacgaccguacaaagaucagacaacugccuaaucuucugagggguuaugagaacauacgguugucgacucagaauguaaucgaugcagaaaaggccccagggggacccuaccgccucggcaccucaggcagcugcccuaacgcuacaaguaaauccggguucuuugcaaccauggccugggcuguucagaaggacaauaacaaaaaugccacgaacccacugacuguggaggucccguauauuuguacagaaggagaggaucagaucaccgugugggguuuccauucugacaauaagacucaaaugaaaaaccuguacggcgauagcaauccccagaaguuuacauccucagcgaacggggugaccacgcacuaugucagucagauuggcagcuucccugaccagaccgaggauggaggucucccacaaucugggagaaucguuguggacuacaugaugcagaagcccggaaaaacaggcacuauaguauaucagaggggcguguuacugccucagcgggucuggugcgcauccgggcgcucaaaggugauuaaaggaagccuuccauugaucggugaagccgauugucugcaugagaaguacggcgggcuaaacaaaaguaagcccuacuauaccggagaacacgcuaaagccauuggcaauugcccgaucuggguuaagacaccucucaagcuggcaaacgguacuaaauaccgacccccagcuaaacuucugaaggagagaggguuuuucggcgccaucgcgggauuuuuggagggcgggugggaaggaaugauugccgguuggcacggcuauaccucucauggggcacacggaguggcugucgccgcugaccucaaguccacacaagaggccauaaauaaaaucaccaagaaccugaauagcuuaucggaacuggaggugaagaaccuccagaggcuuucuggcgcaauggacgaacugcauaaugagauuuuggagcuagaugaaaaaguagacgaucugcgggccgacacuaucuccucacagauagagcucgcuguucugcuuaguaacgaagguauuaucaauagcgaggaugaacaccuguuggcgcucgagcguaagcugaaaaagauguuagggccuuccgcaguggagaucggcaacggauguuucgaaacgaaacacaagugcaaucaaacaugccuggaccgcauugccgcuggcaccuuuaacgccggggaguucucucuacccacuuuugauagccucaauaucaccgcagccucacugaacgacgauggacuugacaaucauacaauuuugcuguacuauaguaccgcugccuccagccucgcagucacucugaugcuugcgauauucaucguguacauggucucuagagauaacgugucauguaguauuugccuguga

SEQ ID NO: 155811 - RNA, 1755 nt, Artificial Sequence; identical to SEQ ID NO: 154779
  derived and/or modified CDS sequence (opt3) from hemagglutinin__InfluenzaB__AGX24513

SEQ ID NO: 155812 - RNA, 1755 nt, Artificial Sequence; identical to SEQ ID NO: 155104
  derived and/or modified CDS sequence (opt3) from hemagglutinin__InfluenzaB__AGX24524

SEQ ID NO: 155813 - RNA, 1755 nt, Artificial Sequence
  derived and/or modified CDS sequence (opt3) from hemagglutinin__InfluenzaB__AGX24535
augaaggccaucauugugcugcucauggucguuaccagcaacgcugacagaauaugcacaggcaucacuuccucuaauucaccccacgugguaaaaacggcaacccagggggaagugaacgucacaggagugauuccucuuacuaccacaccaaccaagaguuacuucgccaaucugaaagguacuaggacacggggcaaguuguguccggauugcuuaaacuguaccgaccuggauguugcgcuagggcgccccaugugcgugggaacgacuccuagcgcuaaagccuccauccuccaugaaguccgaccagugaccucuggcuguuuucccauuaugcacgaccguacaaagaucagacaacugccuaaucuucugagggguuaugagaacauacgguugucgacucagaauguaaucgaugcagaaaaggccccagggggacccuaccgccucggcaccucaggcagcugcccuaacgcuacaaguaaaauuggguucuuugcaaccauggccugggcuguuccaaaggacaauuauaaaaacgccacgaauccgcugacuguggagguccccuacaucuguacagaaggagaggaucagauuaccgugugggguuuccauuccgacaacaagacucagaugaaaaaucuguauggcgauucuaacccucaaaaguuuacaagcuccgcgaauggggugaccacgcacuacgucucacagaucggagacuucccagaucagaccgaggacggcggucucccccagagugggagaauaguuguggauuauaugaugcaaaagccuggaaaaacaggcacuauuguauaccagaggggcguguuacugccacagaaggucuggugcgcaagcgggcggucuaaagugaucaagggaucccuucccuugauuggugaagccgacugucugcaugagaaauacggcgggcuaaacaagucaaaaccguauuacaccggagaacacgcuaaggccaucggcaacugcccuaucuggguuaagacaccccucaaacuggcaaaugguacuaaguaucgcccuccagcuaaacuucugaaggagcgaggguuuuucggcgccauugcgggauuuuuggagggcgggugggaaggaaugauagccgguuggcacggcuacaccagccauggggcacacggaguggcugucgccgcugaccucaaaaguacacaggaggccaucaacaagauuaccaagaaucugaacucuuuauccgaacuggaggugaaaaaucuccaaagacuuagcggcgcaauggaugaacugcauaacgagaucuuggagcuagacgaaaagguagaugaccugagggccgauacuauaucggcucagauugagcucgcgguucugcuuucuaaugaagguaucaucaacuccgaggacgaacaccuguuggcacucgagcggaaacugaagaaaauguuagggcccucagccguggauauuggcaauggauguuucgagacgaagcacaagugcaaccagacaugccuggaccguaucgcugccggcaccuuuaaugcaggggaguucagucuaccaacuuuugauagccucaacauuaccgccgcuucccugaaugacgauggacuugacaaccauacaauauugcuguauuacucuaccgccgcaagcucacucgcggucacucugaugcuugcuaucuucauuguguauauggucagucgcgacaauguguccuguagcaucugccuguga

SEQ ID NO: 155814 - RNA, 1755 nt, Artificial Sequence; identical to SEQ ID NO: 154615
  derived and/or modified CDS sequence (opt3) from hemagglutinin__InfluenzaB__AGX24546

SEQ ID NO: 155815 - RNA, 1755 nt, Artificial Sequence
  derived and/or modified CDS sequence (opt3) from hemagglutinin__InfluenzaB__AGX24557
augaagaccaucauugugcugcucauggucguuacaagcaacgccgacagaauaugcacuggcaucacguccucuaauucaccccacgugguaaaaaccgcuacacagggggaggugaacgucacuggagugauuccucuuaccacaaccccaacuaagaguuacuucgcaaaucugaaagguacaaggacccggggcaaguuguguccggauugcuuaaacuguacggaccuggauguugcccuagggcgccccacuugcgugggaaccacaccuagcgcgaaagcuagcauccuccaugaaguccgaccagugacuucuggcuguuuucccauuaugcacgaccguaccaagaucagacaacugccuaaucuucugagggguuaugagaacauacgguugucgacacagaauguaaucgaugccgaaaaggcaccagggggacccuaccgccucggcaccucaggcagcugcccuaacgccacgaguaaauccggguucuuugcuacuauggcaugggccguuccaaaggacaauaacaaaaaugcuacaaacccgcugaccguggagguccccuauauuuguacugaaggagaggaucagaucacagugugggguuuccauucugacaauaagacccagaugaaaaaccuguacggcgauagcaauccucaaaaguuuacguccucagccaacggggugaccacacacuaugucagucagauuggauccuucccagaccagacugaggauggcggucucccccagucugggagaaucguuguggacuacaugaugcaaaagccuggaaaaaccggcacaauaguauaucagaggggcauuuuacugccacagaagguguggugcgcguccgggcggucaaaagucaucaagggaagccuucccuugauuggugaagcagauugucugcaugagaaauacggcgggcuaaacaagaguaaaccguacuauacuggagaacacgccaaggcuaucggcaauugcccuaucugggugaagaccccucucaaacuggccaacgguacaaaguaccgcccacccgcaaaacuucugaaggagcgaggguuuuucggcgcuauugccggauuuuuggagggcgggugggaaggaaugauagcggguuggcacggcuauaccucucauggggcccacggaguugcaguggcugccgaccucaaauccacucaggaggcuaucaauaagauuacgaagaaccugaauagcuuaucggaacuggaggucaaaaaccuccaaagacuuucuggcgccauggacgaacugcauaaugagaucuuggagcuagaugaaaagguggacgaucugagggcagacacaauauccucacagauugagcucgccguacugcuuaguaacgaagguaucaucaauagcgaggaugaacaccuguuggcucucgagcggaaacugaagaaaauguuagggcccuccgcgguugagauuggcaacggauguuucgaaaccaagcacaagugcaaucagacuugccuggaccguaucgcagccggcaccuuuaacgcuggggaguucucucuaccaacauuugauagccucaauauuaccgccgcaucacugaacgacgauggacuugacaaucauacuauauugcuguacuauaguacagccgcuuccagccucgccgugacgcugaugcuugcaaucuucauugucuacauggugucucgcgauaacgucucauguaguaucugccuguga

SEQ ID NO: 155816 - RNA, 1755 nt, Artificial Sequence; identical to SEQ ID NO: 155104
  derived and/or modified CDS sequence (opt3) from hemagglutinin__InfluenzaB__AGX24579

SEQ ID NO: 155817 - RNA, 1755 nt, Artificial Sequence; identical to SEQ ID NO: 155104
  derived and/or modified CDS sequence (opt3) from hemagglutinin__InfluenzaB__AGX24590

SEQ ID NO: 155818 - RNA, 1755 nt, Artificial Sequence; identical to SEQ ID NO: 155104
  derived and/or modified CDS sequence (opt3) from hemagglutinin__InfluenzaB__AGX24601

SEQ ID NO: 155819 - RNA, 1755 nt, Artificial Sequence; identical to SEQ ID NO: 155104
  derived and/or modified CDS sequence (opt3) from hemagglutinin__InfluenzaB__AGX24612

SEQ ID NO: 155820 - RNA, 1755 nt, Artificial Sequence; identical to SEQ ID NO: 154615
  derived and/or modified CDS sequence (opt3) from hemagglutinin__InfluenzaB__AGX24623

SEQ ID NO: 155821 - RNA, 1755 nt, Artificial Sequence; identical to SEQ ID NO: 155104
  derived and/or modified CDS sequence (opt3) from hemagglutinin__InfluenzaB__AGX24634

SEQ ID NO: 155822 - RNA, 1755 nt, Artificial Sequence; identical to SEQ ID NO: 155813
  derived and/or modified CDS sequence (opt3) from hemagglutinin__InfluenzaB__AGX24656

SEQ ID NO: 155823 - RNA, 1755 nt, Artificial Sequence; identical to SEQ ID NO: 154615
  derived and/or modified CDS sequence (opt3) from hemagglutinin__InfluenzaB__AGX24667

SEQ ID NO: 155824 - RNA, 1755 nt, Artificial Sequence; identical to SEQ ID NO: 154868
  derived and/or modified CDS sequence (opt3) from hemagglutinin__InfluenzaB__AGX24678

SEQ ID NO: 155825 - RNA, 1755 nt, Artificial Sequence; identical to SEQ ID NO: 155104
  derived and/or modified CDS sequence (opt3) from hemagglutinin__InfluenzaB__AGX24689

SEQ ID NO: 155826 - RNA, 1755 nt, Artificial Sequence; identical to SEQ ID NO: 155104
  derived and/or modified CDS sequence (opt3) from hemagglutinin__InfluenzaB__AGX24700

SEQ ID NO: 155827 - RNA, 1755 nt, Artificial Sequence; identical to SEQ ID NO: 155104
  derived and/or modified CDS sequence (opt3) from hemagglutinin__InfluenzaB__AGX24711

SEQ ID NO: 155828 - RNA, 1755 nt, Artificial Sequence; identical to SEQ ID NO: 154615
  derived and/or modified CDS sequence (opt3) from hemagglutinin__InfluenzaB__AGX24722

SEQ ID NO: 155829 - RNA, 1755 nt, Artificial Sequence; identical to SEQ ID NO: 154615
  derived and/or modified CDS sequence (opt3) from hemagglutinin__InfluenzaB__AGX24733

SEQ ID NO: 155830 - RNA, 1755 nt, Artificial Sequence; identical to SEQ ID NO: 154615
  derived and/or modified CDS sequence (opt3) from hemagglutinin__InfluenzaB__AGX24744

SEQ ID NO: 155831 - RNA, 1755 nt, Artificial Sequence; identical to SEQ ID NO: 154615
  derived and/or modified CDS sequence (opt3) from hemagglutinin__InfluenzaB__AGX24755

SEQ ID NO: 155832 - RNA, 1755 nt, Artificial Sequence; identical to SEQ ID NO: 155104
  derived and/or modified CDS sequence (opt3) from hemagglutinin__InfluenzaB__AGX24766

SEQ ID NO: 155833 - RNA, 1755 nt, Artificial Sequence; identical to SEQ ID NO: 154615
  derived and/or modified CDS sequence (opt3) from hemagglutinin__InfluenzaB__AGX24777

SEQ ID NO: 155834 - RNA, 1755 nt, Artificial Sequence; identical to SEQ ID NO: 154615
  derived and/or modified CDS sequence (opt3) from hemagglutinin__InfluenzaB__AGX24788

SEQ ID NO: 155835 - RNA, 1755 nt, Artificial Sequence; identical to SEQ ID NO: 154615
  derived and/or modified CDS sequence (opt3) from hemagglutinin__InfluenzaB__AGX24799

SEQ ID NO: 155836 - RNA, 1755 nt, Artificial Sequence; identical to SEQ ID NO: 155104
  derived and/or modified CDS sequence (opt3) from hemagglutinin__InfluenzaB__AGX24810

SEQ ID NO: 155837 - RNA, 1755 nt, Artificial Sequence; identical to SEQ ID NO: 155104
  derived and/or modified CDS sequence (opt3) from hemagglutinin__InfluenzaB__AGX24821

SEQ ID NO: 155838 - RNA, 1755 nt, Artificial Sequence
  derived and/or modified CDS sequence (opt3) from hemagglutinin__InfluenzaB__AGX24832
augaaggccaucauugugcugcucauggucguuaccagcaacgcugacagaauaugcacaggcaucacuuccucuaauucaccccacgugguaaaaacggcaacccagggggaggugaacgucacaggagugauuccucuuacuaccacaccaaccaagaguuacuucgccaaucugaaagguacuaggacacggggcaaguuguguccggauugcuuaaacuguaccgaccuggauguugcgcuagggcgccccaugugcgugggaacgacuccuagcgcuaaagccuccauccuccaugaaguccgaccagugaccucuggcuguuuucccauuaugcacgaccguacaaagaucagacaacugccuaaucuucugagggguuaugagaacauacgguugucgacucagaauguaaucgaugcagaaaaggccccagggggacccuaccgccucggcaccucaggcagcugcccuaacgcuacaaguaaauccggguucuuugcaaccauggccugggcuguuccaaaggacaauaacaaaaaugccacgaacccgcugacuguggagguccccuauauuuguacagaaggagaggaucagaucaccgugugggguuuccauucugacaauaagacucagaugaaaaaccuguacggcgauagcaauccucaaaaguuuacauccucagcgaacggggugaccacgcacuaugucagucagauuggcagcuucccagaccagaccgaggauggaggucucccccagucugggagaaucguuguggacuacaugaugcaaaagccuggaaaaacaggcacuauaguauaucagaggggcauuuuacugccacagcggguguggugcgcauccgggcgcucaaaggucaucaaaggaagccuucccuugauuggugaagccgauugucugcaugagaaguacggcgggcuaaacaaaaguaagccguacuauaccggagaacacgcuaaagccaucggcaauugcccuaucugggugaagacaccccucaagcuggcaaacgguacuaaauaccgaccuccagcuaaacuucugaaggagagaggguuuuucggcgccauugcgggauuuuuggagggcgggugggaaggaaugauagccgguuggcacggcuauaccucucauggggcacacggaguugcuguggccgcugaccucaaguccacacaggaggccaucaauaaaauuaccaagaaccugaauagcuuaucggaacuggaggucaagaaccuccaaaggcuuucuggcgcaauggacgaacugcauaaugagaucuuggagcuagaugaaaaaguggacgaucugcgggccgacacuauauccucacagauugagcucgcuguacugcuuaguaacgaagguaucaucaauagcgaggaugaacaccuguuggcgcucgagcguaagcugaaaaagauguuagggcccuccgcaguugagauuggcaacggauguuucgaaacgaaacacaagugcaaucagacaugccuggaccgcaucgccgcuggcaccuuuaacgccggggaguucucucuaccaacuuuugauagccucaauauuaccgcagccucacugaacgacgauggacuugacaaucauacaauauugcuguacuauaguaccgcugccuccagccucgcagugacucugaugcuugcgaucuucauugucuacauggugucuagagauaacgucucauguaguaucugccuguga

SEQ ID NO: 155839 - RNA, 1755 nt, Artificial Sequence
  derived and/or modified CDS sequence (opt3) from hemagglutinin__InfluenzaB__AGX24843
augaaggccaucauugugcugcucauggucguuaccagcaacgcugacagaauaugcacaggcaucacuuccucuaauucaccccacgugguaaaaacggcaacccagggggaagugaacgucacaggagugauuccucuuacuaccacaccaaccaagaguuacuucgccaaucugaaagguacuaggacacggggcaaguuguguccggauugcuuaaacuguaccgaccuggauguugcgcuagggcgccccaugugcgugggaacgacuccuagcgcuaaagccuccauccuccaugaaguccgaccagugaccucuggcuguuuucccauuaugcacgaccguacaaagaucagacaacugccuaaucuucugagggguuaugagaacauacgguugucgacucagaauguaaucgaugcagaaaaggccccagggggacccuaccgccucggcaccucaggcagcugcccuaacgcuacaaguaaaauuggguucuuugcaaccauggccugggcuguuccaaaggacaauuauaaaaacgccacgaauccgcugacuguggagguccccuacaucuguacagaaggagaggaucagauuaccgugugggguuuccauuccgacaacaagacucagaugaaaaaucuguauggcgauucuaacccucaaaaguuuacaagcuccgcgaauggggugaccacgcacuacgucucacagaucggagacuucccagaucagaccgaggacggcggucucccccagagugggagaauaguuguggauuauaugguacaaaagccuggaaaaacaggcacuauuguguaccagaggggcgucuuacugccacagcggguguggugcaccagcgggcgcucuaagguuaucaaaggaucccuucccuugauuggugaagcagacugucugcaugagaaguacggcgggcuaaacaaaucaaagccguauuacacaggagaacacgccaaagcuaucggcaacugcccuaucugggugaagacuccccucaagcuggccaaugguaccaaauaucgaccuccagcaaaacuucugaaggagagaggguuuuucggcgcuauugccggauuuuuggagggcgggugggaaggaaugauagcggguuggcacggcuacacaagccauggggcccacggagucgcaguggcugccgaccucaagaguacccaggaggcuaucaacaaaauuacuaagaaucugaacucuuuauccgaacuggagguaaagaaucuccaaaggcuuagcggcgccauggaugaacugcauaacgagaucuuggagcuagacgaaaaaguugaugaccugcgggcagauacgauaucgucucagauugagcucgccgugcugcuuuccaaugaagguaucaucaacucagaggacgaacaccuguuggcucucgagcguaagcugaaaaagauguuagggcccagugcggucgauauuggcaauggauguuucgagacaaaacacaagugcaaccagaccugccuggaccgcaucgcagccggcacuuuuaaugcuggggaguucagccuaccaaccuuugauucccucaacauuacagccgcaucucugaaugacgauggacuugacaaccauaccauauugcuguauuacagcacugccgcuucaagucucgccgugacacugaugcuugcaaucuucauugucuauaugguguccagagacaauguuagcuguucuaucugccuguga

SEQ ID NO: 155840 - RNA, 1755 nt, Artificial Sequence
  derived and/or modified CDS sequence (opt3) from hemagglutinin__InfluenzaB__AGX24854
augaaggccaucauugugcugcucauggucguuaccagcaacgcugacagaauaugcacaggcaucacuuccucuaauucaccccacgugguaaaaacggcaacccagggggaggugaacgucacaggagugauuccucuuacuaccacaccaaccaagaguuacuucgccaaucugaaagguacuaggacacggggcaaguuguguccggaaugcuuaaacuguaccgaucuggacguugcgcuagggcgccccaugugcgugggaacgacuccuagcgcuaaagccuccauccuccaugagguccgaccagugaccucuggcuguuuucccauuaugcacgaucguacaaagaucagacaacugccuaaucuucugagggguuaugaaaacauacgguugucgacucagaauguaaucgacgcagagaaggccccagggggacccuaccgccucggcaccucaggcagcugcccuaacgcuacaaguaaaauuggguucuuugcaaccauggccugggcuguuccaaaggauaauuauaaaaacgccacgaauccgcugacuguggaaguccccuacaucugugcggagggagaggaccagauuacagugugggguuuccauuccgauaacaagacccagaugaaaaaucuguauggcgacucuaacccucaaaaguuuacuagcuccgcaaauggggugacaacccacuacgucucacagaucggagauuucccagaccagacggaagauggcggucucccccagagugggagaauaguuguggacuauaugguacaaaggccuggaaagaccggcacaauuguguaccagcggggcgucuuacugccacagaaaguguggugcgccagcgggcgcucuaagguuaucaaaggaucccuucccuugauuggugaggcugauugucugcaugaaaaguacggcgggcuaaacaaaucaaagccguauuacacuggagagcacgccaaagcaaucggcaacugcccuaucugggugaagaccccacucaagcuggcuaaugguacaaaauaucgacccccugccaaacuucugaaggagagaggguuuuucggcgcgauugccggauuuuuggaaggcgggugggagggaaugauagcagguuggcacggcuacacuagccauggggcucacggagucgccguggcugccgaccucaagaguacccaggaagcaaucaacaaaauuacaaagaaucugaacucuuuauccgagcuggaaguaaagaaucuccaaaggcuuagcggcgccauggacgagcugcauaacgagaucuuggaacuagaugagaaaguugacgaucugcgggcugacaccauaucgucucagauugaacucgcggugcugcuuuccaaugaggguaucaucaacucagaagaugagcaccuguuggcacucgagcguaagcugaaaaagauguuagggcccagugccgucgacauuggcaauggauguuucgaaacuaaacacaagugcaaccagacgugccuggaucgcaucgcugccggcacauuuaaugcaggggaguucagccuaccaaccuuugacucccucaacauuacugccgcuucucugaaugaugacggacuugauaaccauaccauauugcuguauuacagcacagccgcaucaagucucgcggugacccugaugcuugcuaucuucauugucuauaugguguccagagacaauguuagcuguucuaucugccuguga

SEQ ID NO: 155841 - RNA, 1755 nt, Artificial Sequence
  derived and/or modified CDS sequence (opt3) from hemagglutinin__InfluenzaB__AGX24865
augaaggccaucauugugcugcucauggucguuaccagcaacgcugacagaauaugcacaggcaucacuuccucuaauucaccccacgugguaaaaacggcaacccagggggaagugaacgucacaggagugauuccucuuacuaccacaccaaccaagaguuacuucgccaaucugaaagguacuaggacacggggcaaguuguguccggauugcuuaaacuguaccgaccuggauguugcgcuagggcgccccaugugcgugggaacgacuccuagcgcuaaagccuccauccuccaugaaguccgaccagugaccucuggcuguuuucccauuaugcacgaccguacaaagaucagacaacugccuaaucuucugagggguuaugagaacauacgguugucgacucagaauguaaucgaugcagaaaaggccccagggggacccuaccgccucggcaccucaggcagcugcccuaacgcuacaaguaaaauuggguucuuugcaaccauggccugggcuguuccaaaggacaauuauaaaaacgccacgaauccgcugacuguggagguccccuacaucugugcggaaggagaggaucagauuacagugugggguuuccauuccgacaacaagacccagaugaaaaaucuguauggcgauucuaacccucaaaaguuuacuagcuccgcaaauggggugacaacccacuacgucucacagaucggagacuucccagaucagacggaggacggcggucucccccagagugggagaauaguuguggauuauaugguacaaaggccuggaaagaccggcacaauuguguaccagcggggcgucuuacugccacagaaaguguggugcgccagcgggcgcucuaagguuaucaaaggaucccuucccuugauuggugaagcugacugucugcaugagaaguacggcgggcuaaacaaaucaaagccguauuacacuggagaacacgccaaagcaaucggcaacugcccuaucugggugaagaccccacucaagcuggcuaaugguacaaaauaucgacccccugccaaacuucugaaggagagaggguuuuucggcgcgauugccggauuuuuggagggcgggugggaaggaaugauagcagguuggcacggcuacacuagccauggggcucacggagucgccguggcugccgaccucaagaguacccaggaggcaaucaacaaaauuacaaagaaucugaacucuuuauccgaacuggagguaaagaaucuccaaaggcuuagcggcgccauggaugaacugcauaacgagaucuuggagcuagacgaaaaaguugaugaccugcgggcugauaccauaucgucucagauugagcucgcggugcugcuuuccaaugaagguaucaucaacucagaggacgaacaccuguuggcacucgagcguaagcugaaaaagauguuagggcccagugccgucgauauuggcaauggauguuucgagacuaaacacaagugcaaccagacgugccuggaccgcaucgcugccggcacauuuaaugcaggggaguucagccuaccaaccuuugauucccucaacauuacugccgcuucucugaaugacgauggacuugacaaccauaccauauugcuguauuacagcacagccgcaucaagucucgcggugacccugaugcuugcuaucuucauugucuauaugguguccagagacaauguuagcuguucuaucugccuguga

SEQ ID NO: 155842 - RNA, 1755 nt, Artificial Sequence
  derived and/or modified CDS sequence (opt3) from hemagglutinin__InfluenzaB__AGX24876
augaaggccaucauugugcugcucauggucguuaccagcaacgcugacagaauaugcacaggcaucacuuccucuaauucaccccacgugguaaaaacggcaacccagggggaagugaacgucacaggagugauuccucuuacuaccacaccaaccaagaguuacuucgccaaucugaaagguacuaggacacggggcaaguuguguccggauugcuuaaacuguaccgaccuggauguugcgcuagggcgccccaugugcgugggaacgacuccuagcgcuaaagccuccauccuccaugaaguccgaccagugaccucuggcuguuuucccauuaugcacgaccguacaaagaucagacaacugccuaaucuucugagggguuaugagaacauacgguugucgacucagaauguaaucgaugcagaaaaggccccagggggacccuaccgccucggcaccucaggcagcugcccuaacgcuacaaguaaaauuggguucuuugcaaccauggccugggcuguuccaaaggacaauuauaaaaacgccacuaauucccugacgguggaggucccguacaucuguaaggaaggagaggaucagauuacagugugggguuuccauucugacaacaaaccccagaugaagaaucuguauggcgauagcaacccucaaaaguuuaccuccucagcgaauggggugacuacacacuacgucagucagguuggagacuucccagaucagaccgaggacggcggucucccccagagcgggagaaucgugguagauuauaugaugcaaaaaccuggaaggacgggcaccauaguguaccagcggggcgucuuacugccacagaagguguggugcgcaucugggcgcuccaaaguuauuaagggaucacuucccuugaucggugaagccgacugucugcaugagaaauacggcgggcuaaacaagagcaaaccguauuacacaggagaacacgcuaaggccauuggcaacugcccuaucugggugaagacuccccucaaacuggcaaaugguaccaaguaucgaccuccagcuaaacuucugaaggagagaggguuuuucggcgccaucgcgggauuuuuggagggcgggugggaaggaaugauugccgguuggcacggcuacacaagucauggggcacacggagucgcuguggccgcugaccucaaaucuacucaggaggccauaaacaagaucaccaagaaucugaacuccuuaagcgaacuggagguuaaaaaucuccaaaggcuuucgggcgcaauggaugaacugcauaacgagauuuuggagcuagacgaaaagguagaugaccugcgggccgauacaaucucuucccagauagagcucgcugugcugcuuucaaaugaagguauuaucaacagugaggacgaacaccuguuggcgcucgagcguaaacugaagaaaauguuagggcccagcgcagucgauaucggcaauggauguuucgagaccaagcacaagugcaaccagacuugccuggaccgcauugccgcuggcacguuuaaugccggggaguucucccuaccaacauuugauucucucaacaucaccgcagccagccugaaugacgauggacuugacaaccauacuauuuugcuguauuacucaaccgcugccaguucccucgcagugacacugaugcuugcgauauucaucgucuauauggugagcagagacaauguuucuuguucaauuugccuguga

SEQ ID NO: 155843 - RNA, 1755 nt, Artificial Sequence
  derived and/or modified CDS sequence (opt3) from hemagglutinin__InfluenzaB__AGX24887
augaaggccaucauugugcugcucauggucguuaccagcaacgcugacagaauaugcacaggcaucacuuccucuaauucaccccacgugguaaaaacggcaacccagggggaagugaacgucacaggagccauuccucuuacuaccacaccaaccaagaguuacuucgcgaaucugaaagguacuaggacacggggcaaguuguguccggauugcuuaaacuguaccgaccuggauguggcucuagggcgccccaugugcguuggaacgacuccuagcgccaaagcauccauccuccaugaagugcgaccagucaccucuggcuguuuucccauuaugcacgaccguacaaagaucagacaacugccuaaucuucugagggguuaugagaacauacgguugucgacucagaaugugaucgaugccgaaaaggcuccagggggacccuaccgccucggcaccucaggcagcugcccuaacgcaacaaguaaaauuggguucuuugccaccauggcuugggccguaccaaaggacaauuauaaaaacgcgacgaauccgcagacuguugaggugcccuacaucuguacagaaggagaggaucagauuaccgucugggguuuccauuccgacaacaagacucaaaugaaaaaucuguauggcgauucuaacccucagaaguuuacaagcuccgcaaauggggugaccacgcacuacgugucacagaucggagacuucccagaucagaccgaggacggcggucugccccaaagugggagaauagucguugauuauauggugcagaagccuggaaaaacaggcacuauuguauaccagaggggcgugcucuuaccacagaaggucuggugcgccagcgggcggucuaaagugaucaagggaucccugccccuuauuggugaagcugacuguuugcaugagaaauacggcgggcugaacaagucaaaaccguauuacaccggagaacacgccaaggcaaucggcaacugcccuaucuggguuaagacaccccuaaaacucgcuaaugguacuaaguaucgcccuccagccaaacugcuuaaggagcgaggguuuuucggcgcgauugccggauuucuggagggcgggugggaaggaaugauagcagguuggcacggcuacaccagccauggggcucacggaguggccgucgcugccgacuugaaaaguacacaagaggcaaucaacaagauuaccaagaaucucaacucucuguccgaauuagaggugaaaaaucugcagagacucagcggcgccauggaugaacuucauaacgagauccuggaguuggacgaaaagguagaugaccuaagggcugauacuaugucgucucagauagagcuggcgguucuccuguccaaugaagguauuaucaacucagaggacgaacaccuucuggcauuggagcggaaacucaagaaaaugcuggggcccagugccguggauaucggcaauggauguuucgagacgaagcacaagugcaaccaaacaugcuuagaccguauugcugccggcaccuuuaaugcaggggaguucagccugccaacuuuugauucccuaaacaucaccgccgcuucucucaaugacgauggacuggacaaccauacaauucuuuuguauuacagcaccgccgcaucaagucuggcggucacucucaugcuggcuauauucaucguguauauggucucccgcgacaaugugagcuguucuauuugccuuuga

SEQ ID NO: 155844 - RNA, 1755 nt, Artificial Sequence
  derived and/or modified CDS sequence (opt3) from hemagglutinin__InfluenzaB__AGX24898
augaaggccaucauugugcugcucauggucguuaccagcaacgcugacagaauaugcacaggcaucacuuccucuaauucaccccacgugguaaaaacggcaacccagggggaggugaacgucacaggagugauuccucuuacuaccacaccaaccaagaguuacuucgccaaucugaaagguacuaggacacggggcaaguuguguccggauugcuuaaacuguaccgaccuggauguugcgcuagggcgccccaugugcgugggaacgacuccuagcgcuaaagccuccauccuccaugaaguccgaccagugaccucuggcuguuuucccauuaugcacgaccguacaaagaucagacaacugccuaaucuucugagggguuaugagaagauacgguugucgacucagaacguaaucgaugcagaaaaagccccagggggacccuaccgccucggcaccucaggcagcugcccuaaugcuacaaguaagauuggguucuuugcaaccauggccugggcuguuccaaaagacaacuauaagaaugccacgaacccgcugacuguggagguccccuacaucuguacaggaggugaagaucagauuaccguguggggcuuccauuccgacaauaaaacucagaugaagucucuguauggggauagcaacccucaaaaguuuacauccucagcgaauggagugaccacgcacuacgucagucagaucggcgacuucccagaucagaccgaggacggugggcucccccagagcggaagaauaguuguggauuauaugaugcaaaaaccuggcaagacaggcacuauuguauaccagaggggaguguuacugccacagaaagucuggugcgcaucugggcgguccaaggugaucaaagguucacuucccuugauuggcgaggccgacugucugcaugaaaaguacgggggacuaaacaaaagcaagccguauuacaccggcgagcacgcuaaggccaucgguaauugcccuaucuggguuaaaacaccccucaagcuggcaaacgggacuaaauaucgcccuccagcuaaacuucugaaggaacgaggcuuuuucggagccauugcgggcuuuuuggaagggggaugggaggguaugauagccggcuggcacggguacaccagucauggagcacacggcguggcugucgccgcugaccucaagucuacacaggaggccaucaacaagauuaccaaaaaucugaacuccuuaagcgagcuggaagugaagaaucuccaaagacuuucgggugcaauggaugagcugcauaacgaaaucuuggagcuagacgagaaaguagaugaccugagggccgauacuauaucuucccagauugaacucgcuguucugcuuucaaaugaggggaucaucaacagugaagacgagcaccuguuggcgcucgaacggaagcugaaaaagauguuaggccccagcgcaguggauauuggaaauggcuguuucgagacgaagcacaaaugcaaccagacaugccuggaccguaucgccgcugggaccuuuaaugccggagaguucucccuaccaacuuuugauucucucaacauuaccgcagccagccugaaugacgauggucuugacaaccauacaauauugcuguauuacucaaccgcugccaguucccucgcagucacucugaugcuugcgaucuucauuguguauauggucagccgcgacaaugugucuuguucaaucugccuguga

SEQ ID NO: 155845 - RNA, 1758 nt, Artificial Sequence; identical to SEQ ID NO: 154731
  derived and/or modified CDS sequence (opt3) from hemagglutinin__InfluenzaB__AGX84854

SEQ ID NO: 155846 - RNA, 1758 nt, Artificial Sequence
  derived and/or modified CDS sequence (opt3) from hemagglutinin__InfluenzaB__AGX84865
augaaggccaucauugugcugcucauggucguuaccagcaacgcugacagaauaugcacaggcaucacuuccucuaauucaccccacauugugaaaacggcaacccagggggagguaaacgugacaggagucaucccucuuacuaccacaccaaccaagagucauuucgccaaucugaaagguacugaaacaaggggcaaguuguguccgaaaugccccaacuguaccgauuuagacguggcgcuggggcggccuaagugcacgggaaagauuccaagcgcucgcguuuccauccuacacgaggugcgacccgucacuucuggcuguuuuccuauaaugcaugaucguaccaaaaucagacaacucccaaaucugcuuagggguuacgaacacauucggcugucgacacauaacgugaucaaugccgagaacgcacccgggggaccuuauaagauuggcacuucaggcagcugcccaaauguaaccaacgggaauggauucuuugccacaauggcuugggcaguuccgaaaaacgacaagaauaaaaccgccacgaaccccuugacuaucgaagugccuuacauauguacagagggugaggaucagauuaccgucuggggcuuccacagugacaaugaaacucagauggcuaagcucuauggggauuccaagccacagaaauuuacaucuagcgccaacggagugaccacgcacuacgugucccaaaucggcgguuuccccaaccagaccgaggacgggggacugccucagucaggccgcauugucguugauuauauggugcagaagaguggcaaaacagggacuaucaccuaccaaagaggaauccugcucccacagaagguauggugcgcgagcgguaggucuaaagugauuaagggcuccuuaccccugauaggggaagcagacugucuucaugagaaauauggaggcuugaauaagucaaagccguacuacacaggugagcacgccaaagcuaucgggaacugcccuauuugggucaagacuccccugaaacuagccaauggcaccaaguaucggccuccagcaaaacuccugaaggaacgcggauuuuucggcgcuaucgccggguuucuugagggagguugggaaggcaugauagcgggguggcauggauacacaagccacggcgcccacgguguggcaguugcugccgaucugaagaguacccaggaggcuauuaacaaaaucacuaagaauuugaacucucucuccgaacuggaggugaaaaauuuacagcgacugagcggggccauggacgagcuccauaacgaaauccuugagcuggaugaaaaggucgacgacuugagagcagauacgauuucgucucaaaucgagcuagccgugcugcucuccaaugaaggcauuauaaacucagaggacgagcaucugcuugcucuggaaaggaaauugaagaagaugcucggacccagugcgguagagaucggcaauggguguuucgaaacaaaacacaagugcaaccagaccugccuggaucggauugcagccggaacuuuugacgcuggugaguucagcuuaccaaccuuugauucccugaauaucacagccgcaucucuaaacgacgauggccucgacaaucacaccauccugcuuuauuacagcacugccgcuucaaguuuggccguuacacugaugauugcaauauucguggucuauauggugucccgugauaacgucagcuguucuaucugccucuga

SEQ ID NO: 155847 - RNA, 1758 nt, Artificial Sequence; identical to SEQ ID NO: 155846
  derived and/or modified CDS sequence (opt3) from hemagglutinin__InfluenzaB__AGX84876

SEQ ID NO: 155848 - RNA, 1758 nt, Artificial Sequence; identical to SEQ ID NO: 155846
  derived and/or modified CDS sequence (opt3) from hemagglutinin__InfluenzaB__AGX84887

SEQ ID NO: 155849 - RNA, 1758 nt, Artificial Sequence; identical to SEQ ID NO: 154731
  derived and/or modified CDS sequence (opt3) from hemagglutinin__InfluenzaB__AGX84898

SEQ ID NO: 155850 - RNA, 1758 nt, Artificial Sequence
  derived and/or modified CDS sequence (opt3) from hemagglutinin__InfluenzaB__AGX84920
augaaggccaucauugugcugcucauggucguuaccagcaacgcugacagaauaugcacaggcaucacuuccucuaauucaccccacgugguaaaaacggcaacccagggggaggugaacgucacaggagugauuccucuuacuaccacaccaaccaagagucauuucgccaaucugaaagguacugaaacaaggggcaaguuguguccgaaaugccccaacuguaccgauuuagacguugcgcuggggcggccuaagugcacgggaaagaucccaagcgcuggcguguccauucuacacgagguccgccccgugacuucugguuguuuuccuaucaugcaugaucgaaccaaaauacgucaacucccaaaucugcuuagaggguacgaacacaucaggcugucgacacauaacguaauuaaugccgagaacgcacccggaggcccuuauaagaucggcacuucagggagcugcccaaauguuaccaacggaaaugguuucuuugccacaauggcuugggcagugccgaaaaacgacaagaauaaaaccgccacgaaccccuugacuauugaagucccuuacaucuguacagagggcgaggaucagauaaccguguggggguuccacagugacaaugaaacucagauggcuaagcucuauggagauuccaagccacagaaauuuacaucuagcgccaacggcgugaccacgcacuacgucucccaaauugguggguuccccaaccagaccgaggacggaggccugccucagucaggccggaucguuguggauuauaugguacagaagagugggaaaacaggaacuauuaccuaccaacgcgguauccugcucccacagaagguguggugcgcgagcggcagaucuaaagucaucaagggguccuuaccccugauuggagaagcagacugucuucaugagaaauauggcgguuugaauaagucaaagccguacuacacaggggagcacgccaaagcuauaggcaacugcccuaucugggugaagacuccccugaaacuagccaauggaaccaaguauaggccuccagcaaaacuccugaaggaacggggcuuuuucggggcuauugccggauuucuugaggguggcugggaagggaugaucgcgggauggcauggcuacacaagccacggugcccacgggguugcaguggcugccgaucugaagaguacccaggaggcuauaaacaaaauuacuaagaauuugaacucucucuccgaacuggaggucaaaaauuuacagcgccugagcggcgccauggacgagcuccauaacgaaauccuugagcuggaugaaaagguggacgacuugcgagcagauacgaucucgucucaaauugagcuagccguacugcucuccaaugaaggaaucauuaacucagaggacgagcaucugcuugcucuggaaagaaaauugaagaagaugcucggccccagugcgguugagauagggaauggauguuucgaaacaaaacacaagugcaaccagaccugccuggauaggaucgcagccgguacuuuugacgcuggcgaguucagcuuaccaaccuuugauucccugaauauuacagccgcaucucuaaacgacgaugggcucgacaaucacaccauccugcuuuauuacagcacugccgcuucaaguuuggccgugacacugaugaucgcaauuuucgucguguauauggucucccgggauaacgugagcuguucuauaugccucuga

SEQ ID NO: 155851 - RNA, 1758 nt, Artificial Sequence
  derived and/or modified CDS sequence (opt3) from hemagglutinin__InfluenzaB__AGZ59821
augaaggccaucauugugcugcucauggucguuaccagcaacgcugacagaauaugcacaggcaucacuuccucuaauucaccccacgugguaaaaacggcaacccagggggaggugaacgucacaggagugauuccucuuacuaccacaccaaccaagagucauuucgccaaucugaaagguacuaagacaaggggcaaauuguguccgaagugcuuuaacuguaccgauuuagacguugcgcuggggcggcccaagugcacgggaaauaucccuagcgcuaaaguguccauucuacacgaaguccgcccagugacuucuggcuguuuccccaucaugcaugaucgaaccaagguacgucaacucccuaaccugcuuagagguuacgagcacauaaggcugucgacacauaauguuaucaacgccgaaaaagcaccagggggacccuauaagauuggcacuucaggcagcugcccuaaugugaccaacgggaauggauuuuucgccacaauggcuugggcagucccgaaaaacgacaauaacaagaccgccacgaauaguuugacuaucgaggugccauacauuuguacagaaggugaggaucagaucaccguguggggcuuucacuccgacaacgagacucagauggcuaagcucuauggggauucuaaaccccagaaguucacaagcuccgccaacggagucaccacgcacuacguuucacaaauaggcgguuuuccuaaucagaccgaagacgggggacugccacagaguggccggauugugguagauuauauggugcagaaaagcggcaagacagggacuaucaccuaccaacgcgguauucugcucccccagaaagucuggugcgcgucuggaagauccaaggugaucaaaggcucauuaccucugaucggggaggcagacugucuucaugaaaaguauggaggcuugaacaagagcaaaccauacuacacaggugagcacgccaaggcuauugggaauugccccauauggguuaaaacuccgcugaagcuagccaacggcaccaaauauaggccucccgcaaagcuccugaaggagcggggauucuuuggcgcuaucgccggguuccuugaaggagguugggagggcaugauugcgggguggcauggauacacaagucacggcgcccacgguguggcagucgcugccgaucugaaaucuacccaggaagcuaucaauaagauaacuaaaaaccuuaauucccucagcgagcuggaagugaagaacuuacagcgccugucgggggccauggacgagcuccauaaugagauucuugaacuggaugagaaaguagacgacuugcgagcagauacgaucucuucccaaaucgaacuagccguucugcucucaaacgagggcauuaucaauagugaagacgagcaccuguuggcucuggagagaaaguugaagaaaaugcucggaccaagcgcgguggaaauuggcaacggguguuuugagacaaagcauaaaugcaaucagaccugccuggauaggauagcagccggaacuuucgacgcuggugaauuuuccuuaccuaccuucgauucucugaacaucacagccgcaagccuaaaugacgauggccucgacaaccacaccauucugcuuuauuacucaacugccgcuaguuccuuggccgucacacugaugaucgcaaucuucguggucuauauggugagccgggauaacguuucuuguucaauuugccucuga

SEQ ID NO: 155852 - RNA, 1758 nt, Artificial Sequence
  derived and/or modified CDS sequence (opt3) from hemagglutinin__InfluenzaB__AGZ59832
augaaggccaucauugugcugcucauggucguuaccagcaacgcugacagaauaugcacaggcaucacuuccucuaauucaccccacgugguaaaaacggcaacccagggggaggugaacgucacaggagugauuccucuuacuaccacaccaaccaagagucauuucgccaaucugaaagguacuaagacaaggggcaaauuguguccgaagugcuuaaacuguaccgaucuggacguugcgcuagggcggcccaagugcacgggaaauaucccuagcgcuaaaguguccauucuccacgaaguccgcccagugacuucuggcuguuuucccaucaugcaugaucgaaccaagauacgucaacugccuaaccuucugagagguuacgagcacaucagguugucgacacauaauguaauuaacgccgaaaaagcaccagggggacccuauaagaucggcacuucaggcagcugcccuaauguuaccaacgggaauggauucuuugccacaauggcuugggcagugccgaaaaacgacaauaacaagaccgccacgaauagucucacuauugaggucccauacaucuguacagaaggugaggaucagauaaccguguggggcuuccacuccgacaacgagacucagauggcuaagcuguauggggauucuaaaccccagaaguuuacaagcuccgccaacggagugaccacgcacuacgucucacaaauuggcgguuucccuaaucagaccgaagacgggggacugccacagaguggccggaucguuguggauuauaugguacagaaaagcggcaagacagggacuauuaccuaccaacgcggaauccucuuaccccagaaaguguggugcgcgucugguaaguccaaagucaucaagggcucacugccucuuauuggggaggcagacuguuugcaugaaaaguauggaggccugaacaaaagcaagccauacuacacaggugagcacgccaaagcuauagggaauugccccaucugggugaagacuccgcuaaaacucgccaacggcaccaaguauagaccucccgcaaagcugcuuaaagagaggggauuuuucggcgcuauugccggguuucuggaaggagguugggagggcaugaucgcgggguggcauggauacacaagucacggcgcccacgguguugcaguggcugccgauuugaagucuacccaggaagcuauaaauaaaauuacuaagaaccucaauucccugagcgaguuagaagucaaaaaccugcagcggcucucgggggccauggacgagcuucauaaugagauccuggaauuggaugagaagguggacgaccuacgcgcagauacgaucucuucccaaauugaacuggccguacuccugucaaacgagggcaucauuaauagugaagacgagcaccuucuggcuuuggagcgaaagcucaaaaagaugcugggaccaagcgcgguugaaauaggcaacggguguuucgagacaaaacauaagugcaaucagaccugcuuagauagaaucgcagccggaacuuuugacgcuggugaguucucccugccuaccuuugauucucuaaacauuacagccgcaagccucaaugaagacggccuggauaaccacaccauccuuuuguauuacucaacugccgcuaguucccuggccgugacacucaugaucgcaauuuucgucguguauauggucagcagggacaacgugucuuguucaauaugccuguga

SEQ ID NO: 155853 - RNA, 1758 nt, Artificial Sequence
  derived and/or modified CDS sequence (opt3) from hemagglutinin__InfluenzaB__AGZ59843
augaaggccaucauugugcugcucauggucguuaccagcaacgcugacagaauaugcacaggcaucacuuccucuaauucaccccacgugguaaaaacggcaacccagggggaggugaacgucacaggagugauuccucuuacuaccacaccaaccaagagucauuucgccaaucugaaagguacugaaacaaggggcaaguuguguccgaaaugcuuaaacuguaccgaucuggacguugcgcuagggcggcccaagugcacgggaaauaucccuagcgcucgcguguccauucuccacgagguccgaccagugacuucuggcuguuuucccaucaugcaugaucguaccaagauaagacaacugccuaaccuucugagggguuacgaacacauccgguugucgacacauaauguaauuaacgccgagaaugcaccagggggacccuauaaaaucggcacuucaggcagcugcccuaacguuaccaaugggaacggauucuuugccacaauggcuugggcagugccaaagaaugacaacaauaaaaccgccacgaacagucucacuauugaagucccguacaucuguacagagggugaggaucagauaaccguguggggcuuccacuccgacaacgaaacucagauggcuaagcuguauggggauucuaaaccccagaaguuuacaagcuccgccaauggagugaccacgcacuacgucucacaaauuggcgguuucccuaaccagaccgaggacgggggacugccacagaguggccgcaucguuguggauuauaugguacaaaagagcggcaaaacagggacuauuaccuaccagagaggaauccucuuaccccagaagguguggugcgcgucugguagguccaaagucaucaagggcucacugccucuuauuggggaagcagacuguuugcaugagaaauauggaggccugaauaagagcaaaccauacuacacaggugagcacgccaaggcuauagggaacugccccaucugggugaagacuccgcuaaaacucgccaauggcaccaaguaucggccucccgcaaaacugcuuaaggaacgcggauuuuucggcgcuauugccggguuucuggagggagguugggaaggcaugaucgcgggguggcauggauacacaagucacggcgcccacgguguugcaguggcugccgauuugaaaucuacccaggaggcuauaaacaagauuacuaagaaucucaacucccugagcgaauuagaggucaaaaaucugcagcgacucucgggggccauggacgagcuucauaacgaaauccuggaguuggaugaaaagguggacgaccuaagagcagauacgaucucuucccaaauugagcuggccguacuccugucaaaugaaggcaucauuaacagugaggacgagcaccuucuggcuuuggaaaggaaacucaagaaaaugcugggaccaagcgcgguugagauaggcaauggguguuucgaaacaaagcauaagugcaaccagaccugcuuagaucggaucgcagccggaacuuuugacgcuggugaguucucccugccuaccuuugauucucuaaauauuacagccgcaagccucaacgacgauggccuggacaaccacaccauccuuuuguauuacucaacugccgcuaguucccuggccgugacacucaugaucgcaauuuucauagucuauauggugagccgugauaaugucucuuguucaaucugccuguga

SEQ ID NO: 155854 - RNA, 1758 nt, Artificial Sequence; identical to SEQ ID NO: 155200
  derived and/or modified CDS sequence (opt3) from hemagglutinin__InfluenzaB__AGZ59854

SEQ ID NO: 155855 - RNA, 1758 nt, Artificial Sequence; identical to SEQ ID NO: 154562
  derived and/or modified CDS sequence (opt3) from hemagglutinin__InfluenzaB__AGZ59865

SEQ ID NO: 155856 - RNA, 1758 nt, Artificial Sequence
  derived and/or modified CDS sequence (opt3) from hemagglutinin__InfluenzaB__AGZ59876
augaaggccaucauugugcugcucauggucguuaccagcaacgcugacagaauaugcacaggcaucacuuccucuaauucaccccacgugguaaaaacggcaacccagggggaggugaacgucacaggagugauuccucuuacuaccacaccaaccaagagucauuucgccaaucugaaagguacugaaacaaggggcaaguuguguccgaaaugcuuaaacuguaccgaucuggacguugcgcuagggcggcccaagugcacgggaaauaucccuagcgcucgcguguccauucuccacgagguccgaccagugacuucuggcuguuuucccaucaugcaugaucguaccaagauaagacaacugccuaaccuucugagggguuacgaacacauccgguugucgacacauaauguaauuaacgccgagaaugcaccagggggacccuauaaaaucggcacuucaggcagcugcccuaacguuaccaaugggaacggauucuuugccacaauggcuugggcagugccaaagaaugacaaaaacaagaccgccacgaauagucucacuauugaagucccguacaucuguacagagggugaggaucagauaaccguguggggcuuccacuccgacaacgaaacucagauggcuaaacuguauggggauucuaagccccagaaguuuacaagcuccgccaacggagugaccacgcacuacgucucacaaauuggcgguuucccuaaucagaccgaggacgggggacugccacagaguggccgcaucguuguggauuauaugguacagaaaagcggcaagacagggacuauuaccuaccaaagaggaauccucuuaccccagaaaguguggugcacaucugguagguccaaggucaucaaaggcucacugccucuuauuggggaagcggacuguuugcaugagaaguauggaggccugaacaaaagcaagccauacuacacuggugagcacgcaaaggccauagggaauugccccaucugggugaaaaccccgcuaaagcucgcuaacggcacaaaauaucggccucccgccaagcugcuuaaagaacgcggauuuuucggcgcaauugcuggguuucuggagggagguugggaaggcaugaucgccggguggcauggauacaccagucacggcgcgcacgguguugccguggcagcugauuugaagucuacucaggaggccauaaauaagauuacgaaaaaccucaauucccugagcgaauuagaggucaagaaccugcagcgacucucgggggcuauggacgagcuucauaaugaaauccuggaguuggaugaaaaaguggacgaccuaagagccgauacaaucucuucccaaauugagcuggcaguacuccugucaaacgaaggcaucauuaauagugaggacgagcaccuucuggccuuggaaaggaagcucaaaaagaugcugggaccaagcgcuguugagauaggcaacggguguuucgaaaccaagcauaaaugcaaucagacuugcuuagaucggaucgcggcaggaaccuuugacgccggugaguucucccugccuacauuugauucucuaaacauuaccgcugccagccucaaugacgauggccuggacaaccacacuauccuuuuguauuacucaacagcagccaguucccuggcugugacgcucaugaucgccauuuucgucguguauauggucagccgugauaacgugucuuguucaauaugccuguga

SEQ ID NO: 155857 - RNA, 1755 nt, Artificial Sequence; identical to SEQ ID NO: 154615
  derived and/or modified CDS sequence (opt3) from hemagglutinin__InfluenzaB__AGZ59887

SEQ ID NO: 155858 - RNA, 1758 nt, Artificial Sequence; identical to SEQ ID NO: 155037
  derived and/or modified CDS sequence (opt3) from hemagglutinin__InfluenzaB__AGZ59898

SEQ ID NO: 155859 - RNA, 1758 nt, Artificial Sequence; identical to SEQ ID NO: 155403
  derived and/or modified CDS sequence (opt3) from hemagglutinin__InfluenzaB__AGZ59909

SEQ ID NO: 155860 - RNA, 1758 nt, Artificial Sequence; identical to SEQ ID NO: 155037
  derived and/or modified CDS sequence (opt3) from hemagglutinin__InfluenzaB__AGZ59920

SEQ ID NO: 155861 - RNA, 1758 nt, Artificial Sequence; identical to SEQ ID NO: 155037
  derived and/or modified CDS sequence (opt3) from hemagglutinin__InfluenzaB__AGZ59931

SEQ ID NO: 155862 - RNA, 1758 nt, Artificial Sequence; identical to SEQ ID NO: 155037
  derived and/or modified CDS sequence (opt3) from hemagglutinin__InfluenzaB__AGZ59942

SEQ ID NO: 155863 - RNA, 1758 nt, Artificial Sequence; identical to SEQ ID NO: 155037
  derived and/or modified CDS sequence (opt3) from hemagglutinin__InfluenzaB__AGZ59953

SEQ ID NO: 155864 - RNA, 1758 nt, Artificial Sequence
  derived and/or modified CDS sequence (opt3) from hemagglutinin__InfluenzaB__AGZ59965
augaaggccaucauugugcugcucauggucguuaccagcaacgcugacagaauaugcacaggcaucacuuccucuaauucaccccacgugguaaaaacggcaacccagggggaggugaacgucacaggagugauuccucuuacuaccacaccaaccaagagucauuucgccaaucugaaagguacugaaacaaggggcaaguuguguccgaaaugcuuaaacuguaccgaucuggacguugcgcuagggcggcccaagugcacgggaaagaucccuagcgcucgcguguccauucuccacgagguccgaccagugacuucuggcuguuuucccaucaugcaugaucguaccaaaauaagacaacugccuaaucuucugagggguuacgaacacauccgguugucgacacauaacguaauuaaugccgagaacgcaccagggggacccuauaagaucggcacuucaggcagcugcccuaauauuaccaacgggaauggauucuuugccacaauggcuugggcaguuccgaaaaacgacaagaauaaaaccgccacgaacccacucacuaucgaagugcccuacauauguacagagggugaggaucagauuaccgucuggggcuuccacagugacaaugaaacucagauggcuaagcuguauggggauuccaagccucagaaauuuacaucuagcgccaacggagugaccacgcacuacgugucccaaaucggcgguuucccaaaccagaccgaggacgggggacugccccagucaggccgcgucguuguggauuauaugaugcagaagaguggcaaaacagggacuauuaccuaccaaagaggaauccucuuaccucagaagguauggugcgcgagcgguaggucuaaagugaucaagggcucccugccacuuauuggggaagcagacuguuugcaugagaaauauggaggccugaauaagucaaagcccuacuacacaggugagcacgccaaagcuauagggaacugcccgaucugggucaagacuccucuaaaacucgccaauggcaccaaguaucggcccccagcaaaacugcuuaaggaacgcggauuuuucggcgcuauugccggguuucuggagggagguugggaaggcaugaucgcgggguggcauggauacacaagccacggcgcccacgguguggcaguugcugccgauuugaagaguacccaggaggcuauaaacaaaauuacuaagaaucucaacucucuguccgaauuagaggugaaaaaucugcagcgacucagcggggccauggacgagcuucauaacgaaauccuggaguuggaugaaaaggucgacgaccuaagagcagauacgaucucgucucaaauugagcuggccgugcuccuguccaaugaaggcaucauuaacucagaggacgagcaccuucuggcuuuggaaaggaaacucaagaagaugcugggaccuagugcgguagagauaggcaauggguguuucgaaacaaaacauaagugcaaccagaccugcuuagaucggaucgcagccggaacuuuugacgcuggugaguucagccugcccaccuuugauucccuaaauauuacagccgcaucucucaacgacgauggccuggacaaucacaccauccuuuuguauuacagcacugccgcuucaagucuggccguuacacucaugaucgcaauuuucguggucuauauggugucccgugauaacgucagcuguucuauaugccuguga

SEQ ID NO: 155865 - RNA, 1758 nt, Artificial Sequence; identical to SEQ ID NO: 155037
  derived and/or modified CDS sequence (opt3) from hemagglutinin__InfluenzaB__AGZ59976

SEQ ID NO: 155866 - RNA, 1758 nt, Artificial Sequence; identical to SEQ ID NO: 155037
  derived and/or modified CDS sequence (opt3) from hemagglutinin__InfluenzaB__AGZ59987

SEQ ID NO: 155867 - RNA, 1758 nt, Artificial Sequence; identical to SEQ ID NO: 155037
  derived and/or modified CDS sequence (opt3) from hemagglutinin__InfluenzaB__AGZ59999

SEQ ID NO: 155868 - RNA, 1758 nt, Artificial Sequence; identical to SEQ ID NO: 154656
  derived and/or modified CDS sequence (opt3) from hemagglutinin__InfluenzaB__AGZ60010

SEQ ID NO: 155869 - RNA, 1758 nt, Artificial Sequence; identical to SEQ ID NO: 154656
  derived and/or modified CDS sequence (opt3) from hemagglutinin__InfluenzaB__AGZ60021

SEQ ID NO: 155870 - RNA, 1758 nt, Artificial Sequence; identical to SEQ ID NO: 154656
  derived and/or modified CDS sequence (opt3) from hemagglutinin__InfluenzaB__AGZ60033

SEQ ID NO: 155871 - RNA, 1755 nt, Artificial Sequence
  derived and/or modified CDS sequence (opt3) from hemagglutinin__InfluenzaB__AGZ60044
augaaggccaucauugugcugcucauggucguuaccagcaacgcugacagaauaugcacaggcaucacuuccucuaauucaccccacgugguaaaaacggcaacccagggggaagugaacgucacaggagugauuccucuuacuaccacaccaaccaagaguuacuucgccaaucugaaagguacuaggacacggggcaaguuguguccggauugcuuaaacuguaccgaccuggauguugcgcuagggcgccccaugugcgugggaacgacuccuagcgcuaaagccuccauccuccaugaaguccgaccagugaccucuggcuguuuucccauuaugcacgaccguacaaagaucagacaacugccuaaucuucugagggguuaugagaacauacgguugucgacucagaauguaaucgaugcagaaaacgccccagggggacccuaccgccucggcaccucaggcagcugcccuaaugcuacaaguaaguccggguucuuugcaaccauggccugggcuguuccaaaagacaacaauaagaacgccacgaauccgcugacuguggagguccccuauguguguacagaaggagaggaucagauuaccgugugggguuuccauucugacaacaaaacucagaugaagaaucuguacggcgauagcaacccucaaaaauuuacauccucagcgaacggggucaccacgcacuauguuagucagaucggaggcuucccagcacagaccgaggacggugggcucccccagagcggaagaauugugguagauuacauggugcaaaagccuaggaagacaggcacuaucgucuaucagcggggcguguuacugccacagaaaguuuggugcgccucugggcgcuccaaggugauaaaaggaucacuucccuugauuggugaagcugacugucugcaugagaaguacggcgggcuaaauaaaagcaagccguacuauaccggagaacacgccaaagcaaucggcaacugcccuauuugggucaagacaccccucaagcuggcuaaugguacuaaauaccgaccuccagccaaacuucugaaggagagaggguuuuucggcgcgaucgccggauuuuuggagggcgggugggaaggaaugaucgcagguuggcacggcuauaccagucauggggcucacggaguggccguagcugccgaucucaagucuacacaggaggcaauuaacaaaauaaccaagaaucugaacuccuuaagcgaacuggagguuaagaaucuccaaaggcuuucgggcgccauggacgaacugcauaacgagaucuuggagcuagacgaaaaaguggaugaccugcgggcugauacuauuucuucccagaucgagcucgcgguccugcuuucaaaugaagguauaauuaacagugaggacgaacaccuguuggcacucgagcguaagcugaaaaagauguuagggcccagcgccguggauaucggcaauggauguuucgagacgaaacacaagugcaaccagacaugccuggaccgcaucgcugccggcaccuuuaaugcaggggaguucucccuaccaacuuuugauucucucaacauuaccgccgcuagccugaaugacgauggacuugacaaccauacaaucuugcuguacuauucaaccgccgcaaguucccucgcggucacucugaugcuugcuauuuucauaguguacaugguuagcagagauaacgugucuuguucaaucugccuguga

SEQ ID NO: 155872 - RNA, 1755 nt, Artificial Sequence; identical to SEQ ID NO: 155074
  derived and/or modified CDS sequence (opt3) from hemagglutinin__InfluenzaB__AGZ60055

SEQ ID NO: 155873 - RNA, 1755 nt, Artificial Sequence
  derived and/or modified CDS sequence (opt3) from hemagglutinin__InfluenzaB__AGZ60066
augaaggccaucauugugcugcucauggucguuaccagcaacgcugacagaauaugcacaggcaucacuuccucuaauucaccccacgugguaaaaacggcaacccagggggaggugaacgucacaggagugauuccucuuacuaccacaccaaccaagagucauuucgccaaucugaaagguacuaggacacggggcaaguuguguccggauugcuuaaacuguaccgaccuggauguugcgcuagggcgccccaugugcgugggaacgacuccuagcgcuaaagccuccauccuccacgaaguccgaccagugaccucuggcuguuuucccauuaugcaugaccguacaaagaucagacaacugccuaaucuucugagggguuacgagaacauacgguugucgacucagaauguaaucgaugcagaaaaggcccucgggggaccauaucgccugggcaccucaggcagcugccccaacgcuacaaguaaauccggguucuuugcaaccauggccugggcuguuccuaaggacaauaacaaaaaugccacgaacccacugacuguggaggucccguacauuuguacagaaggagaggaucagaucaccgugugggguuuccacucugacaauaagacucagaugaaaaaccucuauggcgauagcaauccccaaaaguuuacauccucagcgaacggggugaccacgcauuacgucagucagauuggaggcuucccugaccagaccgaggaugguggguuaccacagagcggaagaaucguuguggacuauaugguacaaaagcccggcaaaacaggcacuauaguguaccagcgcgggguccugcuuccucagaagguguggugcgcaucuggacgguccaaaguuauuaaggguucauugccacugaucggcgaagccgauugucuacacgagaaauaugggggacucaacaagagcaaacccuacuacaccggcgaacacgcuaaggccauugguaauugcccgaucugggugaagacaccucugaaacuugcaaacgggacuaaguauaggcccccagcuaaacuguugaaggagcgaggcuuuuucggagccaucgcgggcuuucucgaagggggaugggaagguaugauugccggcuggcauggguacaccagucacggagcacauggcgucgcuguggccgcugaccugaaaucuacacaggaggccauaaauaagaucaccaagaacuuaaauucccugagcgaacucgagguuaaaaaccuucaaagacugucgggugcaauggacgaauugcacaaugagauucuagagcuggaugaaaagguagacgaucucagggccgacacuaucucuucccagauagagcuggcugugcuucugucaaacgaagggauuaucaauagugaggaugaacacuugcucgcgcuggagcggaaauuaaagaaaaugcugggcccuagcgcagucgacaucggaaacggcuguuucgagacgaagcauaagugcaaucagacaugccuagaucguauugccgcugggaccuuuaacgccggagaguucucccuccccacuuuugacucucugaauaucaccgcagccagccuuaacgaugacgguuuggauaaucacacaauucugcucuauuacucaaccgcugccaguucccuggcagugacucuuaugcuggcgauauucaucgucuauauggugagccgcgacaacguuucuuguucaauuugcuuguga

SEQ ID NO: 155874 - RNA, 1755 nt, Artificial Sequence
  derived and/or modified CDS sequence (opt3) from hemagglutinin__InfluenzaB__AGZ60077
augaaggccaucauugugcugcucauggucguuaccagcaacgcugacagaauaugcacaggcaucacuuccucuaauucaccccacgugguaaaaacggcaacccagggggaggugaacgucacaggagugauuccucuuacuaccacaccaaccaagaguuacuucgccaaucugaaagguacuaggacacggggcaaguuguguccggauugcuuaaacuguaccgaccuggauguugcgcuagggagccccaugugcgugggaacgacuccuuccgcuaaagccucuauccuccaugaaguccgcccagugaccucgggcuguuuucccauuaugcacgaccgaacaaagauccgucaacuggcaaaucuucugagagguuaugagaacauaagguugucaacucagaauguaaucgaugccgaaaaggcuccugggggaccauaccggcucggcaccagcggcaguugccccaacgcaacauccaaaucuggguucuuugccaccauggcuugggccguuccuaaggacaauaacaaaaaugcgacgaacccacugacuguggaggucccguauauuuguacagaaggagaggaucagaucaccgugugggguuuccauagcgacaauaagacucagaugaaaaaccuguacggcgauuccaauccccaaaaguuuacaucaagugcaaacggggugaccacgcacuaugucagccagauuggaggcuucccugaccagaccgaggauggugggcucccacagucuggacgcaucguuguggacuacaugaugcaaaaguccggcaaaacaggcacuauaguauaucagagagggguguuacugccccagaaggucuggugcgccucaggaaggagcaaagugauuaaggguagucuuccuuugaucggcgaagcugauugucugcaugagaaauacgggggacuaaacaagucuaaaccauacuauaccggcgaacacgccaaggcaauugguaauugccccaucuggguuaagacaccgcucaaacuggcuaacgggacuaaguaccggccucccgccaaacuucugaaggagcgcggcuuuuucggagcgaucgccggcuuuuuggaagggggaugggaagguaugauugcaggcuggcacggguauaccucccauggagcucacggcguggccgucgcugccgaccucaaaagcacacaggaggcaauaaauaagaucaccaagaacuuaaauucgcugucugaacuggaggugaaaaaccuccaacgacuuuccggugccauggacgaacugcauucagagauuuuggagcuagaugaaaagguagacgaucugagagcugacacuaucaguagccagauagagcucgcgguucugcuuuccaaugaagggauuaucaacucugaggaugaacaccuguuggcacucgagaggaaacugaagaaaauguuaggcccaagcgccguggacaucggaaauggcuguuucgagacgaagcacaagugcaaccagacaugccuggaucggauugcugccgggaccuuuaaugcaggagaguucucacuaccuacuuuugacagucucaacaucaccgccgcuucccugaaugaugacggucuugauaaccauacaauuuugcuguacuauagcaccgccgcaucuucacucgcggucacucugaugcuugcuauauucaucguguacauggucagucgugacaaugugagcuguuccauuugccuguga

SEQ ID NO: 155875 - RNA, 1755 nt, Artificial Sequence; identical to SEQ ID NO: 154779
  derived and/or modified CDS sequence (opt3) from hemagglutinin__InfluenzaB__AGZ60088

SEQ ID NO: 155876 - RNA, 1755 nt, Artificial Sequence; identical to SEQ ID NO: 154474
  derived and/or modified CDS sequence (opt3) from hemagglutinin__InfluenzaB__AGZ60099

SEQ ID NO: 155877 - RNA, 1755 nt, Artificial Sequence
  derived and/or modified CDS sequence (opt3) from hemagglutinin__InfluenzaB__AGZ60131
augaaggccaucauugugcugcucauggucguuaccagcaacgcugacagaauaugcacaggcaucacuuccucuaauucaccccacgugguaaaaacggcaacccagggggaggugaacgucacaggagugauuccucuuacuaccacaccaaccaagaguuacuucgccaaucugaaagguacuaggacacggggcaaguuguguccggauugcuuaaacuguaccgaccuggauguugcgcuagggcgccccaugugcgugggaacgacuccuagcgcuaaagccuccauccuccaugaaguccgaccaauuaccucuggcuguuuucccaucaugcacgaccguacaaagauaagacaacugccuaaucuucugagggguuaugagaacauccgguugucgacucagaaugugauugaugcagaaaaggccccagggggacccuaccgccucggcaccucaggcagcugcccuaacgcuacaaguaaauccggguucuuugcaaccauggccugggcuguaccaaaggacaauaacaaaaaugccacgaacccgcugacuguugaggugcccuauaucuguacagaaggagaggaucagauuaccgucugggguuuccauucugacaauaagacucagaugaaaaaccuguacggcgauagcaauccucaaaaguuuacauccucagcgaacggggugaccacgcacuaugugagucagaucggcagcuucccagaccagaccgaggauggaggucucccccagucugggagaauagucguugacuacaugaugcaaaagccuggaaaaacaggcacuauuguguaucagaggggcguauuacugccacagaagguguggugcgcauccgggcggucaaaagucaucaagggaagccuucccuugauuggugaagccgauugucugcaugagaaauacggcgggcuaaacaagaguaaaccguacuauaccggagaacacgcuaaggccaucggcaauugcccuaucugggugaagacaccccucaaacuggcaaacgguacuaaguaccgcccuccagcuaaacuucugaaggagcgaggguuuuucggcgccauugcgggauuuuuggagggcgggugggaaggaaugauagccgguuggcacggcuauaccucucauggggcacacggaguugcuguggccgcugaccucaaauccacacaggaggccaucaauaagauuaccaagaaccugaauagcuuaucggaacuggaggucaaaaaccuccaaagacuuucuggcgcaauggacgaacugcauaaugagaucuuggagcuagaugaaaagguggacgaucugagggccgacacuauauccucacagauugagcucgcuguacugcuuaguaacgaagguaucaucaauagcgaggaugaacaccuguuggcgcucgagcggaaacugaagaaaauguuagggcccuccgcaguugagauuggcaacggauguuucgaaacgaagcacaagugcaaucagacaugccuggaccguaucgccgcuggcaccuuuaacgccggggaguucucucuaccaacuuuugauagccucaauauuaccgcagccucacugaacgacgauggacuugacaaucauacaauauugcuguacuauaguaccgcugccuccagccucgcagugacucugaugcuugcgaucuucauugucuacauggugucucgcgauaacgucucauguaguaucugccuguga

SEQ ID NO: 155878 - RNA, 1755 nt, Artificial Sequence; identical to SEQ ID NO: 154779
  derived and/or modified CDS sequence (opt3) from hemagglutinin__InfluenzaB__AGZ60142

SEQ ID NO: 155879 - RNA, 1755 nt, Artificial Sequence; identical to SEQ ID NO: 154779
  derived and/or modified CDS sequence (opt3) from hemagglutinin__InfluenzaB__AGZ60160

SEQ ID NO: 155880 - RNA, 1755 nt, Artificial Sequence; identical to SEQ ID NO: 154868
  derived and/or modified CDS sequence (opt3) from hemagglutinin__InfluenzaB__AGZ60172

SEQ ID NO: 155881 - RNA, 1755 nt, Artificial Sequence; identical to SEQ ID NO: 154868
  derived and/or modified CDS sequence (opt3) from hemagglutinin__InfluenzaB__AGZ60183

SEQ ID NO: 155882 - RNA, 1755 nt, Artificial Sequence
  derived and/or modified CDS sequence (opt3) from hemagglutinin__InfluenzaB__AGZ60194
augaaggccaucauugugcugcucauggucguuaccagcaacgcugacagaauaugcacaggcaucacuuccucuaauucaccccacgugguaaaaacggcaacccagggggaagugaacgucacaggagugauuccucuuacuaccacaccaaccaagaguuacuucgccaaucugaaagguacuaggacacggggcaaguuguguccggauugcuuaaacuguaccgaccuggauguugcgcuagggcgccccaugugcgugggaacgacuccuagcgcuaaagccuccauccuccaugaaguccgaccagugaccucuggcuguuuucccauuaugcacgaccguacaaagaucagacaacugccuaaucuucugagggguuaugagaacauacgguugucgacucagaauguaaucgaugcagaaaaggccccagggggacccuaccgccucggcaccucaggcagcugcccuaacgcuacaaguaaaauuggguucuuugcaaccauggccugggcuguuccaaaggacaauuauaaaaacgccacgaauccgcugacuguggagguccccuacaucuguacagaaggagaggaucagauuaccgugugggguuuccauuccgacaacaagacucagaugaaaaaucuguauggcgauucuaacccucaaaaguuuacaagcuccgcgaauggggugaccacgcacuacgucucacagaucggagacuucccagaucagaccgaggacggcggucucccccagagugggagaauaguuguggauuauaugaugcaaaagacaggaaaaacuggcaccauuguauaccagaggggcguguuacugccucagaaggucuggugcgcaagcgggcggucuaaagugaucaagggaucccuuccauugauuggugaagccgacugucugcaugagaaauacggcgggcuaaacaagucaaaacccuauuacacaggagaacacgcuaaggccaucggcaacugcccgaucuggguuaagacuccucucaaacuggcaaaugguaccaaguaucgacccccagcuaaacuucugaaggagcgcggguuuuucggcgccauugcgggauuuuuggagggcgggugggaaggaaugauagccgguuggcacggcuacacaagccauggggcacacggaguggcugucgccgcugaccucaaaaguacccaggaggccaucaacaagauuacuaagaaucugaacucuuuauccgaacuggaggugaaaaaucuccaaagacuuagcggcgcaauggaugaacugcauaacgagaucuuggagcuagacgaaaagguagaugaccugagggccgauacgauaucgucucagauugagcucgcuguucugcuuuccaaugaagguaucaucaacucagaggacgaacaccuguuggcgcucgagcggaaacugaagaaaauguuagggccuagugcaguggauauuggcaauggauguuucgagacaaagcacaagugcaaccagaccugccuggaccguaucgccgcuggcacuuuuaaugccggggaguucagccuacccaccuuugauucccucaacauuacagcagccucucugaaugacgauggacuugacaaccauaccauauugcuguauuacagcacugcugccucaagucucgcagucacacugaugcuugcgaucuucauuguguauauggucucccgcgacaaugugagcuguucuaucugccuguga

SEQ ID NO: 155883 - RNA, 1755 nt, Artificial Sequence
  derived and/or modified CDS sequence (opt3) from hemagglutinin__InfluenzaB__AGZ60206
augaaggccaucauugugcugcucauggucguuaccagcaacgcugacagaauaugcacaggcaucacuuccucuaauucaccccacgugguaaaaacggcaacccagggggaagugaacgucacaggagugauuccucuuacuaccacaccaaucaagaguuacuucgccaaucugaaagguaccaggacucggggcaaguuguguccggauugcuuaaacuguacagaccuggauguugcgcuagggcgccccaugugcgugggaaccacgccuagcgcuaaagccuccauucuccaugaaguccgaccagugacuucuggcuguuuucccaucaugcacgaccguaccaagauaagacaacugccuaaucuucugagggguuaugagaacauccgguugucgacacagaauguaauugaugcagaaaaggccccagggggacccuaccgccucggcacuucaggcagcugcccuaacgcuaccaguaaaaucggguucuuugcaacaauggccugggcuguuccaaaggacaauuauaaaaacgccaccaauccgcugacgguggagguccccuacauuuguacugaaggagaggaucagaucacagugugggguuuccauuccgacaacaagacccagaugaaaaaucuguauggcgauucuaacccucaaaaguuuacuagcuccgcgaauggggugacaacccacuacgucucacagauaggagacuucccagaucagacggaggacggcggucucccccagagugggagaauuguuguggauuauaugaugcaaaagccuggaaaaaccggcacaaucguauaccagaggggcguguuacugccacagaaggucuggugcgcaagcgggcggucuaaagugauuaagggaucccuucccuugaucggugaagccgacugucugcaugagaaauacggcgggcuaaacaagucaaaaccguauuacacuggagaacacgcuaaggccaucggcaacugcccuauuuggguuaagaccccucucaaacuggcaaaugguacaaaguaucgcccacccgcuaaacuucugaaggagcgaggguuuuucggcgccauagcgggauuuuuggagggcgggugggaaggaaugaucgccgguuggcacggcuacacuagccauggggcacacggaguggcugucgccgcugaccucaaaaguacccaggaggccauuaacaagaucacaaagaaucugaacucuuuauccgaacuggaggugaaaaaucuccaaagacuuagcggcgcaauggaugaacugcauaacgagauauuggagcuagacgaaaagguagaugaccugagggccgauaccauuucgucucagaucgagcucgcuguucugcuuuccaaugaagguaucauuaacucagaggacgaacaccuguuggcgcucgagcggaaacugaagaaaauguuagggcccagugcaguggauaucggcaauggauguuucgagacuaagcacaagugcaaccagacgugccuggaccguauugccgcuggcacauuuaaugccggggaguucagccuaccaaccuuugauucccucaacauaacugcagccucucugaaugacgauggacuugacaaccauaccaucuugcuguauuacagcacagcugccucaagucucgcagucacccugaugcuugcgauuuucaucguguauauggucucccgcgacaaugugagcuguucuaucugccuguga

SEQ ID NO: 155884 - RNA, 1755 nt, Artificial Sequence; identical to SEQ ID NO: 155813
  derived and/or modified CDS sequence (opt3) from hemagglutinin__InfluenzaB__AGZ60217

SEQ ID NO: 155885 - RNA, 1755 nt, Artificial Sequence
  derived and/or modified CDS sequence (opt3) from hemagglutinin__InfluenzaB__AGZ60268
augaaggccaucauugugcugcucauggucguuaccagcaacgcugacagaauaugcacaggcaucacuuccucuaauucaccccacgugguaaaaacggcaacccagggggaggugaacgucacaggagugauuccucuuacuaccacaccaaccaagaguuacuucgccaaucugaaagguacuaggacacggggcaaguuguguccggauugcuuaaacuguaccgaccuggauguugcgcuagggcgccccaugugcgugggaacgacuccuagcgcuaaagccuccauccuccaugaaguccgaccagugaccucuggcuguuuucccauuaugcacgaccguacaaagaucagacaacuggcaaaucuucugagggguuaugagaacauacgguugucgacucagaauguaaucgaugccgaaaaggcuccugggggaccauaccgccucggcaccucaggcagcugccccaacgcaacaaguaaauccggguucuuugccaccauggcuugggccguuccuaaggacaauaacaaaaaugcgacgaacccacugacuguggaggucccguauauuuguacagaaggagaggaucagaucaccgugugggguuuccauucugacaauaagacucagaugaaaaaccuguacggcgauagcaauccccaaaaguuuacauccucagcaaacggggugaccacgcacuaugucagucagauuggaggcuucccugaccagaccgaggauggugggcucccacagagcggaagaaucguuguggacuacaugaugcaaaagcccggcaaaacaggcacuauaguauaucagcgcgggguguuacugccucagaaggucuggugcgccucuggacgguccaaagugauuaaggguucacuuccauugaucggcgaagcugauugucugcaugagaaauacgggggacuaaacaagagcaaacccuacuauaccggcgaacacgccaaggcaauugguaauugcccgaucuggguuaagacaccucucaaacuggcuaacgggacuaaguacaggcccccagccaaacuucugaaggagcgaggcuuuuucggagcgaucgccggcuuuuuggaagggggaugggaagguaugauugcaggcuggcacggguauaccagucauggagcucacggcguggccgucgcugccgaccucaaaucuacacaggaggcaauaaauaagaucaccaagaacuuaaauucccugagcgaacuggaggugaaaaaccuccaaagacuuucgggugccauggacgaacugcauaaugagauuuuggagcuagaugaaaagguagacgaucugagggcugacacuaucucuucccagauagagcucgcgguucugcuuucaaacgaagggauuaucaauagugaggaugaacaccuguuggcacucgagcggaaacugaagaaaauguuaggcccuagcgccaucgacauuggaaacggcuguuucgagacgaagcacaagugcaaucagacaugccuggaucguaucgcugccgggaccuuuaacgcaggagaguucucccuacccacuuuugacucucucaauauuaccgccgcuagccugaacgaugacggucuugauaaucauacaauauugcuguacuauucaaccgccgcaaguucccucgcggugacucugaugcuugcuaucuucauugucuacauggugagccgcgacaacgucucuuguucaaucugccuguga

SEQ ID NO: 155886 - RNA, 1755 nt, Artificial Sequence; identical to SEQ ID NO: 154902
  derived and/or modified CDS sequence (opt3) from hemagglutinin__InfluenzaB__AHE37993

SEQ ID NO: 155887 - RNA, 1755 nt, Artificial Sequence; identical to SEQ ID NO: 154947
  derived and/or modified CDS sequence (opt3) from hemagglutinin__InfluenzaB__AHE37994

SEQ ID NO: 155888 - RNA, 1755 nt, Artificial Sequence; identical to SEQ ID NO: 154902
  derived and/or modified CDS sequence (opt3) from hemagglutinin__InfluenzaB__AHE37995

SEQ ID NO: 155889 - RNA, 1755 nt, Artificial Sequence; identical to SEQ ID NO: 154902
  derived and/or modified CDS sequence (opt3) from hemagglutinin__InfluenzaB__AHE37996

SEQ ID NO: 155890 - RNA, 1755 nt, Artificial Sequence; identical to SEQ ID NO: 154947
  derived and/or modified CDS sequence (opt3) from hemagglutinin__InfluenzaB__AHE37997

SEQ ID NO: 155891 - RNA, 1755 nt, Artificial Sequence; identical to SEQ ID NO: 154947
  derived and/or modified CDS sequence (opt3) from hemagglutinin__InfluenzaB__AHE37998

SEQ ID NO: 155892 - RNA, 1755 nt, Artificial Sequence; identical to SEQ ID NO: 154947
  derived and/or modified CDS sequence (opt3) from hemagglutinin__InfluenzaB__AHE37999

SEQ ID NO: 155893 - RNA, 1755 nt, Artificial Sequence; identical to SEQ ID NO: 154902
  derived and/or modified CDS sequence (opt3) from hemagglutinin__InfluenzaB__AHE38000

SEQ ID NO: 155894 - RNA, 1755 nt, Artificial Sequence; identical to SEQ ID NO: 154902
  derived and/or modified CDS sequence (opt3) from hemagglutinin__InfluenzaB__AHE38001

SEQ ID NO: 155895 - RNA, 1755 nt, Artificial Sequence
  derived and/or modified CDS sequence (opt3) from hemagglutinin__InfluenzaB__AHE38002
augaaggccaucauugugcugcucauggucguuaccagcaacgcugacagaauaugcacaggcaucacuuccucuaauucaccccacgugguaaaaacggcaacccagggggaggugaacgucacaggagugauuccucuuacuaccacaccaaccaagaguuacuucgccaaucugaaagguacuaagacaaggggcaaauuguguccggauugcuuaaacuguaccgaccuggauguugcgcuagggcggcccaugugcgugggaacgacuccuagcgcuaaggccuccauccuccaugaaguccgcccagugaccucuggcuguuuucccauuaugcacgaccgaacaaagauccgucaacuggcaaaucuucugagagguuaugagaacauaagguugucgacucagaauguaaucgaugccaaaaaggcuccugggggaccauaccggcucggcaccucaggcagcugccccaacgcaacaaguaaauccggguucuuugccaccauggcuugggccguuccuaaggacaauaacaaaaaugcgacgaacccacugacuguggaagucccguauauuugugcagagggagaagaucagaucacagugugggguuuccauucugacaauaagacccagaugaagaaccuguacggcgauagcaauccccaaaaauuuacuuccucagccaacggggugacaacccacuaugucagucagauuggaggcuucccugaccagacggaggauggugggcucccacagagcggacgcaucguuguggacuacaugaugcaaaagcccggcaaaaccggcacaauaguauaucagagagggguguuacugccucagaaggucuggugcgcuucuggaagguccaaagugauuaaggguucacuuccauugaucggcgaggccgauugucugcaugaaaaauacgggggacuaaacaagagcaagcccuacuauacuggcgagcacgcaaaagcuauugguaauugcccgaucuggguuaagaccccucucaaacuggccaacgggacaaaguaccggcccccagcgaaacuucugaaggaacgcggcuuuuucggagccaucgcaggcuuuuuggaagggggaugggaggguaugauugcuggcuggcacggguauacuucccauggagcccacggcguggcugucgccgcagaccucaagucuacccaggaggccauaaauaaaaucacaaagaaccugaauaguuuaagcgagcuggaagugaaaaaccuccaacgacuuucgggugcuauggacgagcugcauaaugaaauuuuggagcuagaugagaagguagacgaucugagagcggacaccaucucuucccagauagaacucgcaguucugcuuucaaacgaggggauuaucaauagugaagaugagcaccuguuggcccucgaaaggaaacugaagaagauguuaggcccuagcgcuguggacaucggaaacggcuguuucgagacuaaacacaagugcaaucagacgugccuggaucggauugccgcagggacauuuaacgccggagaguucucccuacccaccuuugacucucucaauaucacugcugccagccugaacgaugacggucuugauaaucauaccauuuugcuguacuauucaacagcagcgaguucccucgcugucacccugaugcuugccauauucaucguguacauggucagccgugacaacgugucuuguucaauuugccuguga

SEQ ID NO: 155896 - RNA, 1755 nt, Artificial Sequence; identical to SEQ ID NO: 154902
  derived and/or modified CDS sequence (opt3) from hemagglutinin__InfluenzaB__AHE38003

SEQ ID NO: 155897 - RNA, 1755 nt, Artificial Sequence; identical to SEQ ID NO: 154902
  derived and/or modified CDS sequence (opt3) from hemagglutinin__InfluenzaB__AHE38004

SEQ ID NO: 155898 - RNA, 1755 nt, Artificial Sequence; identical to SEQ ID NO: 154902
  derived and/or modified CDS sequence (opt3) from hemagglutinin__InfluenzaB__AHE38005

SEQ ID NO: 155899 - RNA, 1755 nt, Artificial Sequence
  derived and/or modified CDS sequence (opt3) from hemagglutinin__InfluenzaB__AHE38006
augaaggccaucauugugcugcucauggucguuaccagcaacgcugacagaauaugcacaggcaucacuuccucuaauucaccccacgugguaaaaacggcaacccagggggaggugaacgucacaggagugauuccucuuacuaccacaccaaccaagaguuacuucgccaaucugaaagguacuaagacaaggggcaaauuguguccggauugcuuaaacuguaccgaccuggauguugcgcuagggcggcccaugugcgugggagcuacgccuagcgccaaggcauccauccuccaugaaguccgcccagugacuucuggcuguuuucccauuaugcacgaccgaaccaagauccgucaacuggccaaucuucugagagguuaugagaacauaagguugucgacacagaauguaaucgaugcugaaaaagcaccugggggaccauaccggcucggcacuucaggcagcugccccaacgccaccaguaaguccggguucuuugcuacaauggccugggcgguuccuaaagacaauaacaagaaugcaaccaacccacugacgguggaggucccguauauuugugccgaaggagaggaucagaucacugugugggguuuccauucugacaauaaaacacagaugaagaaccuguacggcgauagcaauccccaaaaguuuaccuccucagcuaacggggugacuacacacuaugucagucagauuggaggcuucccugaccagaccgaggauggugggcucccacagagcggacgcaucguuguggacuacaugaugcaaaaacccggcaagacgggcaccauaguauaucagagagggguguuacugccucagaaagucuggugcgccucuggaagguccaaggugauuaaagguucacuuccauugaucggcgaagcagauugucugcaugagaaguacgggggacuaaacaaaagcaagcccuacuauacaggcgaacacgcuaaggccauugguaauugcccgaucuggguuaaaacuccucucaagcuggcgaacgggaccaaauaccggcccccagccaagcugcugaaagagcgcggcuuuuucggagcaaucgcuggcuuuuuggaagggggaugggaagguaugauugccggcuggcacggguauacaagucauggagcucacggcguggccgucgcagccgaccucaagucuacucaggaggcuauaaauaagaucaccaaaaaccuuaauuccuuaagcgaacuggaggugaagaaccuccaacgacuuucgggugcgguagacgaacugcauaaugagauuuuggagcuagaugaaaaaguugacgaucugagagcagacacaaucucuucccagauagagcucgccgugcugcuuucaaacgaagggauuaucaauagugaggaugaacaccuguuggcucucgagaggaagcugaaaaagauguuaggcccuagcgccgucgacaucggaaacggcuguuucgagaccaagcacaaaugcaaucagacuugccuggaucggauugcagccgggacguuuaacgcuggagaguucucccuacccacauuugacucucucaauaucaccgccgcaagccugaacgaugacggucuugauaaucauacuauuuugcuguacuauucaaccgcggcuaguucccucgccgugacacugaugcuugcaauauucaucgucuacauggugagccgugacaacguuucuuguucaauuugccuguga

SEQ ID NO: 155900 - RNA, 1755 nt, Artificial Sequence; identical to SEQ ID NO: 154902
  derived and/or modified CDS sequence (opt3) from hemagglutinin__InfluenzaB__AHE38007

SEQ ID NO: 155901 - RNA, 1755 nt, Artificial Sequence
  derived and/or modified CDS sequence (opt3) from hemagglutinin__InfluenzaB__AHE38008
augaaggccaucauugcucugcucaugguggucaccagcaacgcagacagaauaugcacaggcaucacuuccucuaauucaccccacguugugaaaacggccacccagggggagguaaacgugacaggagucauuccucuuacuaccacaccaaccaagaguuacuucgcgaaucugaaagguacuaagacaaggggcaaauuguguccggauugcuuaaacuguaccgaccuggauguggcucuagggcggcccaugugcguuggaacgacuccuagcgccaaggcauccauccuccaugaagugcgcccagucaccucuggcuguuuucccauuaugcacgaccgaacaaagauccgucaacuggccaaucuucugagagguuaugagaacauaagguugucgacucagaaugugaucgaugcugaaaaagcaccugggggaccauaccggcucggcaccucaggcagcugccccaacgccacaaguaaguccggguucuuugcuaccauggccugggcgguaccuaaagacaauaacaagaaugcaacgaacccacugacuguugaggugccguauauuugugccgaaggagaggaucagaucgcugucugggguuuccauucugacaauaaaacacagaugaagaaccuguacggcgauagcaauccccaaaaguuuaccuccucagccaacggggugacuacacacuaugugagucagauuggaggcuucccugaccagaccgaggauggugggcucccacagagcggacgcaucgucguugacuacaugaugcaaaaacccggcaagacgggcaccauaguguaucagagagggguauuacugccucagaaaguguggugcgcaucuggaagguccaaggucauuaaagguucacuuccauugaucggcgaagcugauugucugcaugagaaguacgggggacuaaacaaaagcaagcccuacuauacaggcgaacacgccaaggcgauugguaauugcccgaucugggugaaaacuccucucaagcuggccaacgggaccaaauaccggcccccagcaaagcugcugaaagagcgcggcuuuuucggagcuaucgccggcuuuuuggaagggggaugggaagguaugauugcuggcuggcacggguauacaagucauggagcccacggcguugcaguggccgcugaccucaagucuacucaggaggcgauaaauaagaucaccaaaaaccuuaauuccuuaagcgaacuggaggucaagaaccuccaacgacuuucgggugcaauggacgaacugcauaaugagauuuuggagcuagaugaaaaaguggacgaucugagagccgacacaaucucuucccagauagagcucgcuguacugcuuucaaacgaagggauuaucaauagugaggaugaacaccuguuggcccucgagaggaagcugaaaaagauguuaggcccuagcgcaguugacaucggaaacggcuguuucgagaccaagcacaaaugcaaucagacuugccuggaucggauugccgcugggacguuuaacgccggagaguucucccuacccacauuugacucucucaauaucaccgcagcgagccugaacgaugacggucuugauaaucauacuauuuugcuguacuauucaaccgcugccaguucccucgcagugacacugaugcuugccauauucaucgucuacauggugagccgugacaacgucucuuguucaauuugccuguga

SEQ ID NO: 155902 - RNA, 1755 nt, Artificial Sequence; identical to SEQ ID NO: 154947
  derived and/or modified CDS sequence (opt3) from hemagglutinin__InfluenzaB__AHE38009

SEQ ID NO: 155903 - RNA, 1755 nt, Artificial Sequence; identical to SEQ ID NO: 154947
  derived and/or modified CDS sequence (opt3) from hemagglutinin__InfluenzaB__AHE38010

SEQ ID NO: 155904 - RNA, 1755 nt, Artificial Sequence; identical to SEQ ID NO: 154902
  derived and/or modified CDS sequence (opt3) from hemagglutinin__InfluenzaB__AHE38012

SEQ ID NO: 155905 - RNA, 1755 nt, Artificial Sequence
  derived and/or modified CDS sequence (opt3) from hemagglutinin__InfluenzaB__AHE38013
augaaggccaucauugugcugcucauggucguuaccagcaacgcugacagaauaugcacaggcaucacuuccucuaauucaccccacgugguaaaaacggcaacccagggggaggugaacgucacaggagugauuccucuuacuaccacaccaaccaagaguuacuucgccaaucugaaagguacuaagacaaggggcaaauuguguccggauugcuuaaacuguaccgaccuggauguugcgcuagggcggcccaugugcgugggaacgacuccuagcgcuaaggccuccauccuccaugaaguccgcccagugaccucuggcuguuuucccauuaugcacgaccgaacaaagauccgucaacuggcaaaucuucugagagguuaugagaacauaagguugucgacucagaauguaaucgaugccgaaaaagcuccugggggaccauaccggcucggcaccucaggcagcugccccaacgcaacaaguaaguccggguucuuugccaccauggcuugggccguuccuaaagacaauaacaagaaugcgacgaacccacugacuguggaggucccguauauuugugcagaaggagaggaucagaucacagugugggguuuccauucugacaauaaaacccagaugaagaaccuguacggcgauagcaauccccaaaaguuuacuuccucagccaacggggugacaacccacuaugucagucagauuggaggcuucccugaccagacggaggauggugggcucccacagagcggacgcaucguuguggacuacaugaugcaaaaacccggcaagaccggcacaauaguauaucagagagggguguuacugccucagaaagucuggugcgugucuggaagguccaagguuauuaaagguucacuuccauugaucggcgaagcugauugucugcaugagaaguacgggggacuaaacaaaagcaagcccuacuauacuggcgaacacgccaaggcaauugguaauugcccgaucugggugaaaaccccucucaagcuggcuaacgggacaaaauaccggcccccagccaagcugcugaaagagcgcggcuuuuucggagcgaucgccggcuuuuuggaagggggaugggaagguaugauugcaggcuggcacggguauacaagucauggagcucacggcauggccgucgcugccgaccucaagucuacccaggaggcaauaaauaagaucacuaaaaaccuuaauuccuuaagcgaacuggaggugaagaaccuccaacgacuuucgggugccauggacgaacugcauaaugagauuuuggagcuagaugaaaaaguagacgaucugagagcugacaccaucucuucccagauagagcucgcgguucugcuuucaaacgaagggauuaucaauagugaggaugaacaccuguuggcacucgagaggaagcugaaaaagauguuaggcccuagcgccguggacaucggaaacggcuguuucgagacuaagcacaaaugcaaucagacgugccuggaucggauugcugccgggacauuuaacgcaggagaguucucccuacccaccuuugacucucucaauaucacugccgcuagccugaacgaugacggucuugauaaucauaccauuuugcuguacuauucaacagccgcaaguucccucgcggucacccugaugcuugcuauauucaucguguacauggucagccgugacaacgugucuuguucaauuugccuguga

SEQ ID NO: 155906 - RNA, 1755 nt, Artificial Sequence; identical to SEQ ID NO: 154902
  derived and/or modified CDS sequence (opt3) from hemagglutinin__InfluenzaB__AHE38014

SEQ ID NO: 155907 - RNA, 1758 nt, Artificial Sequence; identical to SEQ ID NO: 154693
  derived and/or modified CDS sequence (opt3) from hemagglutinin__InfluenzaB__AHE38015

SEQ ID NO: 155908 - RNA, 1758 nt, Artificial Sequence
  derived and/or modified CDS sequence (opt3) from hemagglutinin__InfluenzaB__AHE38016
augaaggccaucauugugcugcucauggucguuaccagcaacgcugacagaauaugcacaggcaucacuuccucuaauucaccccacgugguaaaaacggcaacccagggggaggugaacgucacaggagugauuccucuuacuaccacaccaaccaagagucauuucgccaaucugaaagguacugaaacaaggggcaaguuguguccgaaaugcuuaaacuguaccgaucuggacguugcgcuagggcggcccaagugcacgggaaagaucccuagcgcucgcguguccauucuccacgagguccgaccagugacuucuggcuguuuucccaucaugcaugaucguaccaaaauaagacaacugccuaaucuucugagggguuacgaacacauccgguugucgacacauaacguaauuaaugccgagaacgcaccagggggacccuauaagaucggcacuucaggcagcugcccuaauguuaccaacgggaauggauucuuugccacaauggcuugggcagugccgaaaaacgacaagaauaaaaccgccacgaacccacucacuauugaaguccccuacaucuguacagagggugaggaucagauaaccguguggggcuuccacagugacaaugaaacucagauggcuaagcuguauggggauuccaagccucagaaauuuacaucuagcgccaacggagugaccacgcacuacgucucccaaauuggcgguuucccaaaccagaccgaggacgggggacugccccagucaggccgcaucguuguggauuauaugguacagaagaguggcaaaacagggacuauuaccuaccaaagaggaauccucuuaccucagaagguguggugcgcgagcgguaaaucuaaggucaucaaaggcucccugccacuuauuggggaagcagacuguuugcaugagaaguauggaggccugaauaagucaaaacccuacuacacaggugagcacgccaaggcuauagggaacugcccgaucugggugaaaacuccucuaaagcucgccaauggcaccaaauauaggcccccagcaaagcugcuuaaggaacggggauuuuucggcgcuauugccggguuucuggagggagguugggaaggcaugaucgcgggguggcauggauacacaagccacggcgcccacgguguugcaguggcugccgauuugaaaaguacccaggaggcuauaaacaagauuacuaaaaaucucaacucucuguccgaauuagaggucaagaaucugcagcgccucagcggggccauggacgagcuucauaacgaaauccuggaguuggaugaaaaaguggacgaccuacgagcagauacgaucucgucucaaauugagcuggccguacuccuguccaaugaaggcaucauuaacucagaggacgagcaccuucuggcuuuggaaagaaagcucaagaaaaugcugggaccuagugcgguugagauaggcaauggguguuucgaaacaaagcauaaaugcaaccagaccugcuuagauaggaucgcagccggaacuuuugacgcuggugaguucagccugcccaccuuugauucccuaaauauuacagccgcaucucucaacgacgauggccuggacaaucacaucauccuuuuguauuacagcaccgccgcuucaagucuggccgugacucucaugauugcaauauucgucguguauauggucucccgggauaacgugagcuguucuaucugccuguga

SEQ ID NO: 155909 - RNA, 1758 nt, Artificial Sequence; identical to SEQ ID NO: 155012
  derived and/or modified CDS sequence (opt3) from hemagglutinin__InfluenzaB__AHE38017

SEQ ID NO: 155910 - RNA, 1758 nt, Artificial Sequence; identical to SEQ ID NO: 154935
  derived and/or modified CDS sequence (opt3) from hemagglutinin__InfluenzaB__AHE38018

SEQ ID NO: 155911 - RNA, 1758 nt, Artificial Sequence; identical to SEQ ID NO: 154920
  derived and/or modified CDS sequence (opt3) from hemagglutinin__InfluenzaB__AHE38019

SEQ ID NO: 155912 - RNA, 1758 nt, Artificial Sequence
  derived and/or modified CDS sequence (opt3) from hemagglutinin__InfluenzaB__AHE38020
augaaggccaucauugugcugcucauggucguuaccagcaacgcugacagaauaugcacaggcaucacuuccucuaauucaccccacgugguaaaaacggcaacccagggggaggugaacgucacaggagugauuccucuuacuaucaccccaacaaagagucauuucgccaaucugaaagguaccgaaacuaggggcaaguuguguccgaaaugcuuaaacuguacagaucuggacguugcgcuagggcggcccaagugcaccggaaagauuccuagcgcucgcguguccauccuccacgagguccgaccagugacgucuggcuguuuucccauaaugcaugaucguacuaaaaucagacaacugccuaaucuucugagggguuacgaacacauucgguugucgacccauaacguaaucaaugccgaggacgcaccagggggacccuauaagauuggcacaucaggcagcugcccuaacguuacuaaugggaacggauucuuugccaccauggcuugggcagugccgaaaaaugauaagaacaaaacagccaccaauccacucacgaucgaaguccccuacauauguacugagggugaggaccagauuacaguguggggcuuccacagugauaacgaaacccagauggcuaagcuguauggggacuccaagccucagaaauuuacuucuagcgccaauggagugacaacccacuacgucucccaaaucggcgguuucccaaaccagacggaggaugggggacugccccagucaggccgcauuguuguggacuauaugguacagaagaguggcaaaaccgggacaaucacuuaccaaagaggaauccucuuaccucagaagguguggugcgcgagcgguaggucuaaagucauuaagggcucccugccacuuauaggggaagcagauuguuugcaugagaaauauggaggccugaacaagucaaagcccuacuacaccggugagcacgccaaagcuaucgggaauugcccgauuugggugaagacaccucuaaaacucgccaacggcacuaaguaucggcccccagcaaaacugcuuaaggaacgcggauuuuucggcgcuaucgccggguuucuggagggagguugggaaggcaugauagcgggguggcauggauacaccagccacggcgcccacgguguugcaguggcugccgacuugaagaguacacaggaggcuauuaauaaaaucaccaagaaccucaauucucuguccgaauuagaggucaaaaaccugcagcgacucagcggggccauggaugagcuucauaaugaaauccuggaguuggacgaaaagguggacgaucuaagagcagacacuauuucgucucaaaucgagcuggccguacuccuguccaacgaaggcauuauaaauucagaggaugagcaccuucuggcuuuggaaaggaaacucaagaagaugcugggaccuagugcgguugagaucggcaacggguguuucgaaacgaaacauaagugcaaucagacaugcuuagaccggauugcagccggaaccuuugaugcuggugaguucagccugcccacuuuugacucccuaaacaucaccgccgcaucucucaaugaugacggccuggauaaccacacaauccuuuuguauuacagcaccgccgcuucaagucuggccgugacucucaugauugcaauauucgucguguauauggucucccgugacaaugugagcuguucuaucugccuguga

SEQ ID NO: 155913 - RNA, 1758 nt, Artificial Sequence
  derived and/or modified CDS sequence (opt3) from hemagglutinin__InfluenzaB__AHE38021
augaaggccaucauugugcugcucauggucguuaccagcaacgcugacagaauaugcacaggcaucacuuccucuaauucaccccacgugguaaaaacggcaacccagggggaggugaacgucacaggagugauuccucuuacuaccacaccaaccaagagucauuucgccaaucugaaagguacugaaacaaggggcaaguuguguccgaaaugcuuaaacuguaccgaucuggacguugcgcuagggcggcccaagugcacgggaaagaucccuagcgcucgcguguccauucuccacgagguccgaccagugacuucuggcuguuuucccaucaugcaugaucguaccaaaauaagacaacugccuaaucuucugagggguuacgaacacauccgguugucgacacauaacguaauuaaugccgagaacgcaccagggggacccuauaagaucggcacuucaggcagcugcccuaauguuaccaacgggaauggauucuuugccacaauggcuugggcagugccgaaaaacgacaagaauaaaaccgccacgaacccacucacuauugaaguccccuacaucuguacagagggugaggaucagauaaccguguggggcuuccacagugacaaugaaacucagauggcuaagcuguauggggauuccaacccucagaaguuuacaucuagcgccaacggagugaccacgcacuacgucucccaaauuggcgguuucccaaaucagaccgaggacgggggacugccccagucaggccgcaucguuguggauuauaugguacagaaaaguggcaagacagggacuauuaccuaccaaagaggaauccucuuaccucagaaaguguggugcgcgagcgguaggucuaaggucaucaaaggcucccugccacuuauuggggaagcagacuguuugcaugagaaguauggaggccugaacaaaucaaagcccuacuacacaggugagcacgccaaggcuauagggaauugcccgaucugggugaaaacuccucuaaagcucgccaacggcaccaaauaucggcccccagcaaagcugcuuaaagaacgcggauuuuucggcgcuauugccggguuucuggagggagguugggaaggcaugaucgcgggguggcauggauacacaagccacggcgcccacgguguugcaguggcugccgauuugaagaguacccaggaggcuauaaauaagauuacuaaaaaccucaauucucuguccgaauuagaggucaagaaccugcagcgacucagcggggccauggacgagcuucauaaugaaauccuggaguuggaugaaaaaguggacgaccuaagagcagauacgaucucgucucaaauugagcuggccguacuccuguccaacgaaggcaucauuaauucagaggacgagcaccuucuggcuuuggaaaggaagcucaaaaagaugcugggaccuagugcgguugagauaggcaacggguguuucgaaacaaagcauaaaugcaaucagaccugcuuagaucggaucgcagccggaacuuuugacgcuggugaguucagccugcccaccuuugauucccuaaacauuacagccgcaucucucaaugacgauggccuggacaaccacaccauccuuuuguauuacagcacugccgcuucaagucuggccgugacacucaugaucgcaauuuucgucguguauauggucucccgugauaacgugagcuguucuauaugccuguga

SEQ ID NO: 155914 - RNA, 1758 nt, Artificial Sequence; identical to SEQ ID NO: 154935
  derived and/or modified CDS sequence (opt3) from hemagglutinin__InfluenzaB__AHE38022

SEQ ID NO: 155915 - RNA, 1752 nt, Artificial Sequence
  derived and/or modified CDS sequence (opt3) from hemagglutinin__InfluenzaB__AHL91189
augaaggccaucauugugcugcucauggucgcuaccagcaacgcagacagaauaugcacaggcaucacuuccucuaauucaccccacguugugaaaacggccacccagggggagguaaacgugacaggagucauuagucuuacuaccacaccuaccaagagccauuucgcgaaucugaaagguacuaagacaaggggcaaauuguguccaaacugcuuaaauuguaccgaucuggacguggcucuagggcggccgaucugcauuggaacgauccccuccgccaaggcaucuauacuccacgaaguucgcccugugacuucgggcuguuuuccaaucaugcaugaucgaaccaagauucgucaacugcccaaccuucugagagguuacgagcacaucagguugucaacacauaaugucauuaacgccgaacgggcuccugggggaccauaucgccucggcacuagcggcaguugccccaaugugaccuccagaucuggguucuuugcaacaauggccugggcuguaccuagggacaacaaaaccgccacgaauccacugacuguugaggugccguacaucuguacaaagggagaagaucagauaaccgucugggguuuccacagcgacaacaaaacucagaugaagaaucuguauggcgauuccaacccccagaaauuuacaucaagugcgaauggggugaccacgcacuacgugagccaaauuggaggcuucccuaaccagaccgaggacggugggcucccacagucuggacggaucgucguugauuauauggugcagaagcccggcaagacaggcacuauuguauaccaacgcgggguguuacugccucagaaagucuggugcgcauccggacgaucaaaggugaucaaagguagccuuccauugaucggcgaggccgacugucugcaugaaaaguaugggggacuaaacaaaaguaagcccuacuacaccggcgagcacgcuaaagccauugguaauugcccgauauggguuaagacaccucucaagcuggcaaacgggacuaaauauagacccccagcuaaacuucugaaggaaaggggcuuuuucggagccaucgcgggcuuuuuggaagggggaugggaggguaugauugccggcuggcauggguacaccucucacggagcacacggcguggcugucgccgcugaucucaaguccacacaggaggccaucaauaaaauaaccaagaaccugaauagcuuaucggagcuggaagugaagaaccuccagcggcuuucuggugcaauggacgagcugcauaaugaaauuuuggagcuagaugagaaaguagacgaccugcgugccgauacuaucuccucacaaaucgaacucgcuguucugcuuaguaacgaggggauuaucaauagcgaagacgagcaccuguuggcgcucgaacgcaagcugaaaaagauguuaggcccuuccgcaguggauauuggaaacggcuguuucgagacgaaacauaagugcaaucagacaugccuggacagaauagccgcugggaccuuuaacgccggagaguucucucuacccacuuuugauagccucaauaucaccgcagccucacugaacgacgauggucuugacaaucacacaauuuugcuguauuacaguaccgcugccuccagccucgcagucacucugaugaucgcgaucuucauuguguauauggucucuagggauaacgugucauguaguauaugccuuuga

SEQ ID NO: 155916 - RNA, 1752 nt, Artificial Sequence
  derived and/or modified CDS sequence (opt3) from hemagglutinin__InfluenzaB__AHL91200
augaaggccaucauugugcugcucauggucguuaccagcaacgcugacagaauaugcacaggcaucacuuccucuaauucaccccacgugguaaaaacggcaacccagggggaggugaacgucacaggagugauuccucuuacuaccacaccaaccaagagucauuucgccaaucugaaagguacuaagacaaggggcaaauuguguccgaacugcuuaaauuguaccgaucuggacguugcgcuagggcggcccaugugcaucggaacgauuccuagcgcuaaggccuccauccuccacgaagugcgcccagucacuucuggcuguuuucccauaaugcaugaucgaaccaagauccgucaacugccuaaccuucugagagguuacgagcacauuagguugucgacacauaaugugaucaacgcagaacgggccccagggggacccuaucgccucggcacuucaggcagcugcccuaauguaaccaguagauccggguucuuugcuacaauggcaugggccguuccaagggacaacaaaaccgcuacgaauccgcugacuguggagguccccuacauuuguacaaagggagaagaucagaucaccgugugggguuuccacucugacaacaaaacucagaugaagaaucuguauggcgauagcaacccucagaaauuuacauccucagccaauggggugaccacgcacuacgucagucaaauaggagacuucccaaaccagaccgaggauggcggucucccccagagcgggcggauuguuguggacuauaugguacagaagccuggaaagacaggcacuaucguguaccaacgcggcgucuuacugccacagaaaguguggugcgcgucugggcgauccaagguuauuaaaggaucacuucccuugaucggugaggcagauugucugcaugaaaaguauggcgggcuaaacaaaagcaagccguacuacaccggagagcacgccaaagcuaucggcaauugcccuauuugggugaagacaccccucaagcuggccaacgguacuaaauauagaccuccagcaaagcugcugaaagaaaggggguuuuucggcgcuauagccggauuuuuggagggcgggugggagggaaugaucgcggguuggcauggcuacaccagucacggggcccacggagucgcaguggcugccgaccucaagucuacacaggaagcuauuaauaaaaucaccaagaaccuuaauuccuuaagcgagcuggaaguaaagaaccuccagcggcuuucgggcgccauggaugagcugcauaaugaaauauuggagcuagacgagaaaguugacgaucugcgugcagacacuauuucuucccaaaucgaacucgccgugcugcuuucaaacgaggguaucauuaauagugaagaugagcaccuguuggcucucgaacgcaagcugaaaaagauguuagggcccagcgcggucgacaucggcaacggauguuucgagacgaaacauaagugcaaucagacaugccuggauagaauugcagccggcaccuuuaacgcuggggaguucucccuaccaacuuuugacucucucaauauaaccgccgcaagccugaacgaugacggacuugauaaucacacaaucuugcuguauuacucaaccgccgcuaguucccucgccgugacucugaugauugcaaucuucaucgucuauauggugagcagggacaacguuucuuguucaauuugccuuuga

SEQ ID NO: 155917 - RNA, 1752 nt, Artificial Sequence
  derived and/or modified CDS sequence (opt3) from hemagglutinin__InfluenzaB__AHL91211
augaaggccaucauugugcugcucauggucgcuaccagcaacgcagacagaauaugcacaggcaucacuuccucuaauucaccccacguugugaaaacggccacccagggggagguaaacgugacaggagucauuagucuuacuaccacaccuaccaagagccauuucgcgaaucugaaagguacuaagacaaggggcaaauuguguccaaacugcuuaaauuguaccgaucuggacguggcucuagggcggccgaugugcaucggaacgauucccuccgccaaggcaucuauccuccacgaaguucgcccugugacuucgggcuguuuuccaauaaugcaugaucgaaccaagauccgucaacugcccaaccuucugagagguuacgagcacauuagguugucaacacauaaugucaucaacgccgaacgggcuccugggggaccauaucgccucggcacuagcggcaguugccccaaugugaccuccagaucuggguucuuugcaacaauggccugggcuguaccuagggacaacaaaaccgccacgaauccacugacuguugaggugccguacauuuguacaaagggagaagaucagaucaccgucugggguuuccacagcgacaacaaaacucagaugaagaaucuguauggcgauuccaacccccagaaauuuacaucaagugcgaauggggugaccacgcacuacgugagccaaauaggaggcuucccuaaccagaccgaggacggugggcucccacagucuggacggauugucguugauuauauggugcagaagcccggcaagacaggcacuaucguauaccaacgcgggguguuacugccucagaaagucuggugcgcauccggacgaucaaaggugauuaaagguagccuuccauugaucggcgaggccgacugucugcaugaaaaguaugggggacuaaacaaaaguaagcccuacuacaccggcgagcacgcuaaagccaucgguaauugcccgauuuggguuaagacaccucucaagcuggcaaacgggacuaaauauagacccccagcuaaacuucugaaggaaaggggcuuuuucggagccauagcgggcuuuuuggaagggggaugggaggguaugaucgccggcuggcauggguacaccucucacggagcacacggcguggcugucgccgcugaucucaaguccacacaggaggccauuaauaaaaucaccaagaaccugaauagcuuaucggagcuggaagugaagaaccuccagcggcuuucuggugcaauggacgagcugcauaaugaaauauuggagcuagaugagaaaguagacgaccugcgugccgauacuauuuccucacaaaucgaacucgcuguucugcuuaguaacgaggggaucauuaauagcgaagacgagcaccuguuggcgcucgaacgcaagcugaaaaagauguuaggcccuuccgcaguggauaucggaaacggcuguuucgagacgaaacauaagugcaaucagacaugccuggacagaauugccgcugggaccuuuaacgccggagaguucucucuacccacuuuugauagccucaauauaaccgcagccucacugaacgacgauggucuugacaaucacacaaucuugcuguauuacaguaccgcugccuccagccucgcagucacucugaugauugcgaucuucaucguguauauggucucuagggauaacgugucauguaguauuugccuuuga

SEQ ID NO: 155918 - RNA, 1755 nt, Artificial Sequence
  derived and/or modified CDS sequence (opt3) from hemagglutinin__InfluenzaB__AHL91222
augaaggccaucauugugcugcucauggucguuaccagcaacgcugacagaauaugcacaggcaucacuuccucuaauucaccccacgugguaaaaacggcaacccagggggaggugaacgucacaggagugauuccucuuacuaccacaccaaccaagagucauuucgccaaucugaaagguacuaagacaaggggcaaauuguguccgaacugcuuaaauuguaccgaucuggacguugcgcuagggcggcccaugugcgugggaacgacuccuagcgcuaaggccuccauccuccacgaaguccgcccagugaccucuggcuguuuucccauuaugcaugaucgaacaaagauccgucaacugccuaaccuucugagagguuacgagaauauaagguugucgacucagaacguaaucaaugcagaaaaagccccagggggacccuaucggcucggcaccucaggcagcugcccuaacgcuacaagucgcuccggguucuuugcaaccauggccugggcuguuccaagagacaauaacaagacggccacuaauccgcugacaguggagguccccuacguguguaccgaaggagaggaucagauuacugugugggguuuccacucugacaacaaaacacagaugaagaaucuguauggcgauagcaacccucaaaaauuuaccuccucagcgaacggggucacgacccauuacguuagucagaucggaggcuucccagaccagacagaggauggugggcucccccagagcggaaggauugugguagacuauauggugcaaaagccuggcaagacuggcaccaucgucuaccagcgcgggguguuacugccacagaaaguuuggugcgcaucuggacgguccaaggugauaaaagguucacuucccuugauuggcgaagccgauugucugcacgagaaguaugggggacuaaauaaaagcaagccguacuacacaggcgaacacgcuaaagccaucgguaacugcccuauuugggucaagacuccccucaagcuggcaaaugggaccaaauaucgaccuccagcuaaacuucugaaggagagaggcuuuuucggagccaucgcgggcuuuuuggaagggggaugggaagguaugaucgccggcuggcauggguacacaagucacggagcacauggcguggcuguagccgcugaccucaagucuacccaggaggccauuaacaaaauaacuaagaaucugaacuccuuaagcgaacuggagguuaagaaucuccaaaggcuuucgggugcaauggaugaacugcacaacgagaucuuggagcuagacgaaaaaguggacgaucugcgggccgacacgauuucuucccagaucgagcucgcuguccugcuuucaaaugaagggauaauuaacagugaggaugaacaccuguuggcgcucgagcguaagcugaaaaagauguuaggccccagcgcaguggacaucggaaauggcuguuucgagacaaaacauaagugcaaccagaccugccuggaucgcaucgccgcugggacuuuuaaugccggagaguucucccuaccaaccuuugacucucucaacauuacagcagccagccugaaugaugacggucuugauaaccacaccaucuugcuguauuacucaacugcugccaguucccucgcagucacacugaugauugcgauauucaucguguauaugguuagcagagacaacauuucuuguucaaucugccuuuga

SEQ ID NO: 155919 - RNA, 1755 nt, Artificial Sequence
  derived and/or modified CDS sequence (opt3) from hemagglutinin__InfluenzaB__AHL91244
augaaggccaucauugugcugcucauggucguuaccagcaacgcugacagaauaugcacaggcaucacuuccucuaauucaccccacgugguaaaaacggcaacccagggggaagugaacgucacaggagugauuccucuuacuaccacaccaaccaagagucauuucgccaaucugaaagguacuaagacaaggggcaaauuguguccgaccugcuuaaacuguacggaucuggacguugcgcuagggcggcccaugugcgugggaacuaccccuagcgcuaaggccuccauccuccacgaaguccgcccagugacaucuggcuguuuucccauuaugcaugaucgaacuaagauccgucaacugccuaaucuucugagagguuacgagaaaauaagguugucgacccagaacguaaucaaugcagaaaaggccccagggggacccuaucggcucggcacaucaggcagcugcccuaacgcuaccagucgcuccggguucuuugcaacgauggccugggcuguuccaagagacaauaacaaaacugccacaaauccgcugaccguggagguccccuacauuuguacuaaggaagaggaucagaucacaguguggggauuccacucugacaacaaaacccagaugaagaaucuguauggugauagcaacccucaaaaguuuacguccucagcgaauggcgugaccacacauuacgucagucagauugggggauucccagaccagacugaggauggcggucucccccagagcgggaggaucguuguggacuauaugguacaaaaaccuggaaagaccggcacaauaguguaccagcggggcgucuuacugccacagaaaguguggugcgcaucugggcgcuccaagguuauuaaaggaucacuucccuugaucggugaagccgauugucugcacgagaaguauggcgggcuaaacaaaagcaagccguacuacacuggagaacacgcuaaggccauuggcaacugcccuaucugggugaaaaccccacucaagcuggcaaaugguacaaaauaucgacccccugcuaaacuucugaaggagagaggguuuuucggcgccaucgcgggauuuuuggagggcgggugggaaggaaugauugccgguuggcauggcuacaccagucacggggcacauggagucgcuguggccgcugaccucaagucuacucaggaggccauaaacaagaucacgaaaaaucugaacuccuuaagcgaacuggagguaaagaaucuccaaaggcuuucgggcgcaauggaugaacugcacaacgagauuuuggagcuagacgaaaaaguugacgaucugcgggccgacacaaucucuucccagauagagcucgcugugcugcuuucaaaugaagguauuaucaacagugaggaugaacaccuguuggcgcucgagcguaagcugaaaaagauguuagggcccagcgcagucgacaucggcaauggauguuucgagaccaagcauaaaugcaaccagacuugccuggaucgcauugccgcuggcaccuuuaaugccggggaguucucccuaccaacauuugacucucucaacaucaccgcagccagccugaaugaugacggacuugauaaccacacuauuuugcuguauuacucaacagcugccaguucccucgcagugacgcugaugauagcgaucuucauugucuauauggugagcagagacaauguuucuuguucaaucugccuuuga

SEQ ID NO: 155920 - RNA, 1755 nt, Artificial Sequence; identical to SEQ ID NO: 154549
  derived and/or modified CDS sequence (opt3) from hemagglutinin__InfluenzaB__AHL91255

SEQ ID NO: 155921 - RNA, 1755 nt, Artificial Sequence; identical to SEQ ID NO: 154549
  derived and/or modified CDS sequence (opt3) from hemagglutinin__InfluenzaB__AHL91266

SEQ ID NO: 155922 - RNA, 1752 nt, Artificial Sequence
  derived and/or modified CDS sequence (opt3) from hemagglutinin__InfluenzaB__AHL91277
augaaggccaucauugugcugcucauggucguuaccagcaacgcugacagaauaugcacaggcaucacuuccucuaauucaccccacgugguaaaaacggcaacccagggggaggugaacgucacaggagugauuccucuuacuaccacaccaaccaagagucauuucgccaaucugaaagguacuaagacaaggggcaaauuguguccgaacugcuuaaauuguaccgaucuggacguugcgcuagggcggcccaugugcaucggaauuacgccuagcgcuaaggccuccauccuccacgaagugcgcccagucacuucuggcuguuuucccauaaugcaugaucgaaccaagauccgucaacugccuaaccuucugagagguuacgagcacauuagguugucgacacauaaugugaucaacgcagaacgggccccagggggacccuaucgccucggcacuucaggcagcugcccuaauguaaccaguagauccggguucuuugcuacaauggcaugggccguuccaagggacaacaaaaccgcuacgaauccgcugacuguggagguccccuacauuuguacaaagggagaagaucagaucaccgugugggguuuccacucugacaacaaaacucagaugaagaaucuguauggcgauagcaacccucagaaauuuacauccucagccaaugggauaaccacgcacuacgugagucaaauuggaggcuucccaaaccagaccgaggacggugggcucccccagagcggacggaucgucguugauuauauggugcagaagccuggcaagacaggcacuauuguauaccaacgcgggguguuacugccacagaaagucuggugcgcgucuggacgauccaaggugaucaaagguucacuucccuugaucggcgaggcagacugucugcaugaaaaguaugggggacuaaacaaaagcaagccguacuacaccggcgagcacgccaaagcuauugguaauugcccuauauggguuaagacaccccucaagcuggccaacgggacuaaauauagaccuccagcaaagcugcugaaagaaaggggcuuuuucggagcuaucgccggcuuuuuggaagggggaugggaggguaugauugcgggcuggcauggguacaccagucacggagcccacggcguggcagucgcugccgaucucaagucuacacaggaggcuaucaauaaaauaaccaagaaccuuaauuccuuaagcgagcuggaagugaagaaccuccagcggcuuucgggugccauggacgagcugcauaaugaaauuuuggagcuagaugagaaaguagacgaccugcgugcagauacuaucucuucccaaaucgaacucgccguucugcuuucaaacgaggggauuaucaauagugaagacgagcaccuguuggcucucgaacgcaagcugaaaaagauguuaggccccagcgcgguggauauuggaaacggcuguuucgagacgaaacauaagugcaaucagacaugccuggacagaauagcagccgggaccuuuaacgcuggagaguucucccuaccaacuuuugauucucucaauaucaccgccgcaagccugaacgacgauggucuugacaaucacacaauuuugcuguauuacucaaccgccgcuaguucccucgccgucacucugaugaucgcaaucuucauuguguauauggucagcagggauaacgugucuuguucaauaugccuuuga

SEQ ID NO: 155923 - RNA, 1755 nt, Artificial Sequence
  derived and/or modified CDS sequence (opt3) from hemagglutinin__InfluenzaB__AHL91299
augaaggccaucauugugcugcucauggucguuaccagcaacgcugacagaauaugcacaggcaucacuuccucuaauucaccccacgugguaaaaacggcaacccagggggaagugaacgucacaggagugauuccucuuacuaccacaccaaccaggagucauuucgccaaucugaaggguacuaaaacacggggcaaguuguguccgaccugcuuaaacuguacggaucuggacguugcgcuagggcgccccaugugcgugggaacuaccccuagcgcuaaagccuccauccuccacgaaguccgaccagugacaucuggcuguuuucccauuaugcaugaucguacuaagaucagacaacugccuaaucuucugagggguuacgagaagauacgguugucgacccagaacguaaucaaugcagaaaaagccccagggggacccuaucgccucggcacaucaggcagcugcccuaacgcuaccaguagauccggguucuuugcaacgauggccugggcuguuccaagggacaauaacaagacugccacaaauccgcugaccguggagguccccuacauuuguacuaaagaagaggaucagaucacaguguggggauuccacucugacaacaagacccagaugaaaaaucuguauggugauagcaacccucaaaaguuuacguccucagcgaauggcgugaccacacauuacgucagucagauugggggauucccagaccagacugaggauggcggucucccccagagcgggcggaucguuguggacuauaugguacaaaagccuggaaaaaccggcacaauaguguaccagcgcggcauuuuacugccacagaaggucuggugcgcaucugggcgauccaaagugaucaagggaucacuucccuugauuggugaagccgauugucugcacgagaaauauggcgggcuaaacaagagcaaaccguacuacacuggagaacacgcuaaggccaucggcaacugcccuaucuggguuaagaccccacucaaacuggcaaaugguacaaaguauagacccccugcuaaacuucugaaggagaggggguuuuucggcgccauugcgggauuuuuggagggcgggugggaaggaaugauagccgguuggcauggcuacaccagucacggggcacauggaguggcugucgccgcugaccucaaaucuacucaggaggccaucaacaagauuacgaagaaucugaacuccuuaagcgaacuggaggugaaaaaucuccaacggcuuucgggcgcaauggaugaacugcacaacgagaucuuggagcuagacgaaaagguagacgaucugcgugccgacacaauaucuucccagauugagcucgcuguucugcuuucaaaugaagguaucaucaacagugaggaugaacaccuguuggcgcucgagcgcaaacugaagaaaauguuagggcccagcgcaguggacauuggcaauggauguuucgagaccaagcauaagugcaaccagacuugccuggauagaaucgccgcuggcaccuuuaaugccggggaguucucccuaccaacauuugacucucucaacauuaccgcagccagccugaaugaugacggacuugauaaccacacuauauugcuguauuacucaacagcugccaguucccucgcagucacgcugaugaucgcgauuuucaucguguauaugaucagcagggacaaugucucuuguucaauuugccuuuga

SEQ ID NO: 155924 - RNA, 1755 nt, Artificial Sequence
  derived and/or modified CDS sequence (opt3) from hemagglutinin__InfluenzaB__AHL91310
augaaggccaucauugugcugcucauggucguuaccagcaacgcugacagaauaugcacaggcaucacuuccucuaauucaccccacgugguaaaaacggcaacccagggggaagugaacgucacaggagugauuccucuuacuaccacaccaaccaagagucauuucgccaaucugaaagguacuaagacaaggggcaaauuguguccgaccugcuuaaacuguacggaucuggacguugcgcuagggcggcccaugugcgugggaacuaccccuagcgcuaaggccuccauccuccacgaaguccgcccagugacaucuggcuguuuucccauuaugcaugaucgaacuaagauccgucaacugccuaaucuucugagagguuacgagaaaauaagguugucgacccagaacguaaucaaugcagaaaaggccccagggggacccuaucggcucggcacaucaggcagcugcccuaacgcuaccagucgcuccggguucuuugcaacgauggccugggcuguuccaagagacaauaacaaaacugccacaaauccgcugaccguggagguccccuacauuuguacuaaggaagaggaucagaucacaguguggggauuccacucugacaacaaaacccagaugaagaaucuguauggugauagcaacccucaaaaguuuacguccucagcgaauggcgugaccacacauuacgucagucagauugggggauucccagaccagacugaggauggcggucucccccagagcgggaggaucguuguggacuauaugguacaaaaaccuggaaagaccggcacaauaguguaccagcggggcauuuuacugccacagaaagucuggugcgcaucugggcgcuccaaggugaucaaaggaucacuucccuugauuggugaagccgauugucugcacgagaaguauggcgggcuaaacaaaagcaagccguacuacacuggagaacacgcuaaggccaucggcaacugcccuaucuggguuaaaaccccacucaagcuggcaaaugguacaaaauaucgacccccugcuaaacuucugaaggagagaggguuuuucggcgccauugcgggauuuuuggagggcgggugggaaggaaugauagccgguuggcauggcuacaccagucacggggcacauggaguggcugucgccgcugaccucaagucuacucaggaggccaucaacaagauuacgaaaaaucugaacuccuuaagcgaacuggaggugaagaaucuccaaaggcuuucgggcgcaauggaugaacugcacaacgagaucuuggagcuagacgaaaaaguagacgaucugcgggccgacacaauaucuucccagauugagcucgcuguucugcuuucaaaugaagguaucaucaacagugaggaugaacaccuguuggcgcucgagcguaagcugaaaaagauguuagggcccagcgcaguggacauuggcaauggauguuucgagaccaagcauaaaugcaaccagacuugccuggaucgcaucgccgcuggcaccuuuaaugccggggaguucucccuaccaacauuugacucucucaacauuaccgcagccagccugaaugaugacggacuugauaaccacacuauauugcuguauuacucaacagcugccaguucccucgcagucacgcugaugaucgcgauuuucaucguguauaugaucagcagagacaaugucucuuguucaauuugccuuuga

SEQ ID NO: 155925 - RNA, 1755 nt, Artificial Sequence
  derived and/or modified CDS sequence (opt3) from hemagglutinin__InfluenzaB__AHL91321
augaaggccaucauugugcugcucauggucguuaccagcaacgcugacagaauaugcacaggcaucacuuccucuaauucaccccacgugguaaaaacggcaacccagggggaagugaacgucacaggagugauuccucuuacuaccacaccaaccaagagucauuucgccaaucugaaagguacuaagacaaggggcaaauuguguccgaccugcuuaaacuguacggaucuggacguugcgcuagggcggcccaugugcgugggaacuaccccuagcgcuaaggccuccauccuccacgaaguccgcccagugacaucuggcuguuuucccauuaugcaugaucgaacuaagauccgucaacugccuaaucuucugagagguuacgagaaaauaagguugucgacccagaacguaaucaaugcagaaaaggccccagggggacccuaucggcucggcacaucaggcagcugcccuaacgcuaccagucgcuccggguucuuugcaacgauggccugggcuguuccaagagacaauaacaaaacugccacaaauccgcugaccguggagguccccuacauuuguacuaaggaagaggaucagaucacaguguggggauuccacucugacaacaaaacccagaugaagaaucuguauggugauagcaacccucaaaaguuuacguccucagcgaauggcgugaccacacauuacgucagucagauugggggauucccagaccagacugaggauggcggucucccccagagcgggaggaucguuguggacuauaugguacaaaaaccuggaaagaccggcacaauaguguaccagcggggcgucuuacugccacagaaaguguggugcgcaucugggcgcuccaagguuauuaaaggaucacuucccuugaucggugaagccgauugucugcacgagaaguauggcgggcuaaacaaaagcaagccguacuacacuggagaacacgcuaaggccauuggcaacugcccuaucugggugaaaaccccacucaagcuggcaaaugguacaaaauaucgacccccugcuaaacuucugaaagagaagggguuuuucggcgccaucgcgggauuuuuggagggcgggugggaaggaaugauugccgguuggcauggcuacaccagucacggggcacauggagucgcuguggccgcugaccucaagucuacucaggaggccauaaacaaaaucacgaagaaucugaacuccuuaagcgaacuggagguaaagaaucuccaaagacuuucgggcgcaauggaugaacugcacaacgagauuuuggagcuagacgaaaagguugacgaucugagggccgacacaaucucuucccagauagagcucgcugugcugcuuucaaaugaagguauuaucaacagugaggaugaacaccuguuggcgcucgagcggaaacugaagaagauguuagggcccagcgcagucgacaucggcaauggauguuucgagaccaaacauaagugcaaccagacuugccuggaucguauugccgcuggcaccuuuaaugccggggaguucucccuaccaacauuugacucucucaacaucaccgcagccagccugaaugaugacggacuugauaaccacacuauuuugcuguauuacucaacagcugccaguucccucgcagugacgcugaugauagcgaucuucauugucuauauggugagccgcgacaauguuucuuguucaaucugccuuuga

SEQ ID NO: 155926 - RNA, 1755 nt, Artificial Sequence; identical to SEQ ID NO: 155924
  derived and/or modified CDS sequence (opt3) from hemagglutinin__InfluenzaB__AHL91332

SEQ ID NO: 155927 - RNA, 1755 nt, Artificial Sequence; identical to SEQ ID NO: 155924
  derived and/or modified CDS sequence (opt3) from hemagglutinin__InfluenzaB__AHL91343

SEQ ID NO: 155928 - RNA, 1755 nt, Artificial Sequence; identical to SEQ ID NO: 155924
  derived and/or modified CDS sequence (opt3) from hemagglutinin__InfluenzaB__AHL91354

SEQ ID NO: 155929 - RNA, 1755 nt, Artificial Sequence; identical to SEQ ID NO: 154527
  derived and/or modified CDS sequence (opt3) from hemagglutinin__InfluenzaB__AHL91365

SEQ ID NO: 155930 - RNA, 1755 nt, Artificial Sequence
  derived and/or modified CDS sequence (opt3) from hemagglutinin__InfluenzaB__AHL91376
augaaggccaucauugugcugcucauggucguuaccagcaacgcugacagaauaugcacaggcaucacuuccucuaauucaccccacgugguaaaaacggcaacccagggggaagugaacgucacaggagugauuccucuuacugccaccccaacaaagagucauuucgcgaaucugaaagguaccaagacuaggggcaaauuguguccgacaugcuuaaacuguaccgaucuggacguugcucuagggcggcccaugugcgugggagucacgccuagcgccaaggcauccauccuccacgaagugcgcccaguaacuucuggcuguuuucccauuaugcaugaucgaaccaagauccgucaacugccuaaucuucugagagguuacgagaaaauaagguugucgacacagaacguuaucaaugccgaaaaggcuccagggggacccuaucggcucggcacuucaggcagcugcccuaacgcaaccagucgcuccggguucuuugccacaauggcuugggccgugccaagagacaauaacaaaaccgcgacgaauccgcugacugucgaggugccccacauuuguacaaaggaagaggaucagaucaccguguggggauuccauucugacaacaaaacucagaugaagaaucuguacggugauagcaacccucaaaaguuuacauccucagcaaauggcgucaccacgcacuauguuagucagauugggggauucccagaccagaccgaggauggcggucucccccagagcgggaggaucgugguagacuacauggugcaaaaaccuggaaagacaggcacuauagucuaucagcggggcauuuuacugccacagaaaguguggugcgccucugggcgcuccaagguuaucaaaggaucacuucccuugauuggugaagcugauugucugcacgagaaguacggcgggcuaaacaaaagcaagccguauuacaccggagaacaugccaaggcaaucggcaacugcccuaucugggugaaaacaccccucaagcuggcuaaugguacuaaauaccgaccuccagccaaacuucugaaggagagaggguuuuucggcgcgauugccggauuuuuggagggcgggugggaaggaaugauagcagguuggcacggcuauaccagucauggggcucacggagucgccguggcugccgaccucaagucuacacaggaggcaaucaacaagauuaccaaaaaucugaacuccuuaagcgaacuggagguaaagaaucuccaaaggcuuucgggcgccauggaugaacugcacaacgagaucuuggagcuagacgaaaaaguugacgaucugcgggcugacacuauaucuucccagauugagcucgcggugcugcuuucaaaugaagguaucaucaacagugaggaugaacaucuguuggcacucgagcguaagcugaaaaagauguuagggcccagcgccgucgacauuggcaauggauguuucgagacgaagcacaaaugcaaccagacaugccuggaucgcaucgcugccggcaccuuuaaugcaggggaguucucccuaccaacuuuugacucucucaacauuaccgccgcuagccugaaugaugacggacuugauaaccauacaauauugcuguacuauucaaccgccgcaaguucccucgcggugacucugaugaucgcuauuuucaucgucuacaugaucagcagagacaaugugucuuguucaauuugccuuuga

SEQ ID NO: 155931 - RNA, 1755 nt, Artificial Sequence
  derived and/or modified CDS sequence (opt3) from hemagglutinin__InfluenzaB__AHL91387
augaaggccaucauugugcugcucauggucguuaccagcaacgcugacagaauaugcacaggcaucacuuccucuaauucaccccacgugguaaaaacggcaacccagggggaagugaacgucacaggagugauuccucuuacuaccacaccagccaagagucauuucgcgaaucugaaagguaccaagacuaggggcaaauuguguccgacaugcuuaaacuguaccgaucuggacguugcucuagggcggcccaugugcgugggagucacgccuagcgccaaggcauccauccuccacgaagugcgcccaguaacuucuggcuguuuucccauuaugcaugaucgaaccaagauccgucaacugccuaaucuucugagagguuacgagaaaauaagguugucgacacagaacguuaucaaugccgaaaaggcuccagggggacccuaucggcucggcacuucaggcagcugcccuaacgcaaccagucgcuccggguucuuugccacaauggcuugggccgugccaagagacaauaacaaaaccgcgacgaauccgcugacugucgaggugccccacauuuguacaaaggaagaggaucagaucaccguguggggauuccauucugacaacaaaacucagaugaagaaucuguacggugauagcaacccucaaaaguuuacauccucagcaaauggcgucaccacgcacuauguuagucagauugggggauucccagaccagaccgaggauggcggucucccccagagcgggaggaucgugguagacuacauggugcaaaaaccuggaaagacaggcacuauagucuaucagcggggcauuuuacugccacagaaaguguggugcgccucugggcgcuccaagguuaucaaaggaucacuucccuugauuggugaagcugauugucugcacgagaaguacggcgggcuaaacaaaagcaagccguauuacaccggagaacaugccaaggcaaucggcaacugcccuaucugggugaaaacaccccucaagcuggcuaaugguacuaaauaccgaccuccagccaaacuucugaaggagagaggguuuuucggcgcgauugccggauuuuuggagggcgggugggaaggaaugauagcagguuggcacggcuauaccagucauggggcucacggagucgccguggcugccgaccucaagucuacacaggaggcaaucaacaagauuaccaaaaaucugaacuccuuaagcgaacuggagguaaagaaucuccaaaggcuuucgggcgccauggaugaacugcacaacgagaucuuggagcuagacgaaaaaguugacgaucugcgggcugacacuauaucuucccagauugagcucgcggugcugcuuucaaaugaagguaucaucaacagugaggaugaacaucuguuggcacucgagcguaagcugaaaaagauguuagggcccagcgccgucgacauuggcaauggauguuucgagacgaagcacaaaugcaaccagacaugccuggaucgcaucgcugccggcaccuuuaaugcaggggaguucucccuaccaacuuuugacucucucaacauuaccgccgcuagccugaaugaugacggacuugauaaccauacaauauugcuguacuauucaaccgccgcaaguucccucgcggugacucugaugaucgcuauuuucaucgucuacaugaucagcagagacaaugugucuuguucaauuugccuuuga

SEQ ID NO: 155932 - RNA, 1755 nt, Artificial Sequence
  derived and/or modified CDS sequence (opt3) from hemagglutinin__InfluenzaB__AHL91409
augaaggccaucauugugcugcucauggucguuaccagcaacgcugacagaauaugcacaggcaucacuuccucugauucaccccacgugguaaaaacggcaacccagggggaagugaaugucacaggagccauuccucuuacuaccacaccaaccaagaguuacuucgcgaaccugaaagguacuaagacaaggggcaaauuguguccgaccugcuuaaauuguacggaccuggauguggcucuagggcggcccaugugcguuggaaucacuccuagcgccaaggcauccauucuccaugaagugcgcccagucaccucuggcuguuuucccaucaugcacgaccgaacaaagauacgucaacugccuaaccuucugagagguuaugagaaaaucagguugucgacucagaaugugauuaacgccgaaaaggcuccagggggacccuaccggcucggcaccucaggcagcugcccuaaugcaacaagucgcuccggguucuuugccaccauggcuugggccguaccaagagauaacaauaaaacggcgacuaacccgcugacaguugaggugccccauaucuguaccaaggaagaggaccagauuacugucuggggauuccacucugauaauaaaacacagaugaagaaccuguauggugacagcaauccucaaaaguuuaccuccucagcaaacggcaucacgacccauuacgugagucagauagggggauucccagaucagacagaggacggcggucucccccagagcgggaggauuguggucgauuauaugguucaaaaaccuggaaagacuggcaccaucguguaccagcggggcauuuuacugccacagaaaguauggugcgccucugggcgcuccaaggugaucaaaggaucacuucccuugaucggugaagcugacugucugcacgagaaguauggcgggcuaaauaaaagcaagccguacuacacaggagaacacgccaaggcaauuggcaacugcccuauaugggucaaaacuccccucaagcuggcuaacgguaccaaauaucgaccuccagccaagcugcugaaagagagaggguuuuucggcgcgaucgccggauuuuuggagggcgggugggaaggaaugguggcagguuggcauggcuacacaagucacggggcucauggaguugccguggcugccgaucucaagucuacccaggaggcaauuaauaagaucacuaaaaaccuuaauuccuuaagcgaacuggaggucaagaaccuccaaaggcuuucgggcgccauggacgaacugcacaaugagauauuggagcuagacgaaaaaguggaugaccugcgggcugauacgauuucuucccagaucgagcucgcgguacugcuuucaaacgaagguaucauuaauagugaggacgaacaccuguuggcacucgagcguaagcugaaaaagauguuagggcccagcgccguugauaucggcaacggauguuucgagacaaagcauaaaugcaaucagaccugccuggaccgcauugcugccggcacuuuuaacgcaggggaguucucccuaccaaccuuugauucucucaauauaacagccgcuagccugaacgacgauggacuugacaaucacaccaucuugcuguauuacucaacugccgcaaguucccucgcggugacacugaugauugcuaucuucaucgucuauaugauuagcagagauaacgugucuuguucaauaugccuuuga

SEQ ID NO: 155933 - RNA, 1755 nt, Artificial Sequence
  derived and/or modified CDS sequence (opt3) from hemagglutinin__InfluenzaB__AHL91431
augaaggccaucauugugcugcucauggucguuaccagcaacgcugacagaauaugcacaggcaucacuuccucuaauucaccccacgugguaaaaacggcaacccagggggaggugaacgucacaggagccauuccucuuacuaccacaccaaccaagagucauuucgcgaaucugaaagguacuaagacaaggggcaaauuguguccgaccugcuuaaacuguacggaucuggacguggcucuagggcggcccaugugcguuggaaucacuccuagcgccaaggcauccauucuccacgaagugcgcccagucaccucuggcuguuuucccaucaugcaugaucgaacaaagauacgucaacugccuaaucuucugagagguuacgagaaaaucagguugucgacucagaacgugauuaaugccgaaaaggcuccagggggacccuaucggcucggcaccucaggcagcugcccuaacgcaacaaguaaauccggguucuuugccaccauggcuugggccguaccacgcgacaauaacaagacggcgacuaauccgcugacaguugaggugccccacaucuguaccaaagaagaggaucagauuacugucuggggauuccauucugacaacaagacacagaugaagaaucuguacggugauagcaacccucaaaaauuuaccuccucagcaaauggcaucacgacccacuaugugagucagauagggggauucccagaccagacagaggauggcggucucccccagagcgggagaauuguggucgacuacaugguucaaaagccuggaaaaacuggcaccaucguguaucagaggggcauuuuacugccacagaagguauggugcgccucugggcgguccaaagugaucaagggaucacuucccuugaucggugaagcugauugucugcacgagaaauacggcgggcuaaacaagagcaagccguauuacacaggagaacaugccaaagcaauuggcaacugcccuauaugggucaagacuccccucaaacuggcuaaugguaccaaguaccgcccuccagccaaacuucugaaggagcgaggguuuuucggcgcgaucgccggauuuuuggagggcgggugggaaggaaugauugcagguuggcacggcuauacaagucauggggcucacggaguggccguugcugccgaccucaagucuacccaggaggcaaucaacaaaauaacuaagaaucugaacuucuuauccgaacuggaggugaaaaaucuccaaagacuuagcggcgccauggaugaacugcacaacgagauuuuggagcuagacgaaaaggucgacgaucugagggcugacacgaucucgucucagaucgagcucgcggugcugcuuuccaaugaagguauuaucaacucagaggaugaacaucuguuggcacucgagcggaaacugaagaagauguuagggcccagugccguagacauuggcaauggauguuuugagacaaaacacaagugcaaccagaccugccuggaucguauagcugccggcacuuucaaugcaggggaauuuagccuaccaaccuucgacucccucaacaucacagccgcuucucugaaugaugacggacuugauaaccauaccauuuugcuguacuauagcacugccgcaucaagucucgcgguuacacugaugaucgcuaucuucauuguguacaugauaucccgcgacaaugucagcuguucuaucugccuuuga

SEQ ID NO: 155934 - RNA, 1755 nt, Artificial Sequence
  derived and/or modified CDS sequence (opt3) from hemagglutinin__InfluenzaB__AHL91442
augaaggccaucauugugcugcucauggucguuaccagcaacgcugacagaauaugcacaggcaucacuuccucuaauucaccccacgugguaaaaacggcaacccagggggaagugaacgucacaggagccauuccucuuacuaccacaccaaccaagagucauuucgcgaaucugaaagguacuaagacaaggggcaaauuguguccgaccugcuuaaacuguacggaucuggacguggcucuagggcggcccaugugcguuggaaucacuccuagcgccaaggcauccauucuccacgaagugcgcccagucaccucuggcuguuuucccaucaugcaugaucgaacaaagauacgucaacugccuaaucuucugagagguuacgagaaaaucagguugucgacucagaacgugauuaaugccgaaaccgcuccagggggacccuaucggcucggcacaucaggcagcugcccuaacgcaaccaguaaguccggguucuuugccacgauggcuugggccguaccacgcgacaauaacaaaacugcgacaaauccgcugaccguugaggugccccacaucuguacuaaggaagaggaucagauuacagucuggggauuccauucugacaacaaaacccagaugaagaaucuguacggugauagcaacccucaaaaguuuacguccucagcaaauggcaucaccacacacuaugugagucagauagggggauucccagaccagacugaggauggcggucucccccagagcgggagaauuguggucgacuacaugguucaaaaaccuggaaagaccggcacaaucguguaucagaggggcauuuuacugccacagaaaguauggugcgccucugggcgguccaaggugaucaaaggaucacuucccuugaucggugaagcugauugucugcacgagaaguacggcgggcuaaacaaaagcaagccguauuacacuggagaacaugccaaggcaauuggcaacugcccuauaugggucaaaaccccucucaagcuggcuaaugguacaaaauaccgcccacccgccaaacuucugaaggagcgaggguuuuucggcgcgaucgccggauuuuuggagggcgggugggaaggaaugauugcagguuggcacggcuauaccagucauggggcucacggaguggccguugcugccgaccucaagucuacucaggaggcaaucaacaagauaacgaaaaaucugaacuccuuaagcgaacuggaggugaagaaucuccaaagacuuucgggcgccauggaugaacugcacaacgagauuuuggagcuagacgaaaaagucgacgaucugagggcugacacaaucucuucccagaucgagcucgcggugcugcuuucaaaugaagguauuaucaacagugaggaugaacaucuguuggcacucgagcggaagcugaaaaagauguuagggcccagcgccguagacauuggcaauggauguuucgagaccaagcacaaaugcaaccagacuugccuggaucguauagcugccggcaccuuuaaugcaggggaguucucccuaccaacauuugacucucucaacaucaccgccgcuagccugaaugaugacggacuugauaaccauacuauuuugcuguacuauucaacagccgcaaguucccucgcgguuacgcugaugaucgcuaucuucauuguguacaugauaagccgcgacaaugucucuuguucaaucugccuuuga

SEQ ID NO: 155935 - RNA, 1755 nt, Artificial Sequence
  derived and/or modified CDS sequence (opt3) from hemagglutinin__InfluenzaB__AHL91453
augaaggccaucauugugcugcucauggucguuaccagcaacgcugacagaauaugcacaggcaucacuuccucuaauucaccccacgugguaaaaacggcaacccagggggaagugaacgucacaggagccauuccucuuacuaccacaccaaccaagagucauuucgcgaaucugaaagguacuaagacaaggggcaaauuguguccgaccugcuuaaacuguacggaucuggacguggcucuagggcggcccaugugcguuggaaucacuccuagcgccaaggcauccauucuccacgaagugcgcccagucaccucuggcuguuuucccaucaugcaugaucgaacaaagauacgucaacugccuaaucuucugagagguuacgagaaaaucagguugucgacucagaacgugauuaaugccgaaaaggcuccagggggacccuaucggcucggcaccucaggcagcugcccuaacgcaacaaguaaauccggguucuuugccaccauggcuugggccguaccacgcgacaauaacaagacggcgacuaauccgcugacaaucgagguuccccacguguguaccaaagaagaggaucagauuacugucuggggauuccauucugacaacaagacacagaugaagaaucuguacggugauagcaacccucaaaaauuuaccuccucagcaaauggcaucacgacccacuaugugagucagauagggggauucccagaccagacagaggauggcggucucccccagagcgggagaauuguggucgacuacaugguucaaaagccuggaaaaacuggcaccaucguguaucagaggggcauuuuacugccacagaagguauggugcgccucugggcgguccaaagugaucaagggaucacuucccuugaucggugaagcugauugucugcacgagaaauacggcgggcuaaacaagagcaagccguauuacacaggagaacaugccaaagcaauuggcaacugcccuauaugggucaagacuccccucaaacuggcuaaugguaccaaguaccgcccuccagccaaacuucugaaggagcgaggguuuuucggcgcgaucgccggauuuuuggagggcgggugggaaggaaugauugcagguuggcacggcuauacaagucauggggcucacggaguggccguugcugccgaccucaagucuacccaggaggcaaucaacaaaauaacuaagaaucugaacuccuuaagcgaacuggaggugaaaaaucuccaaagacuuucgggcgccauggaugaacugcacaacgagauuuuggagcuagacgaaaaggucgacgaucugagggcugacacgaucucuucccagaucgagcucgcggugcugcuuucaaaugaagguauuaucaacagugaggaugaacaucuguuggcacucgagcggaaacugaagaagauguuagggcccagcgccguagacauuggcaauggauguuucgagacaaaacacaagugcaaccagaccugccuggaucguauagcugccggcacuuuuaaugcaggggaguucucccuaccaaccuuugacucucucaacaucacagccgcuagccugaaugaugacggacuugauaaccauaccauuuugcuguacuauucaacugccgcaaguucccucgcgguuacacugaugaucgcuaucuucauuguguacaugauaagccgcgacaaugucucuuguucaaucugccuuuga

SEQ ID NO: 155936 - RNA, 1755 nt, Artificial Sequence; identical to SEQ ID NO: 154453
  derived and/or modified CDS sequence (opt3) from hemagglutinin__InfluenzaB__AHL91464

SEQ ID NO: 155937 - RNA, 1755 nt, Artificial Sequence; identical to SEQ ID NO: 154559
  derived and/or modified CDS sequence (opt3) from hemagglutinin__InfluenzaB__AHL91475

SEQ ID NO: 155938 - RNA, 1755 nt, Artificial Sequence; identical to SEQ ID NO: 155934
  derived and/or modified CDS sequence (opt3) from hemagglutinin__InfluenzaB__AHL91486

SEQ ID NO: 155939 - RNA, 1755 nt, Artificial Sequence; identical to SEQ ID NO: 155934
  derived and/or modified CDS sequence (opt3) from hemagglutinin__InfluenzaB__AHL91497

SEQ ID NO: 155940 - RNA, 1755 nt, Artificial Sequence; identical to SEQ ID NO: 155934
  derived and/or modified CDS sequence (opt3) from hemagglutinin__InfluenzaB__AHL91530

SEQ ID NO: 155941 - RNA, 1755 nt, Artificial Sequence; identical to SEQ ID NO: 154453
  derived and/or modified CDS sequence (opt3) from hemagglutinin__InfluenzaB__AHL91541

SEQ ID NO: 155942 - RNA, 1755 nt, Artificial Sequence; identical to SEQ ID NO: 155934
  derived and/or modified CDS sequence (opt3) from hemagglutinin__InfluenzaB__AHL91552

SEQ ID NO: 155943 - RNA, 1755 nt, Artificial Sequence; identical to SEQ ID NO: 155934
  derived and/or modified CDS sequence (opt3) from hemagglutinin__InfluenzaB__AHL91574

SEQ ID NO: 155944 - RNA, 1755 nt, Artificial Sequence
  derived and/or modified CDS sequence (opt3) from hemagglutinin__InfluenzaB__AHL91585
augaaggccaucauugugcugcucauggucguuaccagcaacgcugacagaauaugcacaggcaucacuuccucuaauucaccccacgugguaaaaacggcaacccagggggaagugaacgucacaggagccauuccucuuacuaccacaccaaccaagagucauuucgcgaaucugaaagguacuaagacaaggggcaaauuguguccgaccugcuuaaacuguacggaucuggacguggcucuagggcggcccaugugcguuggaaucacuccuagcgccaaggcauccauucuccacgaagugcgcccagucaccucuggcuguuuucccaucaugcaugaucgaacaaagauacgucaacugccuaaucuucugagagguuacgagaaaaucagguugucgacucagaacgugauuaaugccgaaaaggcuccagggggacccuaucggcucggcaccucaggcagcugcccuaacgcaacaaguaaauccggguucuuugccaccauggcuugggccguaccacgcgacaauaacaagacggcgacuaauccgcugacaguugaggugccccacaucuguaccaaagaagaggaucagauuacugucuggggauuccauucugacaacaagacacagaugaagaaucuguacggugauagcaacccucaaaaauuuaccuccucagcaaauggcaugacgacccacuaugugagucagaucgggggauucccagaccagacagaggauggcggucucccccagagcgggagaauaguggucgacuacaugguucaaaagccuggaaaaacuggcaccauuguguaucagaggggcaucuuacugccacagaagguauggugcgccucugggcgguccaaagugauuaagggaucacuucccuugaucggugaagcugauugucugcacgagaaauacggcgggcuaaacaagagcaagccguauuacacaggagaacaugccaaagcaaucggcaacugcccuauuugggucaagacuccccucaaacuggcuaaugguaccaaguaccgcccuccagccaaacuucugaaggagcgaggguuuuucggcgcgauagccggauuuuuggagggcgggugggaaggaaugaucgcagguuggcacggcuauacaagucauggggcucacggaguggccguugcugccgaccucaagucuacccaggaggcaauuaacaaaaucacuaagaaucugaacuccuuaagcgaacuggaggugaaaaaucuccaaagacuuucgggcgccauggaugaacugcacaacgagauauuggagcuagacgaaaaggucgacgaucugagggcugacacgauuucuucccagaucgagcucgcggugcugcuuucaaaugaagguaucauuaacagugaggaugaacaucuguuggcacucgagcggaaacugaagaagauguuagggcccagcgccguagacaucggcaauggauguuucgagacaaaacacaagugcaaccagaccugccuggaucguauugcugccggcacuuuuaaugcaggggaguucucccuaccaaccuuugacucucucaacauaacagccgcuagccugaaugaugacggacuugauaaccauaccaucuugcuguacuauucaacugccgcaaguucccucgcgguuacacugaugauugcuaucuucaucguguacaugauuagccgcgacaaugucucuuguucaauaugccuuuga

SEQ ID NO: 155945 - RNA, 1755 nt, Artificial Sequence
  derived and/or modified CDS sequence (opt3) from hemagglutinin__InfluenzaB__AHL91596
augaaggccaucauugugcugcucauggucguuaccagcaacgcugacagaauaugcacaggcaucacuuccucuaauucaccccacgugguaaaaacggcaacccagggggaagugaacgucacaggagccauuccucuuacuaccacaccaaccaagagucauuucgcgaaucugaaagguacuaagacaaggggcaaauuguguccgaccugcuuaaacuguacggaucuggacguggcucuagggcggcccaugugcguuggaaucacuccuagcgccaaggcauccauucuccacgaagugcgcccagucaccucuggcuguuuucccaucaugcaugaucgaacaaagauacgucaacugccuaaucuucugagagguuacgagaaaaucagguugucgacucagaacgugauuaaugccgaaaaggcuccagggggacccuaucggcucggcaccucaggcagcugcccuaacgcaacaaguaaauccggguucuuugccaccauggcuugggccguaccacgcgacaauaacaagacggcgacuaauccgcugacaguugaggugccccacaucuguaccaaagaagaggaucagauuacugucuggggauuccauucugacaacaagacacagaugaagaaucuguacggugauagcaacccucaaaaauuuaccuccucagcaaauggcaucacgacccacuaugugagucagauagggggauucccagaccagacagaggauggcggucucccccagagcgggagaauuguggucgacuacaugguucaaaagccuggaaaaacuggcaccaucguguaucagaggggcauuuuacugccacagaagguauggugcgccucugggcgguccaaagugaucaagggaucacuucccuugaucggugaagcugauugucugcacgagaaauacggcgggcuaaacaagagcaagccguauuacacaggagaacaugccaaagcaauuggcaacugcccuauaugggucaagacuccccucaaacuggcuaaugguaccaaguaccgcccuccagccaaaauccuuaaggagcgaggguuuuucggcgcgauugccggauuucuggagggcgggugggaaggaaugaucgcagguuggcacggcuauacaagucauggggcucacggaguggccguugcugccgacuugaagucuacccaggaggcaauaaacaaaauuacuaagaaucucaacucccugagcgaauuagaggugaaaaaucugcaaagacucucgggcgccauggaugaacuucacaacgagauccuggaguuggacgaaaaggucgacgaucuaagggcugacacgaucucuucccagauugagcuggcggugcuccugucaaaugaagguaucauuaacagugaggaugaacaucuucuggcauuggagcggaaacucaagaagaugcuggggcccagcgccguagacauaggcaauggauguuucgagacaaaacacaagugcaaccagaccugcuuagaucguaucgcugccggcacuuuuaaugcaggggaguucucccugccaaccuuugacucucuaaacauuacagccgcuagccucaaugaugacggacuggauaaccauaccauccuuuuguacuauucaacugccgcaaguucccuggcgguuacacucaugaucgcuauuuucauaguguacaugaucagccgcgacaaugucucuuguucaauuugccuguga

SEQ ID NO: 155946 - RNA, 1755 nt, Artificial Sequence; identical to SEQ ID NO: 155945
  derived and/or modified CDS sequence (opt3) from hemagglutinin__InfluenzaB__AHL91607

SEQ ID NO: 155947 - RNA, 1755 nt, Artificial Sequence
  derived and/or modified CDS sequence (opt3) from hemagglutinin__InfluenzaB__AHL91618
augaaggccaucauugugcugcucauggucguuaccagcaacgcugacagaauaugcacaggcaucacuuccucuaauucaccccacgugguaaaaacggcaacccagggggaagugaacgucacaggagccauuccucuuacuaccacaccaaccaagagucauuucgcgaaucugaaagguacuaagacaaggggcaaauuguguccgaccugcuuaaacuguacggaucuggacguggcucuagggcggcccaugugcguuggaaucacuccuagcgccaaggcauccauucuccacgaagugcgcccagucaccucuggcuguuuucccaucaugcaugaucgaacaaagauacgucaacugccuaaucuucugagagguuacgagaaaaucagguugucgacucagaacgugauuaaugccgaaaccgcuccagggggacccuaucggcucggcacaucaggcagcugcccuaacgcaaccaguaaguccggguucuuugccacgauggcuugggccguaccacgcgacaauaacaaaacugcgacaaauccgcugaccguugaggugccccacaucuguacuaaggaagaggaucagauuacagucuggggauuccauucugacaacaaaacccagaugaagaaucuguacggugauagcaacccucaaaaguuuacguccucagcaaauggcaucaccacacacuaugugagucagauagggggauucccagaccagacugaggauggcggucucccccagagcgggagaauuguggucgacuacaugguucaaaaaccuggaaagaccggcacaaucguguaucagaggggcauuuuacugccacagaaaguauggugcgccucugggcgguccaaggugaucaaaggaucacuucccuugaucggugaagcugauugucugcacgagaaguacggcgggcuaaacaaaagcaagccguauuacacuggagaacaugccaaggcaauuggcaacugcccuauaugggucaaaaccccucucaagcuggcuaaugguacaaaauaccgcccacccgccaaacuucugaaggagcgaggguuuuucggcgcgaucgccggauuuuuggagggcgggugggaaggaaugauugcagguuggcacggcuauaccagucauggggcucacggaguggccguugcugccgaccucaagucuacucaggaggcaaucaacaagauaacgaaaaaucugaacuccuuaagcgaacuggaggugaagaaucuccaaagacuuucgggcgccauggaugaacugcacaacgagauuuuggagcuagacgaaaaagucgacgaucugagggcugacacaaucucuucccagaucgagcucgcggugcugcuuucaaaugaagguauuaucaacagugaggaugaacaucuguuggcacucgagcggaagcugaaaaagauguuagggcccagcgccguagacauuggcaauggauguuucgagaccaagcacaaaugcaaccagacuugccuggaucguauagcugccggcaccuuuaauguuggggaguucucccuaccaacauuugacucucucaacaucaccgcagccagccugaaugaugacggacuugauaaccauacuauuuugcuguacuauucaacagcugccaguucccucgcagugacgcugaugaucgcgaucuucauugucuacaugauaagccgcgacaaugugucuuguucaaucugccuuuga

SEQ ID NO: 155948 - RNA, 1755 nt, Artificial Sequence
  derived and/or modified CDS sequence (opt3) from hemagglutinin__InfluenzaB__AHL91629
augaaggccaucauugugcugcucauggucguuaccagcaacgcugacagaauaugcacaggcaucacuuccucuaauucaccccacgugguaaaaacggcaacccagggggaggugaacgucacaggagccauuccucuuacuaccacaccaaccaagagucauuucgcgaaucugaaagguacuaagacaaggggcaaauuguguccgaccugcuuuaacuguacggauuuagacguggcucuggggcggcccaugugcguuggaaucacuccuagcgccaaggcauccauucuacacgaagugcgcccagucaccucuggcuguuuccccaucaugcaugaucgaacaaagauacgucaacucccuaaucugcuuagagguuacgagaaaaucaggcugucgacucagaacgugauugacgccgaaaaggcuccagggggacccuauaaauugggcaccucaggcagcugcccuaaugcaacaaguaaguccggguuuuucgccaccauggcuugggccguaccacgggauaacaauaaaacggcgacuaacccgcucacaguugaggugccccacaucuguaccaaggaagaggaccagauuacugucuggggauuucauucugauaauaagacacagaugaaaaaccuguacggugacagcaauccucaaaaguucaccuccucagcaaacggcaucacgacccacuaugugagucagauagggggauuuccagaucagacagaggacggcggucugccccagagcgggcgcauuguggucgauuacaugguucaaaaaccuggaaagacuggcaccaucguguaucagagaggcauucucuuaccacagaaaguauggugcgccucugggagguccaaggugaucaaaggaucacugccccuuaucggugaagcugacuguuugcacgagaaguacggcgggcugaauaagagcaaaccguauuacacaggagaacaugccaaggcaauuggcaacugcccuauaugggucaaaacuccccuaaagcucgcuaacgguaccaaauaccggccuccagccaagcugcuuaaggagcgcggguucuuuggcgcgaucgccggauuccuggagggcgggugggaaggaaugauugcagguuggcacggcuauacaagucauggggcucacggaguggccguugcugccgauuugaaaucuacccaggaggcaaucaauaagauaacuaaaaaccucaauucccugagcgaauuagaggugaagaaccugcaacgacucucgggcgccauggacgaacuucacaaugagauucuggaguuggacgaaaaagucgaugaccuaagagcugauacgaucucuucccagaucgagcuggcggugcuccugucaaacgaagguauuaucaauagugaggacgaacaucuucuggcauuggagaggaagcucaagaaaaugcuggggcccagcgccguagauauuggcaacggauguuuugagacaaagcacaaaugcaaucagaccugcuuagaccggauagcugccggcacuuucaacgcaggggaauuuucccugccaaccuucgauucucuaaauaucacagccgcuagccucaacgacgauggacuggacaaucauaccauucuuuuguacuauucaacugccgcaaguucccuggcgguuacacucaugaucgcuaucuucauuguguacaugauaagccgugauaacgucucuuguucaaucugccuguga

SEQ ID NO: 155949 - RNA, 1755 nt, Artificial Sequence; identical to SEQ ID NO: 155948
  derived and/or modified CDS sequence (opt3) from hemagglutinin__InfluenzaB__AHL91640

SEQ ID NO: 155950 - RNA, 1755 nt, Artificial Sequence; identical to SEQ ID NO: 154455
  derived and/or modified CDS sequence (opt3) from hemagglutinin__InfluenzaB__AHL91651

SEQ ID NO: 155951 - RNA, 1752 nt, Artificial Sequence
  derived and/or modified CDS sequence (opt3) from hemagglutinin__InfluenzaB__AHL91662
augaaggccaucauugugcugcucauggucguuaccagcaacgcugacagaauaugcacaggcaucacuuccucuaauucaccccacgugguaaaaacggcaacccagggggaagugaacgucacaggagccauuccucuuacuaccacaccaaccaagagucauuucgcgaaucugaaagguacuaagacaaggggcaaauuguguccgaccugcuuaaacuguacggaucuggacguggcucuagggcggcccaugugcguuggaaucacuccuagcgccaaggcauccauucuccacgaagugcgcccagucaccucuggcuguuuucccaucaugcaugaucgaacaaagauacgucaacugccuaaucuucugagagguuacgagaaaaucagguugucgacucagaacgugauuaaugccgaaaccgcuccagggggacccuaucggcucggcacaucaggcagcugcccuaacgcaaccaguaaguccggguucuuugccacgauggcuugggccguaccacgcgacaauaacaaaacugcgacaaauccgcugaccguugaggugccccacaucuguacuaaggaagaggaucagauuacagucuggggauuccauucugacaacaaaacccagaugaagaaucuguacggugauagcaacccucaaaaguuuacguccucagcaaauggcaucaccacacacuaugugagucagauagggggauucccagaccagacugaggauggcggucucccccagagcgggagaauuguggucgacuacaugguucaaaaaccuggaaagaccggcacaaucguguaucagaggggcauuuuacugccacagaaaguauggugcgccucugggcgguccaaggugaucaaaggaucacuucccuugaucggugaagcugauugucugcacgagaaguacggcgggcuaaacaaaagcaagccguauuacacuggagaacaugccaaggcaauuggcaacugcccuauaugggucaaaaccccucucaagcuggcuaaugguacaaaauaccgcccacccgccaaacuucugaaggagcgaggguuuuucggcgcgaucgccggauuuuuggagggcgggugggaaggaaugauugcagguuggcacggcuauaccagucauggggcucacggaguggccguugcugccgaccucaagucuacucaggaggcaaucaacaagauaacgaaaaaucugaacuccuuaagcgaacuggaggugaagaaucuccaaagacuuucgggcgccauggaugaacugcacaacgagauuuuggagcuagacgaaaaagucgacgaucugagggcugacacaaucucuucccagaucgagcucgcggugcugcuuucaaaugaagguauuaucaacagugaggaugaacaucuguuggcacucgagcggaagcugaaaaagauguuagggcccagcgccguagacauuggcaauggauguuucgagaccaagcacaaaugcaaccagacuugccuggaucguauagcugccggcaccuuuaaugcaggggaguucucccuaccaacauuugacucucucaacaucaccgccgcuagccugaaugauggacuugacaaccauacuauuuugcuguacuauucaacagccgcaaguucccucgcgguuacgcugaugaucgcuaucuucauuguguacaugauaagccgcgauaaugucucuuguucaaucugccuuuga

SEQ ID NO: 155952 - RNA, 1755 nt, Artificial Sequence; identical to SEQ ID NO: 154559
  derived and/or modified CDS sequence (opt3) from hemagglutinin__InfluenzaB__AHL91673

SEQ ID NO: 155953 - RNA, 1755 nt, Artificial Sequence
  derived and/or modified CDS sequence (opt3) from hemagglutinin__InfluenzaB__AHL91684
augaaggccaucauugugcugcucauggucguuaccagcaacgcugacagaauaugcacaggcaucacuuccucuaauucaccccacgugguaaaaacggcaacccagggggaggugaacgucacaggagccauuccucuuacuaccacaccaaccaagagucauuucgcgaaucugaaagguacuaagacaaggggcaaauuguguccgaccugcuuaaacuguacggaucuggacguggcucuagggcggcccaugugcguuggaaucacuccuagcgccaaggcauccauucuccacgaagugcgcccagucaccucuggcuguuuucccaucaugcaugaucgaacaaagauacgucaacugccuaaucuucugagagguuacgagaaaaucagguugucgacucagaacgugauuaaugccgaaaaggcuccagggggacccuaucggcucggcaccucaggcagcugcccuaacgcaacaaguaaauccggguucuuugccaccauggcuugggccguaccacgcgacaauaacaagacggcgacuaauccgcugacaaucgagguuccccacauuuguaccaaagaagaggaucagaucacuguguggggauuccauucugacaacaagacacagaugaagaaucuguacggugauagcaacccucaaaaauuuaccuccucagcaaauggcauaacgacccacuaugucagucagauugggggauucccagaccagacagaggauggcggucucccccagagcgggagaaucgugguggacuacaugguccaaaagccuggaaaaacuggcaccauuguuuaucagaggggcaucuuacugccacagaagguguggugcgccucugggcgguccaaaguaaucaagggauuucuucccuugauuggugaagcugauugucugcacgagaaauacggcgggcuaaacaagucaaagccguauuacacaggagaacaugccaaagcaauaggcaacugcccuaucugggugaagacuccccucaaacuggcuaaugguaccaaguaccgcccuccagccaaacuucugaaggagcgaggguucuuuggcgcgauugccggauucuuggagggcgggugggaaggaaugaucgcagguuggcacggcuauacaagccauggggcucacggagucgccguggcugccgaccucaagaguacccaggaggcaauaaacaaaauuacuaagaaucugaacucuuuauccgaacuggagguuaaaaaucuccaaagacuuagcggcgccauggaugaacugcacaacgagaucuuggagcuagacgaaaagguggacgaucugagggcugacacgaucucgucucagauugagcucgcgguccugcuuuccaaugaagguaucauuaacucagaggaugaacaucuguuggcacucgagcggaaacugaagaagauguuagggcccagugccguggacauaggcaauggauguuuugagacaaaacacaagugcaaccagaccugccuggaucguaucgcugccggcacuuucaaugcaggggaauuuagccuaccaaccuucgacucccucaacauuacagccgcuucucugaaugaugacggacuugauaaccauaccaucuugcuguacuauagcacugccgcaucaagucucgcgguaacacugaugaucgcuauuuucauaguuuacaugaucucccgcgacaaugugagcuguucuauuugccuuuga

SEQ ID NO: 155954 - RNA, 1755 nt, Artificial Sequence; identical to SEQ ID NO: 154455
  derived and/or modified CDS sequence (opt3) from hemagglutinin__InfluenzaB__AHL91695

SEQ ID NO: 155955 - RNA, 1755 nt, Artificial Sequence; identical to SEQ ID NO: 154559
  derived and/or modified CDS sequence (opt3) from hemagglutinin__InfluenzaB__AHL91706

SEQ ID NO: 155956 - RNA, 1758 nt, Artificial Sequence; identical to SEQ ID NO: 155027
  derived and/or modified CDS sequence (opt3) from hemagglutinin__InfluenzaB__AHL91717

SEQ ID NO: 155957 - RNA, 1758 nt, Artificial Sequence; identical to SEQ ID NO: 155027
  derived and/or modified CDS sequence (opt3) from hemagglutinin__InfluenzaB__AHL91728

SEQ ID NO: 155958 - RNA, 1758 nt, Artificial Sequence; identical to SEQ ID NO: 155027
  derived and/or modified CDS sequence (opt3) from hemagglutinin__InfluenzaB__AHL91739

SEQ ID NO: 155959 - RNA, 1755 nt, Artificial Sequence; identical to SEQ ID NO: 154559
  derived and/or modified CDS sequence (opt3) from hemagglutinin__InfluenzaB__AHL91750

SEQ ID NO: 155960 - RNA, 1758 nt, Artificial Sequence; identical to SEQ ID NO: 155027
  derived and/or modified CDS sequence (opt3) from hemagglutinin__InfluenzaB__AHL91761

SEQ ID NO: 155961 - RNA, 1758 nt, Artificial Sequence
  derived and/or modified CDS sequence (opt3) from hemagglutinin__InfluenzaB__AHL91772
augaaggccaucauugugcugcucauggucguuaccagcaacgcugacagaauaugcacaggcaucacuuccucuaauucaccccacgugguaaaaacggcaacccagggggaagugaacgucacaggagugauuccucuuacuaccacaccaaccaagagucauuucgccaaucugaaagguacuaagacaaggggcaaauuguguccgaagugcuuaaacuguaccgaucuggacguugcgcuagggcggcccaagugcacgggaaauaucccuagcgcuaaaguguccauucuccacgaaguccgcccagugacuucuggcuguuuucccaucaugcaugaucgaaccaagauacgucaacugccuaaccuucugagagguuacgagcacaucagguugucgacacauaauguaauuaacgccgaaaaagcaccagggggacccuauaagaucggcacuucaggcagcugcccuaauauuaccaacgggaauggauucuuugccacaauggcuugggcaguuccgaaaaacgacaauaacaagaccgccacgaauagucucacuaucgaggugccauacauauguacagaaggugaggaucagauuaccgucuggggcuuccacuccgacaacgagacucagauggcuaagcuguauggggauucuaaaccccagaaguuuacaagcuccgccaacggagugaccacgcacuacgugucacaaaucggcgguuucccuaaucagaccgaagacgggggacugccacagaguggccggauugucguugauuauauggugcagaaaagcggcaagacagggacuaucaccuaccaacgcggaauccucuuaccccagaaaguauggugcgcgucugguagauccaaggugauuaaaggcucacugccucuuauaggggaggcagacuguuugcaugaaaaguauggaggccugaacaagagcaaaccauacuacacaggugagcacgccaaggcuaucgggaauugccccauuugggucaaaacuccgcuaaagcucgccaacggcaccaaauauaggccucccgcaaagcugcuuaaggagcggggauuuuucggcgcuaucgccggguuucuggaaggagguugggagggcaugauagcgggguggcauggauacacaagucacggcgcccacgguguggcaguugcugccgauuugaaaucuacccaggaagcuauuaauaagaucacuaaaaaccucaauucccugagcgaguuagaagugaagaaccugcagcgccucucgggggccauggacgagcuucauaaugagauccuggaauuggaugagaaagucgacgaccuacgagcagauacgauuucuucccaaaucgaacuggccgugcuccugucaaacgagggcauuauaaauagugaagacgagcaccuucuggcuuuggagagaaagcucaagaaaaugcugggaccaagcgcgguagaaaucggcaacggguguuucgagacaaagcauaaaugcaaucagaccugcuuagauaggauugcagccggaacuuuugacgcuggugaguucucccugccuaccuuugauucucuaaacaucacagccgcaagccucaaugacgauggccuggacaaccacaccauccuuuuguauuacucaacugccgcuaguucccuggccguuacacucaugauugcaauauucguggucuauauggugagccgggauaacgucucuuguucaaucugccuguga

SEQ ID NO: 155962 - RNA, 1758 nt, Artificial Sequence; identical to SEQ ID NO: 155961
  derived and/or modified CDS sequence (opt3) from hemagglutinin__InfluenzaB__AHL91783

SEQ ID NO: 155963 - RNA, 1758 nt, Artificial Sequence; identical to SEQ ID NO: 155961
  derived and/or modified CDS sequence (opt3) from hemagglutinin__InfluenzaB__AHL91794

SEQ ID NO: 155964 - RNA, 1758 nt, Artificial Sequence
  derived and/or modified CDS sequence (opt3) from hemagglutinin__InfluenzaB__AHL91805
augaaggccaucauugugcugcucauggucguuaccagcaacgcugacagaauaugcacaggcaucacuuccucuaauucaccccacgugguaaaaacggcaacccagggggaggugaacgucacaggagugauuccucuuacuaccacaccaaccaagagucauuucgccaaucugaaagguacuaagacaaggggcaaauuguguccgaagugcuuuaacuguaccgauuuagacguugcgcuggggcggcccaagugcacgggaaauaucccuagcgcugaaguguccauucuacacgagguccgcccagugacuucuggcuguuuccccaucaugcaugaucgaaccaaaauacgucaacucccuaaccugcuuagagguuacgaacacaucaggcugucgacacauaauguaauuaacgccgagaaggcaccagggggacccuauaaaaucggcacuucaggcagcugcccuaauguuaccaacgggaauggauuuuucgccacaauggcuugggcagugccaaagaacgacaauaacaaaaccgccacgaauaguuugacuauugaagucccguacaucuguacagagggugaggaucagauaaccguguggggcuuucacuccgacaacgaaacucagauggcuaagcucuauggggauucuaagccccagaaauucacaagcuccgccaacggagugaccacgcacuacgucucacaaauuggcgguuuuccuaaucagaccgaggacgggggacugccacagaguggccggaucguuguggauuauaugguacagaaguccggcaaaacagggacuauuaccuaccaacgcggaauccugcucccccagaagguguggugcgcgucugguagauccaaagucaucaagggcucauuaccucugauuggggaagcagacugucuucaugagaaauauggaggcuugaacaagagcaagccauacuacacaggugagcacgccaaagcuauagggaauugccccaucugggugaagacuccgcugaaacuagccaacggcaccaaguauaggccucccgcaaaacuccugaaggaacggggauucuuuggcgcuauugccggguuccuugagggagguugggaaggcaugaucgcgggguggcauggauacacaagucacggcgcccacgguguugcaguggcugccgaucugaagucuacccaggaggcuauaaauaaaauuacuaagaacuugaauagccucagcgaacuggaggucaaaaacuuacagcgccugucgggggccauggacgagcuccauaaugaaauccuugagcuggaugaaaagguggacgacuugcgagcagauacgaucucuucccaaauugagcuagccguacugcucucaaacgaaggcaucauuaauagugaggacgagcaucugcuugcucuggaaagaaaauugaagaagaugcucggaccaagcgcgguugagauaggcaacggguguuuugaaacaaaacacaagugcaaucagaccugccuggauaggaucgcagccggaacuuucgacgcuggugaguuuuccuuaccuaccuucgauucucugaacauuacagccgcaagccuaaaugacgauggccucgacaaccacaccauccugcuuuauuacucaacugccgcuaguuccuuggccgugacacugaugaucgcaauuuucgucguguauauggucagccgggauaacgugucuuguucaauaugccucuga

SEQ ID NO: 155965 - RNA, 1758 nt, Artificial Sequence; identical to SEQ ID NO: 154467
  derived and/or modified CDS sequence (opt3) from hemagglutinin__InfluenzaB__AHL91816

SEQ ID NO: 155966 - RNA, 1758 nt, Artificial Sequence; identical to SEQ ID NO: 154467
  derived and/or modified CDS sequence (opt3) from hemagglutinin__InfluenzaB__AHL91827

SEQ ID NO: 155967 - RNA, 1755 nt, Artificial Sequence; identical to SEQ ID NO: 155074
  derived and/or modified CDS sequence (opt3) from hemagglutinin__InfluenzaB__AHL91838

SEQ ID NO: 155968 - RNA, 1755 nt, Artificial Sequence
  derived and/or modified CDS sequence (opt3) from hemagglutinin__InfluenzaB__AHL91849
augaaggccaucauugugcugcucauggucguuaccagcaacgcugacagaauaugcacaggcaucacuuccucuaauucaccccacgugguaaaaacggcaacccagggggaggugaacgucacaggagugauuccucuuacuaccacaccaaccaagaguuacuucgccaaucugaaagguacuaggacacggggcaaguuguguccggauugcuuaaacuguaccgaccuggauguugcgcuagggcgccccaugugcgugggaacgacuccuagcgcuaaagccuccauccuccaugaagcacgaccagucaccucuggcuguuuucccauuaugcacgaccguacaaagaucagacaacugccuaaucuucugagggguuaugagaacauacgguugucgacucagaaugugaucgaugccgaaaacgcuccagggggacccuaccgccucggcaccucaggcagcugcccuaaugcaacaaguaaguccggguucuuugccaccauggcuugggccguaccaaaagacaacaauaagaacgcgacgaauccgcugacuguugaggugcccuauauuuguaaagaaggagaggaucagaucacagucugggguuuccauucugacaacaagacccagaugaaaaaucuguacggcgauagcaacccucaaaaguuuacuuccucagcaaacggggugacaacccacuaugugagucagauuagcggauucccagcccagacggaggacggcggucucccccagucugggagaaucgucguugauuacauggugcaaaagccuaggaaaaccggaacaauaguauaucagcggggcguguuacugccacagaaggucuggugcgcuuccggccgcucaaaagugauuaaggggagccuucccuugaucggagaagccgacugucugcaugagaaauacgguggccuaaauaagaguaaaccguacuauacuggggaacacgcaaaggcuauuggaaacugcccuaucuggguuaagaccccacucaaacuggccaauggcacaaaguaccgacccccugcgaaacuucugaaggagagagguuucuucggggccaucgcaggcuuuuuggagggaggcugggaagggaugauugcuggauggcacgguuauacuucucauggcgcccacgggguggcugucgccgcagaucucaaauccacccaggaggccauaaacaagaucacaaagaaucugaacagcuuaucggaacuggaggugaaaaaucuccaaaggcuuucuggagcuauggacgaacugcauaacgagauuuuggagcuagacgaaaagguagaugaccugcgggcggauaccaucuccucacagauagagcucgcaguucugcuuaguaaugaaggcauuaucaacagcgaggacgaacaccuguuggcccucgagcguaaacugaagaaaauguuaggucccuccgcuguggauaucgggaauggcuguuucgagacuaagcacaagugcaaccagacgugccuggaccgcauugccgcaggaacauuuaaugccggcgaauuuucucuaccaaccuuugauagccucaacaucacugcugccucacugaaugacgaugggcuugacaaccauaccauuuugcuguacuauaguacagcagcguccagccucgcugucacccugaugcuugccauauucaucguguacauggucucuagagauaacgugucauguaguauuugccuguga

SEQ ID NO: 155969 - RNA, 1755 nt, Artificial Sequence
  derived and/or modified CDS sequence (opt3) from hemagglutinin__InfluenzaB__AHL91860
augaaggccaucauugugcugcucauggucguuaccagcaacgcugacagaauaugcacaggcaucacuuccucuaauucaccccacgugguaaaaacggcaacccagggggaggugaacgucacaggagugauuccucuuacuaccacaccaaccaagaguuacuucgccaaucugaaagguacuaggacacggggcaaguuguguccggauugcuuaaacuguaccgaccuggauguugcgcuagggcgccccaugugcgugggaacgacuccuagcgcuaaagccuccauccuccaugaaguccgaccagugaccucuggcuguuuucccauuaugcacgaccguacaaagaucagacaacugccuaaucuucugagggguuaugagaacauacgguugucgacucagaauguaaucgaugcagaaaaggccccagggggacccuaccgccucggcaccucaggcagcugcccuaacgcuacaaguaaauccggguucuuugcaaccauggccugggcuguuccaaaggacaauaacaaaaaugccacgaacccgcugacuguggagauucccuauaucuguacagaaggagaggaucagauuaccgucugggguuuccauucugacaauaagacucagaugaaaaaccuguacggcgauagcaauccucaaaaguuuacauccucagcgaacggggugaccacgcacuaugugagucagaucggaggcuucccagaccagaccgaggauggugggcucccccagagcggaagaauagucguugacuacaugaugcaaaagccuggcaaaacaggcacuauuguguaucagaggggaguauuacugccacagaagguguggugcgcaucugggcgguccaaagucaucaaggguucacuucccuugauuggcgaagccgauugucugcaugagaaauacgggggacuaaacaagagcaaaccguacuauaccggcgaacacgcuaaggccaucgguaauugcccuaucugggugaagacaccccucaaacuggcaaacgggacuaaguaccgcccuccagcuaaacuucugaaggagcgaggcuuuuucggagccauugcgggcuuuuuggaagggggaugggaggguaugauagccggcuggcacggguauaccagucauggagcacacggcguugcuguggccgcugaccucaaaucuacacaggaggccaucaauaagauuaccaagaacuuaaauucccugagcgaacuggaggucaaaaaccuccaaagacuuucgggugcaauggacgaacugcauaaugagaucuuggagcuagaugaaaagguggacgaucugagggccgacacuauaucuucccagauugagcucgcuguacugcuuucaaacgaagggaucaucaauagugaggaugaacaccuguuggcgcucgagcggaaacugaagaaaauguuaggccccagcgcaguugagauuggaaacggcuguuucgaaacgaagcacaagugcaaucagacaugccuggaccguaucgccgcugggaccuuuaacgccggagaguucucccuaccaacuuuugauucucucaauauuaccgcagccagccugaacgacgauggucuugacaaucaugcuauauugcuguacuauucaacagccgcaaguucccucgcggugacccugaugcuugcuaucuucauugucuacauggugagccgcgauaacgucucuuguucaaucugccuguga

SEQ ID NO: 155970 - RNA, 1755 nt, Artificial Sequence
  derived and/or modified CDS sequence (opt3) from hemagglutinin__InfluenzaB__AHL91871
augaaggccaucauugugcugcucauggucguuaccagcaacgcugacagaauaugcacaggcaucacuuccucuaauucaccccacgugguaaaaacggcaacccagggggaggugaacgucacaggagugauuccucuuacuaccacaccaaccaagaguuacuucgccaaucugaaagguacuaggacacggggcaaguuguguccggauugcuuaaacuguaccgaccuggauguugcgcuagggcgccccaugugcgugggaacgacuccuagcgcuaaagccuccauccuccaugaaguccgaccagugaccucuggcuguuuucccauuaugcacgaccguacaaagaucagacaacugccuaaucuucugagggguuaugagaacauacgguugucgacucagaauguaaucgaugcagaaaaggccccagggggacccuaccgccucggcaccucaggcagcugcccuaacgcuacaaguaaauccggguucuuugcaaccauggccugggcuguuccaaaggacaauaacaaaaaugccacgaacccgcugacuguggagauucccuauaucuguacagaaggagaggaucagauuaccgucugggguuuccauucugacaauaagacucagaugaaaaaccuguacggcgauagcaauccucaaaaguuuacauccucagcgaacggggugaccacgcacuaugugagucagaucggaggcuucccagaccagaccgaggauggugggcucccccagagcggaagaauagucguugacuacaugaugcaaaagccuggcaaaacaggcacuauuguguaucagaggggaguauuacugccacagaagguguggugcgcaucugggcgguccaaagucaucaaggguucacuucccuugauuggcgaagccgauugucugcaugagaaauacgggggacuaaacaagagcaaaccguacuauaccggcgaacacgcuaaggccaucgguaauugcccuaucugggugaagacaccccucaaacuggcaaacgggacuaaguaccgcccuccagcuaaacuucugaaggagcgaggcuuuuucggagccauugcgggcuuuuuggaagggggaugggaggguaugauagccggcuggcacggguauaccagucauggagcacacggcguugcuguggccgcugaccucaaaucuacacaggaggccaucaauaagauuaccaagaacuuaaauucccugagcgaacuggaggucaaaaaccuccaaagacuuucgggugcaauggacgaacugcauaaugagaucuuggagcuagaugaaaagguggacgaucugagggccgacacuauaucuucccagauugagcucgcuguacugcuuucaaacgaagggaucaucaauagugaggaugaacaccuguuggcgcucgagcggaaacugaagaaaauguuaggccccagcgcaguugagauuggaaacggcuguuucgaaacgaagcacaagugcaaucagacaugccuggaccguaucgccgcugggaccuuuaacgccggagaguucucccuaccaacuuuugauucucucaauauuaccgcagccagccugaacgacgauggucuugacaaucauacaauauugcuguacuauucaaccgcugccaguucccucgcagugacucugaugcuugcgaucuucauugucuacauggugagccgcgauaacgucucuuguucaaucugccuguga

SEQ ID NO: 155971 - RNA, 1755 nt, Artificial Sequence; identical to SEQ ID NO: 154474
  derived and/or modified CDS sequence (opt3) from hemagglutinin__InfluenzaB__AHL91882

SEQ ID NO: 155972 - RNA, 1755 nt, Artificial Sequence
  derived and/or modified CDS sequence (opt3) from hemagglutinin__InfluenzaB__AHL91904
augaaggccaucauugugcugcucauggucguuaccagcaacgcugacagaauaugcacaggcaucacuuccucuaauucaccccacgugguaaaaacggcaacccagggggaggugaacgucacaggagugauuccucuuacuaccacaccaaccaagaguuacuucgccaaucugaaagguacuaggacacggggcaaguuguguccggauugcuuaaacuguaccgaccuggauguugcgcuagggcgccccaugugcgugggaacgacuccuagcgcuaaagccuccauccuccaugaaguccgaccagugaccucuggcuguuuucccauuaugcacgaccguacaaagaucagacaacuggcaaaucuucugagggguuaugagaacauacgguugucgacucagaauguaaucgaugccgaaaaggcuccugggggaccauaccgccucggcaccucaggcagcugccccaacgcaacaaguaaauccggguucuuugccaccauggcuugggccguuccuaaggacaauaacaaaaaugcgacgaacccacugacuguggaggucccguauauuuguacagaaggagaggaucagaucaccgugugggguuuccauucugacaauaagacucagaugaaaaaccuguacggcgauagcaauccccaaaaguuuacauccucagcaaacggggugaccacgcacuaugucagucagauuggaggcuucccugaccagaccgaggauggugggcucccacagagcggaagaaucguuguggacuacaugaugcaaaagcauggcaaaacaggcacuauaguauaucagaggggaguguuacugccccagaaggucuggugcgccucugggcgguccaaagugauuaaggguucacuuccuuugaucggcgaagcugauugucugcacgagaaauacgggggacuaaacaagagcaaaccauacuauaccggcgaacacgccaaggcaauugguaauugccccaucuggguuaagacaccgcucaaacuggcuaacgggacuaaguaccgcccucccgccaaacuucugaaggagcgaggcuuuuucggagcgaucgccggcuuuuuggaagggggaugggaagguaugauugcaggcuggcauggguauaccagucacggagcucauggcguggccgucgcugccgaccucaaaucuacacaggaggcaauaaauaagaucaccaagaacuuaaauucccugagcgaacuggaggugaaaaaccuccaaagacuuucgggugccauggacgaacugcacaaugagauuuuggagcuagaugaaaagguagacgaucugagggcugacacuaucucuucccagauagagcucgcgguucugcuuucaaacgaagggauuaucaauagugaggaugaacaccuguuggcacucgagcggaaacugaagaaaauguuaggcccaagcgccguggacaucggaaacggcuguuucgagacgaagcauaagugcaaucagacaugccuggaucguauugcugccgggaccuuuaacgcaggagaguucucccuaccuacuuuugacucucucaauaucaccgccgcuagccugaacgaugacggucuugauaaucacacaauuuugcuguacuauucaaccgccgcaaguucccucgcggucacucugaugcuugcuauauucaucguguacauggucagccgcgacaacgugucuuguucaauuugccuguga

SEQ ID NO: 155973 - RNA, 1755 nt, Artificial Sequence
  derived and/or modified CDS sequence (opt3) from hemagglutinin__InfluenzaB__AHL91915
augaaggccaucauugugcugcucauggucguuaccagcaacgcugacagaauaugcacaggcaucacuuccucuaauucaccccacgugguaaaaacggcaacccagggggaggugaacgucacaggagugauuccucuuacuaccacaccaaccaagaguuacuucgccaaucugaaagguacuaggacacggggcaaguuguguccggauugcuuaaacuguaccgaccuggauguugcgcuagggcgccccaugugcgugggaacgacuccuagcgcuaaagccuccauccuccaugaaguccgaccagugaccucuggcuguuuucccauuaugcacgaccguacaaagaucagacaacugccuaaucuucugagggguuaugagaacauacgguugucgacucagaauguaaucgaugcagaaaaggccccagggggacccuaccgccucggcaccucaggcagcugcccuaacgcuacaaguaaauccggguucuuugcaaccauggccugggcuguuccaaaggacaauuauaaaaacgccacgaauccgcugacuguggagguccccuacauuuguacagaaggagaggaucagaucaccgugugggguuuccauucugacaacaagacucagaugaaaaaucuguauggcgauagcaacccucaaaaguuuacauccucagcgaauggggugaccacgcacuacgucagucagauuggaggcuucccagaccagaccgaggauggugggcucccccagagcggaagaaucguuguggacuauaugaugcaaaagccuggcaaaacaggcacuauaguauaccagaggggaguguuacugccacagaaggucuggugcgcaucugggcgguccaaagugauuaaggguucacuucccuugaucggcgaagccgauugucugcaugagaaauacgggggacuaaacaagagcaaaccguauuacaccggcgaacacgcuaaggccauugguaacugcccuaucuggguuaagacaccccucaaacuggcaaaugggacuaaguaucgcccuccagcuaaacuucugaaggagcgaggcuuuuucggagccaucgcgggcuuuuuggaagggggaugggaagguaugauugccggcuggcacggguacaccagucauggagcacacggcguggcugucgccgcugaccucaaaucuacacaggaggccauaaacaagaucaccaagaaucugaacuccuuaagcgaacuggaggugaaaaaucuccaaagacuuucgggugcaauggacgaacugcauaacgagauuuuggagcuagaugaaaagguagacgaucugagggccgacacuaucucuucccagauagagcucgcuguucugcuuucaaaugaagggauuaucaacagugaggaugaacaccuguuggcgcucgagcggaaacugaagaaaauguuaggccccagcgcaguggacaucggaaauggcuguuucgagacgaagcacaagugcaaccagacaugccuggaucguauugccgcugggaccuuuaaugccggagaguucucccuaccaacuuuugacucucucaacaucaccgcagccagccugaaugaugacggucuugauaaccauacaauuuugcuguauuacucaaccgcugccaguucccucgcagucacucugaugcuugcgauauucaucguguauauggucagccgcgacaaugugucuuguucaauuugccuguga

SEQ ID NO: 155974 - RNA, 1755 nt, Artificial Sequence; identical to SEQ ID NO: 155072
  derived and/or modified CDS sequence (opt3) from hemagglutinin__InfluenzaB__AHL91926

SEQ ID NO: 155975 - RNA, 1755 nt, Artificial Sequence; identical to SEQ ID NO: 155647
  derived and/or modified CDS sequence (opt3) from hemagglutinin__InfluenzaB__AHL91937

SEQ ID NO: 155976 - RNA, 1755 nt, Artificial Sequence; identical to SEQ ID NO: 154474
  derived and/or modified CDS sequence (opt3) from hemagglutinin__InfluenzaB__AHL91948

SEQ ID NO: 155977 - RNA, 1758 nt, Artificial Sequence
  derived and/or modified CDS sequence (opt3) from hemagglutinin__InfluenzaB__AHL91959
augaaggccaucauugugcugcucauggucguuaccagcaacgcugacagaauaugcacaggcaucacuuccucuaauucaccccacgugguaaaaacggcaacccagggggaggugaacgucacaggagugauuccucuuacuaccacaccaaccaagagucauuucgccaaucugaaagguacuaagacaaggggcaaauuguguccgaagugcuuaaacuguaccgaucuggacguugcgcuagggcggcccaagugcacgggaaauaucccuagcgcugaaguguccauucuccacgagguccgcccagugacuucuggcuguuuucccaucaugcaugaucgaaccaaaauacgucaacugccuaaccuucugagagguuacgaacacaucagguugucgacacauaauguaauuaacgccgagaaggcaccagggggacccuauaaaaucggcacuucaggcagcugcccuaauguuaccaacgggaauggauucuuugccacaauggcuugggcagugccaaagaacgacaauaacaaaaccgccacgaauagucucacuauugaagucccguacaucuguacagagggugaggaucagauaaccauuuggggcuuccacuccgacaacgaaacucagauggcuaagcuguauggggauucuaagccccagaaauuuacaagcuccgccaacggagugaccacgcacuacgugucacaaaucggcgguuucccuaaucagaccgaggacgggggacugccacagaguggccggauugucguugauuauauggugcaaaagagcggcaaaacagggacuaucaccuaccagcgcggaauccucuuaccccagaagguauggugcgcgucugguagauccaaagugauuaagggcucacugccucuuauaggggaagcagacuguuugcaugagaaauauggaggccugaacaagagcaagccauacuacacaggugagcacgccaaagcuaucgggaauugccccauuugggucaagacuccgcuaaaacucgccaacggcaccaaguauaggccucccgcaaaacugcuuaaggaacggggauuuuucggcgcuaucgccggguuucuggagggagguugggaaggcaugauagcgggguggcauggauacacaagucacggcgcccacgguguggcaguugcugccgauuugaagucuacccaggaggcuauuaauaaaaucacuaagaaccucaauucccugagcgaauuagaggugaaaaaccugcagcgccucucgggggccauggacgagcuucauaaugaaauccuggaguuggaugaaaaggucgacgaccuacgagcagauacgauuucuucccaaaucgagcuggccgugcuccugucaaacgaaggcauuauaaauagugaggacgagcaccuucuggcuuuggaaagaaaacucaagaagaugcugggaccaagcgcgguagagaucggcaacggguguuucgaaacaaaacauaagugcaaucagaccugcuuagauaggauugcagccggaacuuuugacgcuggugaguucucccugccuaccuuugauucucuaaacaucacagccgccagcuucaaugacgauggccucgacaaccacaccauccugcuuuauuacucaacugcagcuaguuccuuggccguuacacugaugauugcaauauucguggucuauauggugagccgggauaacgucucuuguucaaucugccucuga

SEQ ID NO: 155978 - RNA, 1758 nt, Artificial Sequence; identical to SEQ ID NO: 154686
  derived and/or modified CDS sequence (opt3) from hemagglutinin__InfluenzaB__AHL91970

SEQ ID NO: 155979 - RNA, 1755 nt, Artificial Sequence
  derived and/or modified CDS sequence (opt3) from hemagglutinin__InfluenzaB__AHL91991
augaaggccaucauugugcugcucauggucguuaccagcaacgcugacagaauaugcacaggcaucacuuccucuaauucaccccacgugguaaaaacggcaacccagggggaggugaacgucacaggagugauuccucuuacuaccacaccaaccaagaguuacuucgccaaucugaaagguacuaggacacggggcaaguuguguccggauugcuuaaacuguaccgaccuggauguugcgcuagggcgccccaugugcgugggaacgacuccuagcgcuaaagccuccauccuccaugaaguccgaccagugaccucuggcuguuuucccauuaugcacgaccguacaaagaucagacaacuggcaaaucuucugagggguuaugagaacauacgguugucgacucagaauguaaucgaugccgaaaaggcuccugggggaccauaccgccucggcaccucaggcagcugccccaacgcaacaaauaaaaguggguucuuugccaccauggcuugggccguuccuaaggacaacaauaaaaacgcgacgaauccacugacuguggaggucccguauauuuguacagaaggagaggaucagaucaccgugugggguuuccauuccgacaacaagacucagaugaaaaaucuguacggcgauucuaacccccaaaaguuuacaagcuccgcaaacggggugaccacgcacuaugucucacagauuggaggcuucccugaccagaccgaggauggugggcucccacagaguggaagaaucguuguggacuacaugaugcaaaagcccggcaaaacaggcacuauaguauaucagcgcgggguguuacugccucagaaggucuggugcgccagcggacggucuaaagugauuaaggguucccuuccauugaucggcgaagcugauugucugcaugagaaauacgggggacuaaauaagucaaaacccuacuauaccggcgaacacgccaaggcaauugguaacugcccgaucuggguuaagacaccucucaaacuggcuaaugggacuaaguacaggcccccagccaaacuucugaaggagcgaggcuuuuucggagcgaucgccggcuuuuuggaagggggaugggaagguaugauugcaggcuggcacggguauaccagccauggagcucacggcguggccgucgcugccgaccucaaaaguacacaggaggcaauaaacaagaucaccaagaaucugaacucuuuauccgaacuggaggugaaaaaucuccaaagacuuagcggugccauggacgaacugcauaacgagauuuuggagcuagaugaaaagguagacgaucugagggcugacacuaucucgucucagauagagcucgcgguucugcuuuccaaugaagggauuaucaacucagaggaugaacaccuguuggcacucgagcggaaacugaagaaaauguuaggcccuagugccguggacaucggaaauggcuguuucgagacgaagcacaagugcaaccagacaugccuggaucguauugcugccgggaccuuuaaugcaggagaguucagccuacccacuuuugacucccucaacaucaccgccgcuucucugaaugaugacggucuugauaaccauacaauuuugcuguacuauagcaccgccgcaucaagucucgcggucacucugaugcuugcuauauucaucguguacauggucucccgcgacaacgugagcuguucuauuugccuguga

SEQ ID NO: 155980 - RNA, 1758 nt, Artificial Sequence; identical to SEQ ID NO: 154562
  derived and/or modified CDS sequence (opt3) from hemagglutinin__InfluenzaB__AHL92002

SEQ ID NO: 155981 - RNA, 1758 nt, Artificial Sequence; identical to SEQ ID NO: 154562
  derived and/or modified CDS sequence (opt3) from hemagglutinin__InfluenzaB__AHL92013

SEQ ID NO: 155982 - RNA, 1758 nt, Artificial Sequence; identical to SEQ ID NO: 154562
  derived and/or modified CDS sequence (opt3) from hemagglutinin__InfluenzaB__AHL92024

SEQ ID NO: 155983 - RNA, 1758 nt, Artificial Sequence; identical to SEQ ID NO: 154562
  derived and/or modified CDS sequence (opt3) from hemagglutinin__InfluenzaB__AHL92035

SEQ ID NO: 155984 - RNA, 1758 nt, Artificial Sequence; identical to SEQ ID NO: 154562
  derived and/or modified CDS sequence (opt3) from hemagglutinin__InfluenzaB__AHL92046

SEQ ID NO: 155985 - RNA, 1758 nt, Artificial Sequence; identical to SEQ ID NO: 154562
  derived and/or modified CDS sequence (opt3) from hemagglutinin__InfluenzaB__AHL92057

SEQ ID NO: 155986 - RNA, 1758 nt, Artificial Sequence
  derived and/or modified CDS sequence (opt3) from hemagglutinin__InfluenzaB__AHL92068
augaaggccaucauugugcugcucauggucguuaccagcaacgcugacagaauaugcacaggcaucacuuccucuaauucaccccacgugguaaaaacggcaacccagggggaggugaacgucacaggagugauuccucuuacuaccacaccaaccaagagucauuucgccaaucugaaagguacugaaacaaggggcaaguuguguccgaaaugcuuaaacuguaccgaucuggacguugcgcuagggcggcccaagugcacgggaaauaucccuagcgcucgcguguccauucuccacgagguccgaccagugacuucuggcuguuuucccaucaugcaugaucguaccaagauaagacaacugccuaaccuucugagggguuacgaacacauccgguugucgacacauaauguaauuaacgccgagaaugcaccagggggacccuauaaaaucggcacuucaggcagcugcccuaacauuaccaaugggaacggauucuuugccacaauggcuugggcaguuccaaagaaugacaacaauaaaaccgccacgaacagucucacuaucgaagugccguacauauguacagagggugaggaucagauuaccgucuggggcuuccacuccgacaacgaaacucagauggcuaagcuguauggggauucuaaaccccagaaguuuacaagcuccgccaauggagugaccacgcacuacgugucacaagucggcgguuucccuaaccagaccgaggacgggggacugccacagaguggccgcaucguuguggauuauaugguacaaaagagcggcaaaacagggacuauuaccuaccagagaggaauccucuuaccccagaagguguggugcgcgucugguagguccaaagucaucaagggcucacugccucuuauuggggaagcagacuguuugcaugagaaauauggaggccugaauaagagcaaaccauacuacacaggugagcacgccaaggcuauagggaacugccccaucugggugaagacuccgcuaaaacucgccaauggcaccaaguaucggccucccgcaaaacugcuuaaggaacgcggauuuuucggcgcuauugccggguuucuggagggagguugggaaggcaugaucgcgggguggcauggauacacaagucacggcgcccacgguguugcaguggcugccgauuugaaaucuacccaggaggcuauaaacaagauuacuaagaaucucaacucccugagcgaauuagaggucaaaaaucugcagcgacucucgggggccauggacgagcuucauaacgaaauccuggaguuggaugaaaagguggacgaccuaagagcagauacgaucucuucccaaauugagcuggccguacuccugucaaaugaaggcaucauuaacagugaggacgagcaccuucuggcuuuggaaaggaaacucaagaaaaugcugggaccaagcgcgguugagauaggcaauggguguuucgaaacaaagcauaagugcaaccagaccugcuuagaucggaucgcagccggaacuuuugacgcuggugaguucucccugccuaccuuugauucucuaaauauuacagccgcaagccucaacgacgauggccuggacaaccacaccauccuuuuguauuacucaacugccgcuaguucccuggccgugacacucaugaucgcaauuuucgucguguauauggucagccgugauaaugugucuuguucaauaugccuguga

SEQ ID NO: 155987 - RNA, 1758 nt, Artificial Sequence
  derived and/or modified CDS sequence (opt3) from hemagglutinin__InfluenzaB__AHL92079
augaaggccaucauugugcugcucauggucguuaccagcaacgcugacagaauaugcacaggcaucacuuccucuaauucaccccacgugguaaaaacggcaacccagggggaggugaacgucacaggagugauuccucuuacuaccacaccaaccaagagucauuucgccaaucugaaagguacugaaacaaggggcaaguuguguccgaaaugcuuaaacuguaccgaucuggacguugcgcuagggcggcccaagugcacgggaaauaucccuagcgcucgcguguccauucuccacgagguccgaccagugacuucuggcuguuuucccaucaugcaugaucguaccaagauaagacaacugccuaaccuucugagggguuacgaacacauccgguugucgacacauaauguaauuaacgccgagaaugcaccagggggacccuauaaaaucggcacuucaggcagcugcccuaacauuaccaaugggaacggauucuuugccacaauggcuugggcaguuccaaagaaugacaacaauaaaaccgccacgaacagucucacuaucgaagugccguacauauguacagagggugaggaucagauuaccgucuggggcuuccacuccgacaacgaaacucagauggcuaagcuguauggggauucuaaaccccagaaguuuacaagcuccgccaauggagugaccacgcacuacgugucacaaaucggcgguuucccuaaccagaccgaggacgggggacugccacagaguggccgcauugucguugauuauauggugcaaaagagcggcaaaacagggacuaucaccuaccagagaggaauccucuuaccccagaagguauggugcgcgucugguagguccaaagugauuaagggcucacugccucuuauaggggaagcagacuguuugcaugagaaauauggaggccugaauaagagcaaaccauacuacacaggugagcacgccaaggcuaucgggaacugccccauuugggucaagacuccgcuaaaacucgccaauggcaccaaguaucggccucccgcaaaacugcuuaaggaacgcggauuuuucggcgcuaucgccggguuucuggagggagguugggaaggcaugauagcgggguggcauggauacacaagucacggcgcccacgguguggcaguugcugccgauuugaaaucuacccaggaggcuauuaacaagaucacuaagaaucucaacucccugagcgaauuagaggugaaaaaucugcagcgacucucgggggccauggacgagcuucauaacgaaauccuggaguuggaugaaaaggucgacgaccuaagagcagauacgauuucuucccaaaucgagcuggccgugcuccugucaaaugaaggcauuauaaacagugaggacgagcaccuucuggcuuuggaaaggaaacucaagaaaaugcugggaccaagcgcgguagagaucggcaauggguguuucgaaacaaagcauaagugcaaccagaccugcuuagaucggauugcagccggaacuuuugacgcuggugaguucucccugccuaccuuugauucucuaaauaucacagccgcaagccucaacgacgauggccuggacaaccacaccauccuuuuguauuacucaacugccgcuaguucccuggccguuacacucaugauugcaauauucguggucuauauggugagccgugauaaugucucuuguucaaucugccuguga

SEQ ID NO: 155988 - RNA, 1758 nt, Artificial Sequence; identical to SEQ ID NO: 155987
  derived and/or modified CDS sequence (opt3) from hemagglutinin__InfluenzaB__AHL92090

SEQ ID NO: 155989 - RNA, 1758 nt, Artificial Sequence; identical to SEQ ID NO: 154562
  derived and/or modified CDS sequence (opt3) from hemagglutinin__InfluenzaB__AHL92101

SEQ ID NO: 155990 - RNA, 1755 nt, Artificial Sequence; identical to SEQ ID NO: 154615
  derived and/or modified CDS sequence (opt3) from hemagglutinin__InfluenzaB__AHL92112

SEQ ID NO: 155991 - RNA, 1758 nt, Artificial Sequence; identical to SEQ ID NO: 154562
  derived and/or modified CDS sequence (opt3) from hemagglutinin__InfluenzaB__AHL92123

SEQ ID NO: 155992 - RNA, 1758 nt, Artificial Sequence; identical to SEQ ID NO: 155987
  derived and/or modified CDS sequence (opt3) from hemagglutinin__InfluenzaB__AHL92134

SEQ ID NO: 155993 - RNA, 1758 nt, Artificial Sequence; identical to SEQ ID NO: 155987
  derived and/or modified CDS sequence (opt3) from hemagglutinin__InfluenzaB__AHL92145

SEQ ID NO: 155994 - RNA, 1758 nt, Artificial Sequence; identical to SEQ ID NO: 154562
  derived and/or modified CDS sequence (opt3) from hemagglutinin__InfluenzaB__AHL92156

SEQ ID NO: 155995 - RNA, 1758 nt, Artificial Sequence; identical to SEQ ID NO: 155987
  derived and/or modified CDS sequence (opt3) from hemagglutinin__InfluenzaB__AHL92167

SEQ ID NO: 155996 - RNA, 1758 nt, Artificial Sequence; identical to SEQ ID NO: 154562
  derived and/or modified CDS sequence (opt3) from hemagglutinin__InfluenzaB__AHL92178

SEQ ID NO: 155997 - RNA, 1758 nt, Artificial Sequence; identical to SEQ ID NO: 154562
  derived and/or modified CDS sequence (opt3) from hemagglutinin__InfluenzaB__AHL92189

SEQ ID NO: 155998 - RNA, 1755 nt, Artificial Sequence; identical to SEQ ID NO: 154615
  derived and/or modified CDS sequence (opt3) from hemagglutinin__InfluenzaB__AHL92200

SEQ ID NO: 155999 - RNA, 1758 nt, Artificial Sequence; identical to SEQ ID NO: 154562
  derived and/or modified CDS sequence (opt3) from hemagglutinin__InfluenzaB__AHL92211

SEQ ID NO: 156000 - RNA, 1758 nt, Artificial Sequence; identical to SEQ ID NO: 154562
  derived and/or modified CDS sequence (opt3) from hemagglutinin__InfluenzaB__AHL92222

SEQ ID NO: 156001 - RNA, 1755 nt, Artificial Sequence; identical to SEQ ID NO: 155877
  derived and/or modified CDS sequence (opt3) from hemagglutinin__InfluenzaB__AHL92233

SEQ ID NO: 156002 - RNA, 1758 nt, Artificial Sequence; identical to SEQ ID NO: 155987
  derived and/or modified CDS sequence (opt3) from hemagglutinin__InfluenzaB__AHL92244

SEQ ID NO: 156003 - RNA, 1758 nt, Artificial Sequence; identical to SEQ ID NO: 154562
  derived and/or modified CDS sequence (opt3) from hemagglutinin__InfluenzaB__AHL92255

SEQ ID NO: 156004 - RNA, 1758 nt, Artificial Sequence; identical to SEQ ID NO: 154562
  derived and/or modified CDS sequence (opt3) from hemagglutinin__InfluenzaB__AHL92266

SEQ ID NO: 156005 - RNA, 1758 nt, Artificial Sequence
  derived and/or modified CDS sequence (opt3) from hemagglutinin__InfluenzaB__AHL92277
augaaggccaucauugugcugcucauggucguuaccagcaacgcugacagaauaugcacaggcaucacuuccucuaauucaccccacgugguaaaaacggcaacccagggggaggugaacgucacaggagugauuccucuuacuaccacaccaaccaagagucauuucgccaaucugaaagguacugaaacaaggggcaaguuguguccgaaaugcuuaaacuguaccgaucuggacguugcgcuagggcggcccaagugcacgggaaauaucccuagcgcucgcguguccauucuccacgagguccgaccagugacuucuggcuguuuucccaucaugcaugaucguaccaagauaagacaacugccuaaccuucugagggguuacgaacacauccgguugucgacacauaauguaauuaacgccgagaaugcaccagggggacccuauaaaaucggcacuucaggcagcugcccuaacguuaccaaugggaacggauucuuugccacaauggcuugggcagugccaaagaaugacaacaauaaaaccgccacgaacagucucacuauugaagucccguacaucuguacagagggugaggaucagauaaccguguggggcuuccacuccgacaacgaaacucagauggcuaagcuguauggggauucuaaaccccagaaguuuacaagcuccgccaauggagugaccacgcacuacgucucacaaauuggcgguuucccuaaccagaccgaggacgggggacugccacagaguggccgcaucguuguggauuauaugguacaaaagagcggcaaaacagggacuauuaccuaccagagaggaauccucuuaccccagaagguguggugcgcgucugguagguccaaagucaucaagggcucacugccucuuauuggggaagcagacuguuugcaugagaaauauggaggccugaauaagagcaaaccauacuacacaggugagcacgccaaggcuauagggaacugccccaucugggugaagacuccgcuaaaacucgccaauggcaccaaguaucggccucccgcaaaacugcuuaaggaacgcggauuuuucggcgcuauugccggguuucuggagggagguugggaaggcaugaucgcgggguggcauggauacacaagucacggcgcccacgguguugcaguggcugccgauuugaaaucuacccaggaggcuauaaacaagauuacuaagaaucucaacucccugagcgaauuagaggucaaaaaucugcagcgacucucgggggccauggacgagcuucauaacgaaauccuggaguuggaugaaaagguggacgaccuaagagcagauacgaucucuucccaaauugagcuggccguacuccugucaaaugaaggcaucauuaacagugaggacgagcaccuucuggcuuuggaaaggaaacucaagaaaaugcugggaccaagcgcgguugagauaggcaauggguguuucgaaacaaagcauaagugcaaccagaccugcuuagaucggaucgcaacuggaaccuuugacgccggugaguucucccugccuacauuugauucucuaaauauuaccgcugccagccucaacgacgauggccuggacaaccacacuauccuuuuguauuacucaacagcagccaguucccuggcugugacgcucaugaucgccauuuucgucguguauauggucagccgugauaaugugucuuguucaauaugccuguga

SEQ ID NO: 156006 - RNA, 1758 nt, Artificial Sequence; identical to SEQ ID NO: 154562
  derived and/or modified CDS sequence (opt3) from hemagglutinin__InfluenzaB__AHL92288

SEQ ID NO: 156007 - RNA, 1758 nt, Artificial Sequence; identical to SEQ ID NO: 154562
  derived and/or modified CDS sequence (opt3) from hemagglutinin__InfluenzaB__AHL92299

SEQ ID NO: 156008 - RNA, 1755 nt, Artificial Sequence; identical to SEQ ID NO: 155680
  derived and/or modified CDS sequence (opt3) from hemagglutinin__InfluenzaB__AHL92310

SEQ ID NO: 156009 - RNA, 1755 nt, Artificial Sequence; identical to SEQ ID NO: 154615
  derived and/or modified CDS sequence (opt3) from hemagglutinin__InfluenzaB__AHL92321

SEQ ID NO: 156010 - RNA, 1755 nt, Artificial Sequence; identical to SEQ ID NO: 154615
  derived and/or modified CDS sequence (opt3) from hemagglutinin__InfluenzaB__AHL92332

SEQ ID NO: 156011 - RNA, 1755 nt, Artificial Sequence
  derived and/or modified CDS sequence (opt3) from hemagglutinin__InfluenzaB__AHL92354
augaaggccaucauugugcugcucauggucguuaccagcaacgcugacagaauaugcacaggcaucacuuccucuaauucaccccacgugguaaaaacggcaacccagggggaggugaacgucacaggagugauuccucuuacuaccacaccaaccaagaguuacuucgccaaucugaaagguacuaggacacggggcaaguuguguccggauugcuuaaacuguaccgaccuggauguugcgcuagggcgccccaugugcgugggaaucacgccuagcgcuaaagccuccauucuccaugaaguccgaccagugacuucuggcuguuuucccaucaugcacgaccguaccaagauaagacaacuggcaaaucuucugagggguuaugagaacauccgguugucgacacagaauguaguugaugccgaaaaggcuccugggggaccauaccgccucggcacuucaggcagcugccccaacgcaaccaguaaauccggguucuuugccacaauggcuugggccgugccuaaggacaauaacaaaaaugcgaccaacccacugacggucgaggugccguauauuuguacugaaggagaggaucagaucacagugugggguuuccauucugacaauaagacccagaugaaaaaccuguacggcgauagcaauccccaaaaguuuacuuccucagcaaacggggucacaacccacuauguuagucagauuggaggcuucccugaccagacggaggauggugggcucccacagagcggaagaaucgugguagacuacaugaugcaaaagcccggcaaaaccggcacaauaguguaucagcgcggggucuuacugccucagaagguguggugcgccucuggacgguccaaaguuauuaaggguucacuuccauugaucggcgaagcugauugucugcaugagaaauacgggggacuaaacaagagcaaacccuacuauacuggcgaacacgccaaggcaauugguaauugcccgaucugggugaagaccccucucaaacuggcuaacgggacaaaguacaggcccccagccaaacuucugaaggagcgaggcuuuuucggagcgaucgccggcuuuuuggaagggggaugggaagguaugauugcaggcuggcacggguauacuucccauggagcucacggcgucgccguggcugccgaccucaaaucuacccaggaggcaauaaauaagaucacaaagaaccugaauaguuuaagcgaacuggagguuaaaaaccuccaaagacuuucgggugccauggacgaacugcauaaugagauuuuggagcuagaugaaaagguagacgaucugagggcugacaccaucucuucccagauagagcucgcggugcugcuuucaaacgaagggauuaucaauagugaggaugaacaccuguuggcacucgagcggaaacugaagaaaauguuaggcccuagcgccgucgacaucggaaacggcuguuucgagacuaagcacaagugcaaucagacgugccuggaucguauugcugccgggacauuuaacgcaggagaguucucccuacccaccuuugacucucucaauaucacugccgcuagccugaacgaugacggucuugauaaucauaccauuuugcuguacuauucaacagccgcaaguucccucgcggugacccugaugcuugcuauauucaucgucuacauggugagccgcgacaacguuucuuguucaauuugccuguga

SEQ ID NO: 156012 - RNA, 1755 nt, Artificial Sequence; identical to SEQ ID NO: 156011
  derived and/or modified CDS sequence (opt3) from hemagglutinin__InfluenzaB__AHL92365

SEQ ID NO: 156013 - RNA, 1755 nt, Artificial Sequence; identical to SEQ ID NO: 154868
  derived and/or modified CDS sequence (opt3) from hemagglutinin__InfluenzaB__AHL92376

SEQ ID NO: 156014 - RNA, 1755 nt, Artificial Sequence; identical to SEQ ID NO: 154868
  derived and/or modified CDS sequence (opt3) from hemagglutinin__InfluenzaB__AHL92387

SEQ ID NO: 156015 - RNA, 1755 nt, Artificial Sequence; identical to SEQ ID NO: 154868
  derived and/or modified CDS sequence (opt3) from hemagglutinin__InfluenzaB__AHL92398

SEQ ID NO: 156016 - RNA, 1755 nt, Artificial Sequence; identical to SEQ ID NO: 154868
  derived and/or modified CDS sequence (opt3) from hemagglutinin__InfluenzaB__AHL92409

SEQ ID NO: 156017 - RNA, 1755 nt, Artificial Sequence; identical to SEQ ID NO: 154868
  derived and/or modified CDS sequence (opt3) from hemagglutinin__InfluenzaB__AHL92420

SEQ ID NO: 156018 - RNA, 1755 nt, Artificial Sequence; identical to SEQ ID NO: 154615
  derived and/or modified CDS sequence (opt3) from hemagglutinin__InfluenzaB__AHL92431

SEQ ID NO: 156019 - RNA, 1755 nt, Artificial Sequence; identical to SEQ ID NO: 154868
  derived and/or modified CDS sequence (opt3) from hemagglutinin__InfluenzaB__AHL92442

SEQ ID NO: 156020 - RNA, 1755 nt, Artificial Sequence; identical to SEQ ID NO: 154868
  derived and/or modified CDS sequence (opt3) from hemagglutinin__InfluenzaB__AHL92453

SEQ ID NO: 156021 - RNA, 1755 nt, Artificial Sequence; identical to SEQ ID NO: 154868
  derived and/or modified CDS sequence (opt3) from hemagglutinin__InfluenzaB__AHL92464

SEQ ID NO: 156022 - RNA, 1755 nt, Artificial Sequence
  derived and/or modified CDS sequence (opt3) from hemagglutinin__InfluenzaB__AHL92475
augaaggccaucauugugcugcucauggucguuaccagcaacgcugacagaauaugcacaggcaucacuuccucuaauucaccccacgugguaaaaacggcaacccagggggaagugaacgucacaggagugauuccucuuacuaccacaccaaccaagaguuacuucgccaaucugaaagguacuaggacacggggcaaguuguguccggauugcuuaaacuguaccgaccuggauguugcgcuagggcgccccaugugcgugggaacgacuccuagcgcuaaagccuccauccuccaugaaguccgaccagugaccucuggcuguuuucccauuaugcacgaccguacaaagaucagacaacugccuaaucuucugagggguuaugagaacauacgguugucgacucagaauguaaucgaugcagaaaaggccccagggggacccuaccgccucggcaccucaggcagcugcccuaacgcuacaaguaaaauuggguucuuugcaaccauggccugggcuguuccaaaggacaauuauaaaaacgccacgaauccgcugacuguggagguccccuacaucuguacagaaggagaggaucagauuaccgugugggguuuccauuccgacaacaagacucagaugaaaaaucuguauggcgauucuaacccucaaaaguuuacaagcuccgcgaauggggugaccacgcacuacgucucacagaucggagacuucccagaucagaccgaggacggcggucucccccagagugggagaauaguuguggauuauaugaugcaaaagccuggaaaaacaggcacuauuguauaccagaggggcguguuacugccacagaaggucuggugcgcaagcgggcggucuaaagugaucaagggaucccuucccuugauuggugaagccgacugucugcaugagaaauacggcgggcuaaacaagucaaaaccguauuacaccggagaacacgcuaaggccaucggcaacugcccuaucuggguuaagacaccccucaaacuggcaaaugguacuaaguaucgcccuccagcuaaacuucugaaggagcgaggguuuuucggcgccauugcgggauuuuuggagggcgggugggaaggaaugauagccgguuggcacggcuacaccagccauggggcacacggaguggcugucgccgcugaccucaaaaguacacaggaggccaucaacaagauuaccaagaaucugaacucuuuauccgaacuggaggugaaaaaucuccaaagacuuagcggcgcaauggaugaacugcauaacgagaucuuggagcuagacgaaaagguagaugaccugagggccgauacuauaucgucucagauugagcucgcuguucugcuuuccaaugaagguaucaucaacucagaggacgaacaccuguuggcgcucgagcggaaacugaagaaaauguuagggcccagugcaguggauauuggcaauggauguuucgagacgaagcacaagugcaaccaggccugccuggaccguaucgcugccggcacauuuaaugcaggggaguucagccuaccaaccuuugauucccucaacauuacugccgcuucucugaaugacgauggacuugacaaccauaccauauugcuguauuacagcacagccgcaucaagucucgcggucacccugaugcuugcuaucuucauuguguauauggucucccgcgacaaugugagcuguucuaucugccuguga

SEQ ID NO: 156023 - RNA, 1755 nt, Artificial Sequence; identical to SEQ ID NO: 154615
  derived and/or modified CDS sequence (opt3) from hemagglutinin__InfluenzaB__AHL92486

SEQ ID NO: 156024 - RNA, 1755 nt, Artificial Sequence; identical to SEQ ID NO: 154868
  derived and/or modified CDS sequence (opt3) from hemagglutinin__InfluenzaB__AHL92497

SEQ ID NO: 156025 - RNA, 1755 nt, Artificial Sequence; identical to SEQ ID NO: 154868
  derived and/or modified CDS sequence (opt3) from hemagglutinin__InfluenzaB__AHL92508

SEQ ID NO: 156026 - RNA, 1755 nt, Artificial Sequence; identical to SEQ ID NO: 154868
  derived and/or modified CDS sequence (opt3) from hemagglutinin__InfluenzaB__AHL92519

SEQ ID NO: 156027 - RNA, 1755 nt, Artificial Sequence; identical to SEQ ID NO: 154868
  derived and/or modified CDS sequence (opt3) from hemagglutinin__InfluenzaB__AHL92530

SEQ ID NO: 156028 - RNA, 1755 nt, Artificial Sequence; identical to SEQ ID NO: 154615
  derived and/or modified CDS sequence (opt3) from hemagglutinin__InfluenzaB__AHL92541

SEQ ID NO: 156029 - RNA, 1752 nt, Artificial Sequence
  derived and/or modified CDS sequence (opt3) from hemagglutinin__InfluenzaB__AHL92563
augaaggccaucauugugcugcucauggucguuaccagcaacgcugacagaauaugcacaggcaucacuuccucuaauucaccccacgugguaaaaacggcaacccagggggaagugaacgucacaggagugauuccucuuacuaccacaccaaagaaaaguuacuucgccaaucugaaggguaccaggacucggggcaaauuguguccggauugcuuaaacuguacagaccuggauguugcgcuagggcgccccaugugcgugggaaccacgccuagcgcuaaggccuccauccuccaugaaguccgaccagugacuucuggcuguuuucccauuaugcacgaccguaccaagaucagacaacugccuaaucuucugagggguuaugagaacauacgguugucgacacagaauguaaucgaugcagaaaaagccccagggggacccuaccgccucggcacuucaggcagcugcccuaacgcuaccaguaagauuggguucuuugcaacaauggccugggcuguuccaaaagacaauuauaagaacgccaccaauccgcugacgguggagguccccuacaucuguacugaaggagaggaucagauuacagugugggguuuccauuccgacaacaaaacccagaugaagaaucuguauggcgauucuaacccucaaaaguuuacuagcuccgcgaauggggugacaacccacuacgucucacagaucggagacuucccagaucagacggaggacggcggucucccccagagugggagaauaguuguggauuauaugaugcaaaaaccuggaaagaccggcacaauuguauaccagaggggcguguuacugccacagaaagucuggugcgcaagcgggcggucuaaggugaucaaaggaucccuucccuugauuggugaagccgacugucugcaugagaaguacggcgggcuaaacaaaucaaagccguauuacacuggagaacacgcuaaggccaucggcaacugcccuaucuggguuaaaaccccucucaagcuggcaaaugguacaaaauaucgcccacccgcuaaacuucugaaagagcgaggguuuuucggcgccauugcgggauuuuuggagggcgggugggaaggaaugauagccgguuggcacggcuacacuagccauggggcacacggaguggcugucgccgcugaccucaagaguacccaggaggccaucaacaagauuacaaagaaucugaacucuuuauccgaacuggaggugaagaaucuccaaagacuuagcggcgcaauggaugaacugcauaacgagaucuuggagcuagacgaaaaaguagaugaccugagggccgauaccauaucgucucagauugagcucgcuguucugcuuuccaaugaagguaucaucaacucagaggacgaacaccuguuggcgcucgagcggaagcugaaaaagauguuagggcccagugcaguggauauuggcaauggauguuucgagacuaagcacaaaugcaaccagacgugccuggaccguaucgccgcuggcacauuuaaugccggggaguucagccuaccaaccuuugauucccucaacauuacugcagccucucugaaugacggacuugauaaccauaccauauugcuguauuacagcacagcugccucaagucucgcagucacccugaugcuugcgaucuucauuguguauauggucucccgcgacaaugugagcuguucuaucugccuguga

SEQ ID NO: 156030 - RNA, 1755 nt, Artificial Sequence; identical to SEQ ID NO: 154868
  derived and/or modified CDS sequence (opt3) from hemagglutinin__InfluenzaB__AHL92574

SEQ ID NO: 156031 - RNA, 1755 nt, Artificial Sequence
  derived and/or modified CDS sequence (opt3) from hemagglutinin__InfluenzaB__AHL92585
augaaggccaucauugugcugcucauggucguuaccagcaacgcugacagaauaugcacaggcaucacuuccucuaauucaccccacgugguaaaaacggcaacccagggggaggugaacgucacaggagugauuccucuuacuaccacaccaaccaagaguuacuucgccaaucugaaagguacuaggacacggggcaaguuguguccggauugcuuaaacuguaccgaccuggauguugcgcuagggcgccccaugugcgugggagcuacgccuagcgccaaagcauccauccuccaugaaguccgaccagugacuucuggcuguuuucccauuaugcacgaccguaccaagaucagacaacugccuaaucuucugagggguuaugagaacauacgguugucgacacagaauguaaucgaugccgaaaaggcuccagggggacccuaccgccucggcacuucaggcagcugcccuaacgcaaccaguaaauccggguucuuugccacaauggcuugggccguuccaaaggacaauaacaaaaaugcgaccaacccgcugacgguggagguccccuauauuuguacugaaggagaggaucagaucacagugugggguuuccauucugacaauaagacccagaugaaaaaccuguacggcgauagcaauccucaaaaguuuacuuccucagcaaacggggugacaacccacuaugucagucagauuggcagcuucccagaccagacggaggauggaggucucccccagucugggagaaucguuguggacuacaugaugcaaaagccuggaaaaaccggcacaauaguauaucagaggggcguguuacugccacagaaggucuggugcgccuccgggcggucaaaagugauuaagggaagccuucccuugaucggugaagcugauugucugcaugagaaauacggcgggcuaaacaagaguaaaccguacuauacuggagaacacgccaaggcaauuggcaauugcccuaucuggguuaagaccccucucaaacuggcuaacgguacaaaguaccgcccacccgccaaacuucugaaggagcgaggguuuuucggcgcgaucgccggauuuuuggagggcgggugggaaggaaugauugcagguuggcacggcuauacuucucauggggcucacggaguggccgucgcugccgaccucaaauccacccaggaggcaauaaauaagaucacaaagaaccugaauagcuuaucggaacuggaggugaaaaaccuccaaagacuuucuggcgccauggacgaacugcauaaugagauuuuggagcuagaugaaaagguagacgaucugagggcugacaccaucuccucacagauagagcucgcgguucugcuuaguaacgaagguauuaucaauagcgaggaugaacaccuguuggcacucgagcggaaacugaagaaaauguuagggcccuccgccguggagaucggcaacggauguuucgaaacuaagcacaagugcaaucagacgugccuggaccguauugcugccggcacauuuaacgcaggggaguucucucuaccaaccuuugauagccucaauaucacugccgcuucacugaacgacgauggacuugacaaucauaccauuuugcuguacuauaguacagccgcauccagccucgcggucacccugaugcuugcuauauucaucguguacauggucucucgcgauaacgugucauguaguauuugccuguga

SEQ ID NO: 156032 - RNA, 1755 nt, Artificial Sequence; identical to SEQ ID NO: 154868
  derived and/or modified CDS sequence (opt3) from hemagglutinin__InfluenzaB__AHL92596

SEQ ID NO: 156033 - RNA, 1755 nt, Artificial Sequence; identical to SEQ ID NO: 154615
  derived and/or modified CDS sequence (opt3) from hemagglutinin__InfluenzaB__AHL92607

SEQ ID NO: 156034 - RNA, 1755 nt, Artificial Sequence
  derived and/or modified CDS sequence (opt3) from hemagglutinin__InfluenzaB__AHL92629
augaaggccaucauugugcugcucauggucguuaccagcaacgcugacagaauaugcacaggcaucacuuccucuaauucaccccacgugguaaaaacggcaacccagggggaggugaacgucacaggagugauuccucuuacuaccacaccagaaaagaguuacuucgccaaucugaaagguaccaggacucggggcaaguuguguccggauugcuuaaacuguacagaccuggauguugcgcuagggcgccccaugugcgugggaaccacgccuagcgcuaaagccuccauccuccaugagguccgaccagugacuucuggcuguuuucccauuaugcacgaccguaccaagaucagacaacugccuaaucuucugagggguuaugaaaacauacgguugucgacacagaauguaaucgaugcagagaaggccccagggggacccuaccgccucggcacuucaggcagcugcccuaacgcuaccaguaaaauuggguucuuugcaacaauggccugggcuguuccaaaggacaauuauaaaaacgccaccaauccgcugacgguggaaguccccuacaucuguacugagggagaggaucagauuacagugugggguuuccauuccgacaacaagacccagaugaaaaaucuguauggcgauucuaacccucaaaaguuuacuagcuccgcgaauggggugacaacccacuacgucucacagaucggagacuucccagaucagacggaagacggcggucucccccagagugggagaauaguuguggauuauaugaugcaaaagccuggaaaaaccggcacaauuguauaccagaggggcguguuacugccacagaaggucuggugcgcaagcgggcggucuaaagugaucaagggaucccuucccuugauuggugaggccgacugucugcaugaaaaauacggcgggcuaaacaagucaaaaccguauuacacuggagagcacgcuaaggccaucggcaacugcccuaucuggguuaagaccccucucaaacuggcaaaugguacaaaguaucgcccacccgcuaaacuucugaaggagcgaggguuuuucggcgccauugcgggauuuuuggaaggcgggugggagggaaugauagccgguuggcacggcuacacuagccauggggcacacggaguggcugucgccgcugaccucaaaaguacccaggaagccaucaacaagauuacaaagaaucugaacucuuuauccgagcuggaagugaaaaaucuccaaagacuuagcggcgcaauggaugagcugcauaacgagaucuuggaacuagacgagaagguagaugaccugagggccgauaccauaucgucucagauugaacucgcuguucugcuuuccaaugaggguaucaucaacucagaagacgagcaccuguuggcgcucgagcggaaacugaagaaaauguuagggcccagugcaguggauauuggcaauggauguuucgaaacuaagcacaagugcaaccagacgugccuggaccguaucgccgcuggcacauuuaaugccggggaguucagccuaccaaccuuugauucccucaacauuacugcagccucucugaaugacgauggacuugacaaccauaccauauugcuguauuacagcacagcugccucaagucucgcagucacccugaugcuugcgaucuucauuguguauauggucucccgcgacaaugugagcuguucuaucugccuguga

SEQ ID NO: 156035 - RNA, 1755 nt, Artificial Sequence; identical to SEQ ID NO: 154615
  derived and/or modified CDS sequence (opt3) from hemagglutinin__InfluenzaB__AHL92640

SEQ ID NO: 156036 - RNA, 1755 nt, Artificial Sequence; identical to SEQ ID NO: 154615
  derived and/or modified CDS sequence (opt3) from hemagglutinin__InfluenzaB__AHL92651

SEQ ID NO: 156037 - RNA, 1755 nt, Artificial Sequence
  derived and/or modified CDS sequence (opt3) from hemagglutinin__InfluenzaB__AHL92684
augaaggccaucauugugcugcucauggucguuaccagcaacgcugacagaauaugcacaggcaucacuuccucuaauucaccccacgugguaaaaacggcaacccagggggaggugaacgucacaggagugauuccucuuacuaccacaccaaccaagaguuacuucgccaaucugaaagguacuaggacacggggcaaguuguguccggauugcuuaaacuguaccgaccuggauguugcgcuagggcgccccaugugcgugggaacgacuccuagcgcuaaagccuccauccuccaugaaguccgaccagugaccucuggcuguuuucccauuaugcacgaccguacaaagaucagacaacugccuaaucuucugagggguuaugagaacauacgguugucgacucagaauguaaucgaugcagaaaaggccccagggggacccuaccgccucggcaccucaggcagcugcccuaacgcuacaaguaaauccggguucuuugcaaccauggccugggcuguuccaaaggacaauaacaaaaaugccacgaacccgcugacuguggagguccccuauauuuguacagaaggagaggaucagaucaccgugugggguuuccauucugacaauaagacucagaugaaaaaccuguacggcgauagcaauccucaaaaguuuacauccucagcgaacggggugaccacgcacuaugucagucagauuggcagcuucccagaccagaccgaggauggaggucucccccagucugggagaaucguuguggacuacaugaugcaaaagccuggaaaaacaggcacuauaguauaucagaggggcguguuacugccacagaaggucuggugcgcauccgggcggucaaaagugauuaagggaagccuucccuugaucggugaagccgauugucugcaugagaaauacggcgggcuaaacaagaguaaaccguacuauaccggagaacacgcuaaggccauuggcaauugcccuaucuggguuaagacaccccucaaacuggcaaacgguacuaaguaccgcccuccagcuaaacuucugaaggagcgaggguuuuucggcgccaucgcgggauuuuuggagggcgggugggaaggaaugauugccgguuggcacggcuauaccucucauggggcacacggaguggcugucgccgcugaccucaaauccacacaggaggccauaaauaagaucaccaagaaccugaauagcuuaucggaacuggaggugaaaaaccuccaaagacuuucuggcgcaauggacgaacugcauaaugagauuuuggagcuagaugaaaagguagacgaucugagggccgacacuaucuccucacagauagagcucgcuguucugcuuaguaacgaagguauuaucaauagcgaggaugaacaccuguuggcgcucgagcggaaacugaagaaaauguuagggcccuccgcaguggagaucggcaacggauguuucgaaacgaagcacaagugcaaucagacaugccuggaccguauugccgcuggcaccuuuaacgccggggaguucucucuaccaacuuuugauagccucaauaucaccgcagccucacugaacgacgauggacuugacaaucauauuauauugcuguacuauaguacagcugccuccagccucgcagucacccugaugcuugcgaucuucauuguguacauggucucucgcgauaacgugucauguaguaucugccuguga

SEQ ID NO: 156038 - RNA, 1755 nt, Artificial Sequence; identical to SEQ ID NO: 154868
  derived and/or modified CDS sequence (opt3) from hemagglutinin__InfluenzaB__AHL92695

SEQ ID NO: 156039 - RNA, 1755 nt, Artificial Sequence; identical to SEQ ID NO: 154868
  derived and/or modified CDS sequence (opt3) from hemagglutinin__InfluenzaB__AHL92706

SEQ ID NO: 156040 - RNA, 1755 nt, Artificial Sequence
  derived and/or modified CDS sequence (opt3) from hemagglutinin__InfluenzaB__AHL92728
augaaggccaucauugugcugcucauggucguuaccagcaacgcugacagaauaugcacaggcaucacuuccucuaauucaccccacgugguaaaaacggcaacccagggggaggugaacgucacaggagugauuccucuuacuaccacaccaaccaagaguuacuucgccaaucugaaagguacuaggacacggggcaaguuguguccggauugcuuaaacuguaccgaccuggauguugcgcuagggcgccccaugugcgugggaacgacuccuagcgcuaaagccuccauccuccaugaaguccgaccagugaccucuggcuguuuucccauuaugcacgaccguacaaagaucagacaacugccuaaucuucugagggguuaugagaacauacgguugucgacucagaauguaaucgaugcagaaaaggccccagggggacccuaccgccucggcaccucaggcagcugcccuaacgcuacaaguaaaauuggguucuuugcaaccauggccugggcuguuccaaaggacaauuauaaaaacgccacgaauccgcugacuguggagguccccuacaucuguacagaaggagaggaucagauuaccgugugggguuuccauuccgacaacaagacucagaugaaaaaucuguauggcgauucuaacccucaaaaguuuacaagcuccgcgaauggggugaccacgcacuacgucucacagaucggagacuucccagaucagaccgaggacggcggucucccccagagugggagaauaguuguggauuauaugaugcaaaagccuggaaaaacaggcacuauuguauaccagaggggcguguuacugccacagaaggucuggugcgcaagcgggcggucuaaagugaucaagggaucccuucccuugauuggugaagccgacugucugcaugagaaauacggcgggcuaaacaagucaaaaccguauuacaccggaaagcacgcuaaggccaucggcaacugcccuaucuggguuaaaacaccccucaagcuggcaaaugguacuaaauaucgcccuccagcuaaacuucugaaggaacgaggguuuuucggcgccauugcgggauuuuuggagggcgggugggagggaaugauagccgguuggcacggcuacaccagccauggggcacacggaguggcugucgccgcugaccucaagaguacacaggaagccaucaacaagauuaccaaaaaucugaacucuuuauccgagcuggaagugaagaaucuccaaagacuuagcggcgcaauggaugagcugcauaacgaaaucauagaguuggacgagaaaguagaugaccuaagggccgauacuauuucgucucagaucgaacuggcuguucuccuguccaaugaggguaucauuaacucagaagacgagcaccuucuggcguuggaacggaagcucaaaaagaugcuggggcccagugcaguggauaucggcaauggauguuucgagacgaagcacaaaugcaaccagacaugcuuagaccguauugccgcuggcaccuuuaaugccggggaguucagccugccaacuuuugauucccuaaacauaaccgcagccucucucaaugacgauggacuggacaaccauacaauccuuuuguauuacagcaccgcugccucaagucuggcagucacucucaugcuggcgauuuucaucguguauauggucucccgcgacaaugugagcuguucuaucugccuuuga

SEQ ID NO: 156041 - RNA, 1755 nt, Artificial Sequence; identical to SEQ ID NO: 156040
  derived and/or modified CDS sequence (opt3) from hemagglutinin__InfluenzaB__AHL92739

SEQ ID NO: 156042 - RNA, 1755 nt, Artificial Sequence; identical to SEQ ID NO: 156040
  derived and/or modified CDS sequence (opt3) from hemagglutinin__InfluenzaB__AHL92750

SEQ ID NO: 156043 - RNA, 1755 nt, Artificial Sequence; identical to SEQ ID NO: 154868
  derived and/or modified CDS sequence (opt3) from hemagglutinin__InfluenzaB__AHL92761

SEQ ID NO: 156044 - RNA, 1755 nt, Artificial Sequence
  derived and/or modified CDS sequence (opt3) from hemagglutinin__InfluenzaB__AHL92772
augaaggccaucauugugcugcucauggucguuaccagcaacgcugacagaauaugcacaggcaucacuuccucuaauucaccccacgugguaaaaacggcaacccagggggaagugaacgucacaggagugauuccucuuacuaccacaccaaccaagaguuacuucgccaaucugaaagguacuaggacacggggcaaguuguguccggauugcuuaaacuguaccgaccuggauguugcgcuagggcgccccaugugcaugggaacgacuccuagcgcuaaagccuccauccuccaugaagugcgaccagucaccucuggcuguuuucccauuaugcacgaccguacaaagaucagacaacugccuaaucuucugagggguuaugagaacauacgguugucgacucagaaugugaucgaugcagaaaaggccccagggggacccuaccgccucggcaccucaggcagcugcccuaacgcuacaaguaaaauuggguucuuugcaaccauggccugggcuguaccaaaggacaauuauaaaaacgccacgaauccgcugacuguugaggugcccuacaucuguacagaaggagaggaucagauuaccgucugggguuuccauuccgacaacaagacucagaugaaaaaucuguauggcgauucuaacccucaaaaguuuacaagcuccgcgaauggggugaccacgcacuacgugucacagaucggagacuucccagaucagaccgaggacggcggucucccccagagugggagaauagucguugauuauaugaugcaaaagccuggaaaaacaggcacuauuguguaccagaggggcguauuacugccacagaagguguggugcgcaagcgggcggucuaaagucaucaagggaucccuucccuugauuggugaagccgacugucugcaugagaaauacggcgggcuaaacaagucaaaaccguauuacaccggagaacacgcuaaggccaucggcaacugcccuaucugggugaagacaccccucaaacuggcaaaugguacuaaguaucgcccuccagcuaaacuucugaaggagcgaggguuuuucggcgccauugcgggauuuuuggagggcgggugggaaggaaugauagccgguuggcacggcuacaccagccauggggcacacggaguugcuguggccgcugaccucaaaaguacacaggaggccaucaacaagauuaccaagaaucugaacucuuuauccgaacuggaggucaaaaaucuccaaagacuuagcggcgcaauggaugaacugcauaacgagaucuuggagcuagacgaaaagguggaugaccugagggccgauacuauaucgucucagauugagcucgcuguacugcuuuccaaugaagguaucaucaacucagaggacgaacaccuguuggcgcucgagcggaaacugaagaaaauguuagggcccagugcaguugauauuggcaauggauguuucgagacgaagcacaagugcaaccagacaugccuggaccguaucgccgcuggcaccuuuaaugccggggaguucagccuaccaacuuuugauucccucaacauuaccgcagccucucugaaugacgauggacuugacaaccauacaauauugcuguauuacagcaccgcugccucaagucucgcagugacucugaugcuugcgaucuucauugucuauauggugucccgcgacaaugucagcuguucuaucugccuguga

SEQ ID NO: 156045 - RNA, 1755 nt, Artificial Sequence; identical to SEQ ID NO: 154868
  derived and/or modified CDS sequence (opt3) from hemagglutinin__InfluenzaB__AHL92794

SEQ ID NO: 156046 - RNA, 1755 nt, Artificial Sequence; identical to SEQ ID NO: 154868
  derived and/or modified CDS sequence (opt3) from hemagglutinin__InfluenzaB__AHL92805

SEQ ID NO: 156047 - RNA, 1755 nt, Artificial Sequence; identical to SEQ ID NO: 154868
  derived and/or modified CDS sequence (opt3) from hemagglutinin__InfluenzaB__AHL92816

SEQ ID NO: 156048 - RNA, 1755 nt, Artificial Sequence
  derived and/or modified CDS sequence (opt3) from hemagglutinin__InfluenzaB__AHL92827
augaaggccaucauugugcugcucauggucguuaccagcaacgcugacagaauaugcacaggcaucacuuccucuaauucaccccacgugguaaaaacggcaacccagggggaagugaacgucacaggagugauuccucuuacuaccacaccaaccaagaguuacuucgccaaucugaaagguacuaggacacggggcaaguuguguccggauugcuuaaacuguaccgaccuggauguugcgcuagggcgccccaugugcgugggaacgacuccuagcgcuaaagccuccauccuccaugaaguccgaccagugaccucuggcuguuuucccauuaugcacgaccguacaaagaucagacaacugccuaaucuucugagggguuaugagaacauacgguugucgacucagaauguaaucgaugcagaaaaggccccagggggacccuaccgccucggcaccucaggcagcugcccuaacgcuacaaguaaaauuggguucuuugcaaccauggccugggcuguuccaaaggacaauuauaaaaacgccacgaauccgcugacuguggagguccccuacaucuguacagaaggagaggaucagauuaccgugugggguuuccauuccgacaacaagacucagaugaaaaaucuguauggcgauucuaacccucaaaaguuuacaagcuccgcgaauggggugaccacgcacuacgucucacagaucggagacuucccagaucagaccgaggacggcggucucccccagagugggagaauaguuguggauuauaugaugcaaaagccuggaaaaacaggcacuauuguauaccagaggggcguguuacugccacagaaggucuggugcgcaagcgggcggucuaaagugaucaagggaucccuucccuugauuggugaagccgacugucugcaugagaaauacggcgggcuaaacaagucaaaaccguauuacaccggagaacacgcuaaggccaucggcaacugcccuaucuggguuaagacaccccucaaacuggcaaaugguacuaaguaucgcccuccagcuaaacuucugaaggagcgaggguuuuucggcgccauugcgggauuuuuggagggcgggugggaaggaaugauagccgguuggcacggcuacaccagccauggggcacacggaguggcugucgccgcugaccucaaaaguacacaggaggccaucaacaagauuaccaagaaucugaacucuuuauccgaacuggaggugaaaaaucuccaaagacuuagcggcgcaauggaugaacugcauaacgagaucuuggagcuagacgaaaagguagaugaccugagggccgauacuauaucgucucagauugagcucgcuguucugcuuuccaaugaagguaucaucaacucagaggacgaacaccuguuggcgcucgagcggaaacugaagaaaauguuagggcccagugcaguggauauuggcaauggauguuucgagacgaagcacaagugcaaccagacaugccuggaccguaucgccgcuggcaccuuuaaugccggggaguucagccuaccaacuuuugauucccucaacauuaccgcagccucucugaaugacgauggacuugacaaccauacaauauugcuguauuacagcaccgcugccucaagucucgcagucacucugaugcuugcgaucuucguggucuauauggugucccgcgacaauguuagcuguucuauuugccuguga

SEQ ID NO: 156049 - RNA, 1755 nt, Artificial Sequence; identical to SEQ ID NO: 154868
  derived and/or modified CDS sequence (opt3) from hemagglutinin__InfluenzaB__AHL92838

SEQ ID NO: 156050 - RNA, 1755 nt, Artificial Sequence; identical to SEQ ID NO: 154868
  derived and/or modified CDS sequence (opt3) from hemagglutinin__InfluenzaB__AHL92849

SEQ ID NO: 156051 - RNA, 1755 nt, Artificial Sequence; identical to SEQ ID NO: 154868
  derived and/or modified CDS sequence (opt3) from hemagglutinin__InfluenzaB__AHL92860

SEQ ID NO: 156052 - RNA, 1758 nt, Artificial Sequence; identical to SEQ ID NO: 154686
  derived and/or modified CDS sequence (opt3) from hemagglutinin__InfluenzaB__AHL92871

SEQ ID NO: 156053 - RNA, 1755 nt, Artificial Sequence; identical to SEQ ID NO: 154474
  derived and/or modified CDS sequence (opt3) from hemagglutinin__InfluenzaB__AHL92882

SEQ ID NO: 156054 - RNA, 1758 nt, Artificial Sequence
  derived and/or modified CDS sequence (opt3) from hemagglutinin__InfluenzaB__AHL92893
augaaggccaucauugugcugcucauggucguuaccagcaacgcugacagaauaugcacaggcaucacuuccucuaauucaccccacgugguaaaaacggcaacccagggggaggugaacgucacaggagugauuccucuuacuaccacaccaaccaagagucauuucgccaaucugaaagguacuaagacaaggggcaaauuguguccgaagugcuuaaacuguaccgaucuggacguugcgcuagggcggcccaagugcacgggaaauaucccuagcgcugaaguguccauucuccacgagguccgcccagugacuucuggcuguuuucccaucaugcaugaucgaaccaaaauacgucaacugccuaaccuucugagagguuacgaacacaucagguugucgacacauaauguaauuaacgccgagaaggcaccagggggacccuauaaaaucggcacuucaggcagcugcccuaauguuaccaacgggaauggauucuuugccacaauggcuugggcagugccaaagaacgacaauaacaaaaccgccacgaauagucucacuauugaagucccguacaucuguacagagggugaggaucagauaaccauuuggggcuuccacuccgacaaggaaacucagauggcuaagcuguauggggauucuaaaccccagaaguuuacaagcuccgccaacggagugaccacgcacuacgugucacaaaucggcgguuucccuaaccagaccgaggacgggggacugccacagaguggccggauugucguugauuauauggugcagaaaagcggcaagacagggacuaucaccuaccaacgcggaauccucuuaccccagaaaguauggugcgcgucugguagauccaaggugauuaaaggcucacugccucuuauaggggaagcagacuguuugcaugagaaguauggaggccugaauaagagcaaaccauacuacacaggugagcacgccaaggcuaucgggaacugccccauuugggucaaaacuccgcuaaagcucgccaauggcaccaaauauaggccucccgcaaagcugcuuaaggaacggggauuuuucggcgcuaucgccggguuucuggagggagguugggaaggcaugauagcgggguggcauggauacacaagucacggcgcccacgguguggcaguugcugccgauuugaaaucuacccaggaggcuauuaacaagaucacuaaaaaucucaacucccugagcgaauuagaggugaagaaucugcagcgccucucgggggccauggacgagcuucauaacgaaauccuggaguuggaugaaaaagucgacgaccuacgagcagauacgauuucuucccaaaucgagcuggccgugcuccugucaaaugaaggcauuauaaacagugaggacgagcaccuucuggcuuuggaaagaaagcucaagaaaaugcugggaccaagcgcgguagagaucggcaauggguguuucgaaacaaagcauaaaugcaaccagaccugcuuagauaggauugcagccggaacuuuugacgcuggugaguucucccugccuaccuuugauucucuaaauaucacagccgcaagccucaacgacgauggccuggacaaucacaccauccuuuuguauuacucaacugccgcuaguucccuggccguuacacucaugauugcaauauucaucguguauauggucagccgggauaacgugucuuguucaauuugccuguga

SEQ ID NO: 156055 - RNA, 1755 nt, Artificial Sequence; identical to SEQ ID NO: 155071
  derived and/or modified CDS sequence (opt3) from hemagglutinin__InfluenzaB__AHL92904

SEQ ID NO: 156056 - RNA, 1758 nt, Artificial Sequence
  derived and/or modified CDS sequence (opt3) from hemagglutinin__InfluenzaB__AHL92915
augaaggccaucauugugcugcucauggucguuaccagcaacgcugacagaauaugcacaggcaucacuuccucuaauucaccccacgugguaaaaacggcaacccagggggaggugaacgucacaggagugauuccucuuacuaccacaccaaccaagagucauuucgccaaucugaaagguacuaagacaaggggcaaauuguguccgaagugcuuaaacuguaccgaucuggacguugcgcuagggcggcccaagugcacgggaaauaucccuagcgcugaaguguccauucuccacgagguccgcccagugacuucuggcuguuuucccaucaugcaugaucgaaccaaaauacgucaacugccuaaccuucugagagguuacgaacacaucagguugucgacacauaauguaauuaacgccgagaaggcaccagggggacccuauaaaaucggcacuucaggcagcugcccuaauguuaccaacgggaauggauucuuugccacaauggcuugggcagugccaaagaacgacaauaacaaaaccgccacgaauagucucacuauugaagucccguacaucuguacagagggugaggaucagauaaccauuuggggcuuccacuccgacaacgaaacucagauggcuaagcuguauggggauucuaagccccagaaauuuacaagcuccgccaacggagugaccacgcacuacgugucacaaaucggcgguuucccuaaucagaccgaggacgggggacugccacagaguggccggauugucguugauuauauggugcaaaagagcggcaaaacagggacuaucaccuaccagcgcggaauccucuuaccccagaagguauggugcgcgucugguagauccaaagugauuaagggcucacugccucuuauaggggaagcagacuguuugcaugagaaauauggaggccugaacaagagcaagccauacuacacaggugagcacgccaaagcuaucgggaauugccccauuugggucaagacuccgcuaaaacucgccaacggcaccaaguauaggccucccgcaaaacugcuuaaggaacggggauuuuucggcgcuaucgccggguuucuggagggagguugggaaggcaugauagcgggguggcauggauacacaagucacggcgcccacgguguggcaguugcugccgauuugaagucuacccaggaggcuauuaauaaaaucacuaagaaccucaauucccugagcgaauuagaggugaaaaaccugcagcgccucucgggggccauggacgagcuucauaaugaaauccuggaguuggaugaaaaggucgacgaccuacgagcagauacgauuucuucccaaaucgagcuggccgugcuccugucaaacgaaggcauuauaaauagugaggacgagcaccuucuggcuuuggaaagaaaacucaagaagaugcugggaccaagcgcgguagagaucggcaacggguguuucgaaacaaaacauaagugcaaucagaccugcuuagauaggauugcagccggaacuuuugacgcuggugaguucucccugccuaccuuugauucucuaaacaucacagccgcaagccucaaugacgauggccuggacaaccacaccauccuuuuguauuacucaacugccgcuaguucccuggccguuacacucaugauugcaauauucaucguguauauggucagccgggauaacgugucuuguucaauuugccuguga

SEQ ID NO: 156057 - RNA, 1758 nt, Artificial Sequence; identical to SEQ ID NO: 154686
  derived and/or modified CDS sequence (opt3) from hemagglutinin__InfluenzaB__AHL92926

SEQ ID NO: 156058 - RNA, 1755 nt, Artificial Sequence; identical to SEQ ID NO: 155647
  derived and/or modified CDS sequence (opt3) from hemagglutinin__InfluenzaB__AHL92937

SEQ ID NO: 156059 - RNA, 1758 nt, Artificial Sequence; identical to SEQ ID NO: 154562
  derived and/or modified CDS sequence (opt3) from hemagglutinin__InfluenzaB__AHL92948

SEQ ID NO: 156060 - RNA, 1758 nt, Artificial Sequence; identical to SEQ ID NO: 154562
  derived and/or modified CDS sequence (opt3) from hemagglutinin__InfluenzaB__AHL92959

SEQ ID NO: 156061 - RNA, 1758 nt, Artificial Sequence; identical to SEQ ID NO: 154562
  derived and/or modified CDS sequence (opt3) from hemagglutinin__InfluenzaB__AHL92970

SEQ ID NO: 156062 - RNA, 1758 nt, Artificial Sequence; identical to SEQ ID NO: 154562
  derived and/or modified CDS sequence (opt3) from hemagglutinin__InfluenzaB__AHL92981

SEQ ID NO: 156063 - RNA, 1758 nt, Artificial Sequence; identical to SEQ ID NO: 154562
  derived and/or modified CDS sequence (opt3) from hemagglutinin__InfluenzaB__AHL92992

SEQ ID NO: 156064 - RNA, 1758 nt, Artificial Sequence; identical to SEQ ID NO: 155987
  derived and/or modified CDS sequence (opt3) from hemagglutinin__InfluenzaB__AHL93004

SEQ ID NO: 156065 - RNA, 1758 nt, Artificial Sequence; identical to SEQ ID NO: 154562
  derived and/or modified CDS sequence (opt3) from hemagglutinin__InfluenzaB__AHL93015

SEQ ID NO: 156066 - RNA, 1758 nt, Artificial Sequence; identical to SEQ ID NO: 154562
  derived and/or modified CDS sequence (opt3) from hemagglutinin__InfluenzaB__AHL93026

SEQ ID NO: 156067 - RNA, 1755 nt, Artificial Sequence; identical to SEQ ID NO: 156011
  derived and/or modified CDS sequence (opt3) from hemagglutinin__InfluenzaB__AHL93037

SEQ ID NO: 156068 - RNA, 1755 nt, Artificial Sequence; identical to SEQ ID NO: 156011
  derived and/or modified CDS sequence (opt3) from hemagglutinin__InfluenzaB__AHL93048

SEQ ID NO: 156069 - RNA, 1755 nt, Artificial Sequence; identical to SEQ ID NO: 156040
  derived and/or modified CDS sequence (opt3) from hemagglutinin__InfluenzaB__AHL93059

SEQ ID NO: 156070 - RNA, 1755 nt, Artificial Sequence; identical to SEQ ID NO: 154868
  derived and/or modified CDS sequence (opt3) from hemagglutinin__InfluenzaB__AHL93070

SEQ ID NO: 156071 - RNA, 1755 nt, Artificial Sequence
  derived and/or modified CDS sequence (opt3) from hemagglutinin__InfluenzaB__AHL93081
augaaggccaucauugugcugcucauggucguuaccagcaacgcugacagaauaugcacaggcaucacuuccucuaauucaccccacgugguaaaaacggcaacccagggggaggugaacgucacaggagugauuccucuuacuaccacaccaaccaagaguuacuucgccaaucugaaagguacuaggacacggggcaaguuguguccggauugcuuaaacuguaccgaccuggauguugcgcuagggcgccccaugugcgugggaacgacuccuagcgcuaaagccuccauccuccaugaaguccgaccagugaccucuggcuguuuucccauuaugcacgaccguacaaagaucagacaacugccuaaucuucugagggguuaugagaacauacgguugucgacucagaauguaaucgaugcagaaaaggccccagggggacccuaccgccucggcaccucaggcagcugcccuaacgcuacaaguaaaauuggguucuuugcaaccauggccugggcuguuccaaaggacaauuauaaaaacgccacgaauccgcugacuguggagguccccuacaucuguacagaaggagaggaucagauuaccgugugggguuuccauuccgacaacaagacucagaugaaaaaucuguauggcgauucuaacccucaaaaguuuacaagcuccgcgaauggggugaccacgcacuacgucucacagaucggagacuucccagaucagaccgaggacggcggucucccccagagugggagaauaguuguggauuauaugaugcaaaagccuggaaaaacaggcacuauuguauaccagaggggcguguuacugccacagaaggucuggugcgcaagcgggcggucuaaagugaucaagggaucccuucccuugauuggugaagccgacugucugcaugagaaauacggcgggcuaaacaagucaaaaccguauuacaccggagaacacgcuaaggccaucggcaacugcccuaucuggguuaagacaccccucaaacuggcaaaugguacuaaguaucgcccuccagcuaaacuucugaaggagcgaggguuuuucggcgccauugcgggauuuuuggagggcgggugggaaggaaugauagccgguuggcacggcuacaccagccauggggcacacggaguggcugucgccgcugaccucaaaaguacacaggaggccaucaacaagauuaccaagaaucugaacucuuuauccgaacuggaggugaaaaaucuccaaagacuuagcggcgcaauggaugaacugcauaacgagaucuuggagcuagacgguaagguagaugaccugagggccgauacuauaucgucucagauugaacucgcuguucugcuuuccaaugaggggaucaucaacucagaagacgagcaccuguuggcgcucgaacggaaacugaagaaaauguuaggccccagugcaguggauauuggaaauggcuguuucgagacgaagcacaagugcaaccagacaugccuggaccguaucgccgcugggaccuuuaaugccggagaguucagccuaccaacuuuugauucccucaacauuaccgcagccucucugaaugacgauggucuugacaaccauacaauauugcuguauuacagcaccgcugccucaagucucgcagucacucugaugcuugcgaucuucauuguguauauggucucccgcgacaaugugagcuguucuaucugccuguga

SEQ ID NO: 156072 - RNA, 1755 nt, Artificial Sequence; identical to SEQ ID NO: 154868
  derived and/or modified CDS sequence (opt3) from hemagglutinin__InfluenzaB__AHL93092

SEQ ID NO: 156073 - RNA, 1755 nt, Artificial Sequence; identical to SEQ ID NO: 154868
  derived and/or modified CDS sequence (opt3) from hemagglutinin__InfluenzaB__AHL93103

SEQ ID NO: 156074 - RNA, 1755 nt, Artificial Sequence; identical to SEQ ID NO: 154868
  derived and/or modified CDS sequence (opt3) from hemagglutinin__InfluenzaB__AHL93114

SEQ ID NO: 156075 - RNA, 1755 nt, Artificial Sequence; identical to SEQ ID NO: 154615
  derived and/or modified CDS sequence (opt3) from hemagglutinin__InfluenzaB__AHL93125

SEQ ID NO: 156076 - RNA, 1755 nt, Artificial Sequence
  derived and/or modified CDS sequence (opt3) from hemagglutinin__InfluenzaB__AHL93136
augaaggccaucauugugcugcucauggucguuaccagcaacgcugacagaauaugcacaggcaucacuuccucuaauucaccccacgugguaaaaacggcaacccagggggaagugaacgucacaggagugauuccucuuacuaccacaccaaccaagaguuacuucgccaaucugaaagguacuaggacacggggcaaguuguguccggauugcuuaaacuguaccgaccuggauguugcgcuagggcgccccaugugcgugggaacgacuccuagcgcuaaagccuccauccuccaugaaguccgaccagugaccucuggcuguuuucccauuaugcacgaccguacaaagaucagacaacugccuaaucuucugagggguuaugagaacauacgguugucgacucagaauguaaucgaugcagaaaaggccccagggggacccuaccgccucggcaccucaggcagcugcccuaacgcuacaaguaaaauuggguucuuugcaaccauggccugggcuguuccaaaggacaauuauaaaaacgccacgaauccgcugacuguggagguccccuacaucuguacagaaggagaggaucagauuaccgugugggguuuccauuccgacaacaagacucagaugaaaaaucuguauggcgauucuaacccucaaaaguuuacaagcuccgcgaauggggugaccacgcacuacgucucacagaucggagacuucccagaucagaccgaggacggcggucucccccagagugggagaauaguuguggauuauaugaugcaaaagccuggaaaaacaggcacuauuguauaccagaggggcguguuacugccacagcgggucuggugcgcaagcgggcgcucuaaggugaucaaaggaucccuucccuugauuggugaagccgacugucugcaugagaaguacggcgggcuaaacaaaucaaagccguauuacaccggagaacacgcuaaagccaucggcaacugcccuaucuggguuaagacaccccucaagcuggcaaaugguacuaaauaucgaccuccagcuaaacuucugaaggagagaggguuuuucggcgccauugcgggauuuuuggagggcgggugggaaggaaugauagccgguuggcacggcuacaccagccauggggcacacggaguggcugucgccgcugaccucaagaguacacaggaggccaucaacaaaauuaccaagaaucugaacucuuuauccgaacuggaggugaagaaucuccaaaggcuuagcggcgcaauggaugaacugcauaacgagaucuuggagcuagacgaaaaaguagaugaccugcgggccgauacuauaucgucucagauugagcucgcuguucugcuuuccaaugaagguaucaucaacucagaggacgaacaccuguuggcgcucgagcguaagcugaaaaagauguuagggcccagugcaguggauauuggcaauggauguuucgagacgaaacacaagugcaaccagacaugccuggaccgcaucgccgcuggcaccuuuaaugccggggaguucagccuaccaacuuuugauucccucaacauuaccgcagccucucugaaugacgauggacuugacaaccauacaauauugcuguauuacagcaccgcugccucaagucucgcagucacucugaugcuugcgaucuucauuguguauauggucuccagagacaaugugagcuguucuaucugccuguga

SEQ ID NO: 156077 - RNA, 1755 nt, Artificial Sequence; identical to SEQ ID NO: 154615
  derived and/or modified CDS sequence (opt3) from hemagglutinin__InfluenzaB__AHL93147

SEQ ID NO: 156078 - RNA, 1755 nt, Artificial Sequence; identical to SEQ ID NO: 154868
  derived and/or modified CDS sequence (opt3) from hemagglutinin__InfluenzaB__AHL93158

SEQ ID NO: 156079 - RNA, 1755 nt, Artificial Sequence
  derived and/or modified CDS sequence (opt3) from hemagglutinin__InfluenzaB__AHL93169
augaaggccaucauugugcugcucauggucguuaccagcaacgcugacagaauaugcacaggcaucacuuccucuaauucaccccacgugguaaaaacggcaacccagggggaggugaacgucacaggagugauuccucuuacuaccacaccaaccaagaguuacuucgccaaucugaaagguacuaggacacggggcaaguuguguccggauugcuuuaacuguaccgacuuagauguugcgcuggggcgccccaugugcgugggaacgacuccuagcgcuaaagccuccauccuacaugaaguccgaccagugaccucuggcuguuuccccauuaugcacgaccguacaaagaucagacaacucccuaaucugcuuagggguuaugagaacauacggcugucgacucagaauguaaucgaugcagaaaaggccccagggggacccuaccgcuugggcaccucaggcagcugcccuaacgcuacaaguaaaauuggguuuuucgcaaccauggccugggcuguuccaaaggacaauuauaaaaacgccacgaauccgcucacuguggagguccccuacaucuguacagaaggagaggaucagauuaccgugugggguuuucauuccgacaacaagacucagaugaaaaaucuguauggcgauucuaacccucaaaaguucacaagcuccgcgaauggggugaccacgcacuacgucucacagaucggagacuuuccagaucagaccgaggacggcggucugccccagagugggagaauaguuguggauuauaugaugcaaaagccuggaaaaacaggcacuauuguauaccagaggggcgugcucuuaccacagaaggucuggugcgcaagcgggcggucuaaagugaucaagggaucccugccccuuauuggugaagccgacuguuugcaugagaaauacggcgggcugaacaagucaaaaccguauuacaccggagaacacgcuaaggccaucggcaacugcccuaucuggguuaagacaccccuaaaacucgcaaaugguacuaaguaucgcccuccagcuaaacugcuuaaggagcgaggguucuuuggcgccauugcgggauuccuggagggcgggugggaaggaaugauagccgguuggcacggcuacaccagccauggggcacacggaguggcugucgccgcugacuugaaaaguacacaggaggccaucaacaagauuaccaagaaucucaacucucuguccgaauuagaggugaaaaaucugcaaagacucagcggcgcaauggaugaacuucauaacgagauccuggaguuggacgaaaagguagaugaccuaagggccgauacuauaucgucucagauugagcuggcuguucuccuguccaaugaagguaucaucaacucagaggacgaacaccuucuggcguuggagcggaaacucaagaaaaugcuggggcccagugcaguggauauuggcaauggauguuuugagacgaagcacaagugcaaccagacaugcuuagaccguaucgccgcuggcaccuucaaugccggggaauuuagccugccaacuuucgauucccuaaacauuaccgcagccucucucaaugacgauggacuggacaaccauacaauacuuuuguauuacagcaccgcugccucaagucuggcagucacucucaugcuggcgaucuucauuguguauauggucucccgcgacaaugugagcuguucuaucugccuuuga

SEQ ID NO: 156080 - RNA, 1755 nt, Artificial Sequence
  derived and/or modified CDS sequence (opt3) from hemagglutinin__InfluenzaB__AHL93180
augaaggccaucauugugcugcucauggucguuaccagcaacgcugacagaauaugcacaggcaucacuuccucuaauucaccccacgugguaaaaacggcaacccagggggaggugaacgucacaggagugauuccucuuacuaccacaccaaccaagaguuacuucgccaaucugaaagguacuaggacacggggcaaguuguguccggauugcuuaaacuguaccgaccuggauguugcgcuagggcgccccaugugcgugggaacgacuccuagcgcuaaagccuccauccuccaugaaguccgaccagugaccucuggcuguuuucccauuauccacgaccguacaaagauaagacaacugccuaaucuucugagggguuaugagaacauccgguugucgacucagaauguaauugaugcagaaaaggccccagggggacccuaccgccucggcaccucaggcagcugcccuaacgcuacaaguaaauccggguucuuugcaaccauggccugggcuguuccaaaggacaauaacaaaaaugccacgaacccgcugacuguggagguccccuauaucuguacagaaggagaggaucagauuaccgugugggguuuccauucugacaauaagacucagaugaaaaaccuguacggcgauagcaauccucaaaaguuuacauccucagcgaacggggugaccacgcacuaugucagucagaucggcagcuucccagaccagaccgaggauggaggucucccccagucugggagaauaguuguggacuacaugaugcaaaagccuggaaaaacaggcacuauuguauaucagaggggcguguuacugccacagcgggucuggugcgcauccgggcgcucaaaggugaucaaaggaagccuucccuugauuggugaagccgauugucugcaugagaaguacggcgggcuaaacaaaaguaagccguacuauaccggagaacacgcuaaagccaucggcaauugcccuaucuggguuaagacaccccucaagcuggcaaacgguacuaaauaccgaccuccagcuaaacuucugaaggagagaggguuuuucggcgccauugcgggauuuuuggagggcgggugggaaggaaugauagccgguuggcacggcuauaccucucauggggcacacggaguggcugucgccgcugaccucaaguccacacaggaggccaucaauaaaauuaccaagaaccugaauagcuuaucggaacuggaggugaagaaccuccaaaggcuuucuggcgcaauggacgaacugcauaaugagaucuuggagcuagaugaaaaaguagacgaucugcgggccgacacuauauccucacagauugagcucgcuguucugcuuaguaacgaagguaucaucaauagcgaggaugaacaccuguuggcgcucgagcguaagcugaaaaagauguuagggcccuccgcaguggagauuggcaacggauguuucgaaacgaaacacaagugcaaucagacaugccuggaccgcaucgccgcuggcaccuuuaacgccggggaguucucucuaccaacuuuugauagccucaauauuaccgcagccucacugaacgacgauggacuugacaaucauacaauauugcuguacuauaguaccgcugccuccagccucgcagucacucugaugcuugcgaucuucauuguguacauggucucuagagauaacgugucauguaguaucugccuguga

SEQ ID NO: 156081 - RNA, 1755 nt, Artificial Sequence
  derived and/or modified CDS sequence (opt3) from hemagglutinin__InfluenzaB__AHL93191
augaaggccaucauugugcugcucauggucguuaccagcaacgcugacagaauaugcacaggcaucacuuccucuaauucaccccacgugguaaaaacggcaacccagggggaagugaacgucacaggagugauuccucuuacuaccacaccaaccaagaguuacuucgccaaucugaaagguacuaggacacggggcaaguuguguccggauugcuuaaacuguaccgaccuggauguugcgcuagggcgccccaugugcgugggaacgacuccuagcgcuaaagccuccauccuccaugaaguccgaccagugaccucuggcuguuuucccauuaugcacgaccguacaaagaucagacaacugccuaaucuucugagggguuaugagaacauacgguugucgacucagaauguaaucgaugcagaaaaggccccagggggacccuaccgccucggcaccucaggcagcugcccuaacgacacaaguaaaauuggguucuuugcuaccauggcaugggccguuccaaaggauaauuauaaaaacgcuacgaauccgcugacuguggagguccccuacaucuguacagaaggagaggaccagauuaccgugugggguuuccauuccgauaacaagacucagaugaaaaaucuguauggcgacucuaacccucaaaaguuuacaagcuccgccaauggggugaccacgcacuacgucucacagaucggagauuucccagaccagaccgaggauggcggucucccccagagugggagaauaguuguggacuauaugaugcaaaagccuggaaaaacaggcacuauuguauaccagaggggcguguuacugccacagaaggucuggugcgcgagcgggcggucuaaagugaucaagggaucccuucccuugauuggugaagcagacugucugcaugagaaauacggcgggcuaaacaagucaaaaccguauuacaccggagaacacgccaaggcuaucggcaacugcccuaucuggguuaagacaccccucaaacuggccaaugguacuaaguaucgcccuccagcaaaacuucugaaggagcgaggguuuuucggcgcuauugccggauuuuuggagggcgggugggaaggaaugauagcggguuggcacggcuacaccagccauggggcccacggaguggcagucgcugccgaucucaaaaguacacaggaggcuaucaacaagauuaccaagaaucugaacucuuuauccgaacuggaggugaaaaaucuccaaagacuuagcggcgccauggacgaacugcauaacgagaucuuggagcuagaugaaaagguagacgaucugagggcagacacuauaucgucucagauugagcucgccguucugcuuuccaaugaagguaucaucaacucagaggaugaacaccuguuggcucucgagcggaaacugaagaaaauguuagggcccagugcgguggacauuggcaauggauguuucgagacgaagcacaagugcaaccagacaugccuggaucguaucgcagccggcaccuuuaaugcuggggaguucagccuaccaacuuuugacucccucaacauuaccgccgcaucucugaaugaugacggacuugacaaccauacaauauugcuguauuacagcaccgccgcuucaagucucgccgucacucugaugcuugcaaucuucauuguguauauggucucccgcgauaaugugagcuguucuaucugccuguga

SEQ ID NO: 156082 - RNA, 1755 nt, Artificial Sequence
  derived and/or modified CDS sequence (opt3) from hemagglutinin__InfluenzaB__AHL93202
augaaggccaucauugugcugcucauggucguuaccagcaacgcugacagaauaugcacaggcaucacuuccucuaauucaccccacgugguaaaaacggcaacccagggggaggugaacgucacaggagugauuccucuuacuaccacaccaaccaagaguuacuucgccaaucugaaagguacuaggacacggggcaaguuguguccggauugcuuaaacuguaccgaccuggauguugcgcuagggcgccccaugugcgugggaacgacuccuagcgcuaaagccuccauccuccaugaaguccgaccagugaccucuggcuguuuucccauuaugcacgaccguacaaagaucagacaacugccuaaucuucugagggguuaugagaacauacgguugucgacucagaauguaaucgaugcagaaaaggccccagggggacccuaccgccucggcaccucaggcagcugcccuaacgcuacaaguaaaauuggguucuuugcaaccauggccugggcuguuccaaaggacaauuauaaaaacgccacgaauccgcugacuguggagguccccuacaucuguacagaaggagaggaucagauuaccgugugggguuuccauuccgacaacaagacucagaugaaaaaucuguauggcgauucuaacccucaaaaguuuacaagcuccgcgaauggggugaccacgcacuacgucucacagaucggagacuucccagaucagaccgaggacggcggucucccccagagugggagaauaguuguggauuauaugaugcaaaagccuggaaaaacaggcacuauuguauaccagaggggcguguuacugccacagaaggucuggugcgcaagcgggcggucuaaagugaucaagggaucccuucccuugauuggugaagccgacugucugcaugagaaauacggcgggcuaaacaagucaaaaccguauuacaccggagaacacgcuaaggccaucggcaacugcccuaucuggguuaagacaccccucaaacuggcaaaugguacuaaguaucgcccuccagcuaaacuucugaaggagcgaggguuuuucggcgccauugcgggauuuuuggagggcgggugggaaggaaugauagccgguuggcacggcuacaccagccauggggcacacggaguggcugucgccgcugaccucaaaaguacacaggaggccaucaacaagauuaccaagaaucugaacucuuuauccgaacuggaggugaaaaaucuccaaagacuuagcggcgcaauggaugaguuccauaacgaaauccuggaguuggacgaaaagguagaugaccuaagggccgauacuauaucgucucagauugagcuggcuguucuccuguccaaugaagguaucaucaacucagaggacgaacaccuucuggcguuggagcggaaacucaagaaaaugcuggggcccagugcaguggauauuggcaauggauguuuugagacgaagcacaagugcaaccagacaugcuuagaccguaucgccgcuggcaccuucaaugccggggaauuuagccugccaacuuucgauucccuaaacauuaccgcagccucucucaaugacgauggacuggacaaccauacaauacuuuuguauuacagcaccgcugccucaagucuggcagucacucucaugcuggcgaucuucauuguguauauggucucccgcgacaaugugagcuguucuaucugccuuuga

SEQ ID NO: 156083 - RNA, 1758 nt, Artificial Sequence; identical to SEQ ID NO: 155037
  derived and/or modified CDS sequence (opt3) from hemagglutinin__InfluenzaB__AHL93213

SEQ ID NO: 156084 - RNA, 1758 nt, Artificial Sequence; identical to SEQ ID NO: 155037
  derived and/or modified CDS sequence (opt3) from hemagglutinin__InfluenzaB__AHL93224

SEQ ID NO: 156085 - RNA, 1758 nt, Artificial Sequence
  derived and/or modified CDS sequence (opt3) from hemagglutinin__InfluenzaB__AHL93235
augaaggccaucauugugcugcucauggucguuaccagcaacgcugacagaauaugcacaggcaucacuuccucuaauucaccccacgugguaaaaacggcaacccagggggaggugaacgucacaggagugauuccucuuacuaccacaccaaccaagagucauuucgccaaucugaaagguacugaaacaaggggcaaguuguguccgaaaugccccaacuguaccgauuuagacguugcgcuggggcggccuaagugcacgggaaagaucccaagcgcucgcguguccauucuacacgagguccgacccgugacuucuggcuguuuuccuaucaugcaugaucguaccaaaauaagacaacucccaaaucugcuuagggguuacgaacacauccggcugucgacacauaacguaauuaaugccgagaacgcacccgggggaccuuauaagaucggcacuucaggcagcugcccaaauguuaccaacgggaauggauucuuugccacaauggcuugggcagugccgaaaaacgacaagaauaaaaccgccacgaaccccuugacuauugaagucccuuacaucuguacagagggugaggaucagauaaccguguggggcuuccacagugacaaugaaacucagauggcuaagcucuauggggauuccaagccacagaaauuuacaucuagcgccaacggagugaccacgcacuacgucucccaaauuggcgguuuccccaaccagaccgaggacgggggacugccucagucaggccgcaucguuguggauuauaugguacagaagaguggcaaaacagggacuauuaccuaccaaagaggaauccugcucccacagaagguguggugcgcgagcgguaggucuaaagucaucaagggcuccuuaccccugauuggggaagcagacugucuucaugagaaauauggaggcuugaauaagucaaagccguacuacacaggugagcacgccaaagcuauagggaacugcccuaucugggugaagacuccccugaaacuagccaauggcaccaaguaucggccuccagcaaaacuccugaaggaacgcggauuuuucggcgcuauugccggguuucuugagggagguugggaaggcaugaucgcgggguggcauggauacacaagccacggcgcccacgguguugcaguggcugccgaucugaagaguacccaggaggcuauaaacaaaauuacuaagaauuugaacucucucuccgaacuggaggucaaaaauuuacagcgacugagcggggccauggacgagcuccauaacgaaauccuugagcuggaugaaaagguggacgacuugagagcagauacgaucucgucucaaauugagcuagccguacugcucuccaaugaaggcaucauuaacucagaggacgagcaucugcuugcucuggaaaggaaauugaagaagaugcucggacccagugcgguugagauaggcaauggguguuucgaaacaaaacacaagugcaaccagaccugccuggaucggaucgcagccggaacuuuugacgcuggugaguucagcuuaccaaccuuugauucccugaauauuacagccgcaucucuaaacaaugacggccucgauaaccacaccauccugcuuuauuacagcacugccgcuucaaguuuggccgugacacugaugaucgcaauuuucgucguguauauggucucccgugacaacgugagcuguucuauaugccucuga

SEQ ID NO: 156086 - RNA, 1758 nt, Artificial Sequence
  derived and/or modified CDS sequence (opt3) from hemagglutinin__InfluenzaB__AHL93246
augaaggccaucauugugcugcucauggucguuaccagcaacgcugacagaauaugcacaggcaucacuuccucuaauucaccccacgugguaaaaacggcaacccagggggaggugaacgucacaggagugauuccucuuacuaccacaccaaccaagagucauuucgccaaucugaaagguacugaaacaaggggcaaguuguguccgaaaugcuuaaacuguaccgaucuggacguugcgcuagggcggcccaagugcacgggaaauaucccuagcgcucgcguguccauucuccacgagguccgaccagugacuucuggcuguuuucccaucaugcaugaucguaccaagauaagacaacugccuaaccuucugagggguuacgaacacauccgguugucgacacauaauguaauuaacgccgagaaugcaccagggggacccuauaaaaucggcacuucaggcagcugcccuaacguuaccaaugggaacggauucuuugccacaauggcuugggcagugccaaagaaugacaaaaacaagaccgccacgaauagucucacuauugaagucccguacaucuguacagagggugaggaucagauaaccauuuggggcuuccacuccgacaacgaaacucagauggcuaaacuguauggggauucuaagccccagaaguuuacaagcuccgccaacggagugaccacgcacuacgugucacaaaucggcgguuucccuaaucagaccgaggacgggggacugccacagaguggccgcauugucguugauuauauggugcagaaaagcggcaagacagggacuaucaccuaccaaagaggaauccucuuaccccagaaaguauggugcgcgucugguagguccaaggugauuaaaggcucacugccucuuauaggggaagcagacuguuugcaugagaaguauggaggccugaacaaaagcaagccauacuacacaggugagcacgccaaggcuaucgggaauugccccauuugggucaaaacuccgcuaaagcucgccaacggcaccaaauaucggccucccgcaaagcugcuuaaagaacgcggauuuuucggcgcuaucgccggguuucuggagggagguugggaaggcaugauagcgggguggcauggauacacaagucacggcgcccacgguguggcaguugcugccgauuugaagucuacccaggaggcuauuaauaagaucacuaaaaaccucaauucccugggggaauuagaggugaagaaccugcagcgacucagcggcgccauggacgagcuucauaaugaaauccuggaguuggaugaaaaagucgacgaccuaagagcagauacgauuucgucucaaaucgagcuggccgugcuccuguccaacgaaggaauuauaaauucagaggacgagcaccuucuggcuuuggaaaggaagcucaaaaagaugcugggcccaagugcgguagagaucgggaacggauguuucgaaacaaagcauaaaugcaaucagaccugcuuagaucggauugcagccgguacuuuugacgcuggcgaguucagccugccuaccuuugauucccuaaacaucacagccgcaucucucaaugacgaugggcuggacaaccacaccauccuuuuguauuacagcacugccgcuucaagucuggccguuacacucaugauugcaauauucguggucuauauggugucccgugauaacgucagcuguucuaucugccuguga

SEQ ID NO: 156087 - RNA, 1758 nt, Artificial Sequence; identical to SEQ ID NO: 155037
  derived and/or modified CDS sequence (opt3) from hemagglutinin__InfluenzaB__AHL93257

SEQ ID NO: 156088 - RNA, 1758 nt, Artificial Sequence; identical to SEQ ID NO: 155370
  derived and/or modified CDS sequence (opt3) from hemagglutinin__InfluenzaB__AHL93268

SEQ ID NO: 156089 - RNA, 1758 nt, Artificial Sequence
  derived and/or modified CDS sequence (opt3) from hemagglutinin__InfluenzaB__AHL93279
augaaggccaucauugugcugcucauggucguuaccagcaacgcugacagaauaugcacaggcaucacuuccucuaauucaccccacgugguaaaaacggcaacccagggggaggugaacgucacaggagugauuccucuuacuaccacaccaaccaagagucauuucgccaaucugaaagguacugaaacaaggggcaaguuguguccgaaaugcuuaaacuguaccgaucuggacguugcgcuagggcggcccaagugcacgggaaagaucccuagcgcucgcguguccauucuccacgagguccgaccagugacuucuggcuguuuucccaucaugcaugaucguaccaaaauaagacaacugccuaaucuucugagggguuacgaacacauccgguugucgacacauaacguaauuaaugccgagaacgcaccagggggacccuauaagaucggcacuucaggcagcugcccuaauauuaccaacgggaauggauucuuugccacaauggcuugggcaguuccgaaaaacgacaagaauaaaaccgccacgaacccacucacuaucgaagugcccuacauauguacagagggugaggaucagauuaccgucuggggcuuccacagugacaaugaaacucagauggcuaagcuguauggggauuccaagccucagaaauuuacaucuagcgccaacggagugaccacgcacuacgugucccaaaucggcgguuucccaaaccagaccgaggacgggggacugccccagucaggccgcauugucguugauuauauggugcagaagaguggcaaaacagggacuaucaccuaccaaagaggaauccucuuaccucagaagguauggugcgcgagcgguaaaucuaaggugauuaaaggcucccugccacuuauaggggaagcagacuguuugcaugagaaguauggaggccugaauaagucaaaacccuacuacacaggugagcacgccaaggcuaucgggaacugcccgauuugggucaaaacuccucuaaagcucgccaauggcaccaaauauaggcccccagcaaagcugcuuaaggaacggggauuuuucggcgcuaucgccggguuucuggagggagguugggaaggcaugauagcgggguggcauggauacacaagccacggcgcccacgguguggcaguugcugccgauuugaaaaguacccaggaggcuauuaacaagaucacuaaaaaucucaacucucuguccgaauuagaggugaagaaucugcagcgccucagcggggccauggacgagcuucauaacgaaauccuggaguuggaugaaaaagucgacgaccuacgagcagauacgauuucgucucaaaucgagcuggccgugcuccuguccaaugaaggcauuauaaacucagaggacgagcaccuucuggcuuuggaaagaaagcucaagaaaaugcugggaccuagugcgguagagaucggcaauggguguuucgaaacaaagcauaaaugcaaccagaccugcuuagauaggauugcagccggaacuuuugacgcuggugaguucagccugcccaccuuugauucccuaaauaucacagccgcaucucucaacgacgauggccuggacaaucacaccauccuuuuguauuacagcacugccgcuucaagucuggccguuacacucaugauugcaauauucguggucuauauggugucccgggauaacgucagcuguucuaucugccuguga

SEQ ID NO: 156090 - RNA, 1758 nt, Artificial Sequence; identical to SEQ ID NO: 155037
  derived and/or modified CDS sequence (opt3) from hemagglutinin__InfluenzaB__AHL93290

SEQ ID NO: 156091 - RNA, 1758 nt, Artificial Sequence
  derived and/or modified CDS sequence (opt3) from hemagglutinin__InfluenzaB__AHL93301
augaaggccaucauugugcugcucauggucguuaccagcaacgcugacagaauaugcacaggcaucacuuccucuaauucaccccacgugguaaaaacggcaacccagggggaggugaacgucacaggagugauuccucuuacuaccacaccaaccaagagucauuucgccaaucugaaagguacugaaacaaggggcaaguuguguccgaaaugcuuaaacuguaccgaucuggacguugcgcuagggcggcccaagugcacgggaaagaucccuagcgcucgcguguccauucuccacgagguccgaccagugacuucuggcuguuuucccaucaugcaugaucguaccaaaauaagacaacugccuaaucuucugagggguuacgaacacauccgguugucgacacauaacguaauuaaugccgagaacgcaccagggggacccuauaagaucggcacuucaggcagcugcccuaauauuaccaacgggaauggauucuuugccacaauggcuugggcaguuccgaaaaacgacaagaauaaaaccgccacgaacccacucacuaucgaagugcccuacauauguacagagggugaggaucagauuaccgucuggggcuuccacagugacaaugaaacucagauggcuaagcuguauggggauuccaagccucagaaauuuacaucuagcgccaacggagugaccacgcacuacgugucccaaaucggcgguuucccaaaccagaccgaggacgggggacugccccagucaggccgcauugucguugauuauauggugcagaagaguggcaaaacagggacuaucaccuaccaaagaggaauccucuuaccucagaagguauggugcgcgagcgguaggucuaaagugauuaagggcucccugccacuuauaggggaagcagacuguuugcaugagaaauauggaggccugaauaagucaaagcccuacuacacaggugagcacgccaaagcuaucgggaacugcccgauuugggucaagacuccucuaaaacucgccaauggcaccaaguaucggcccccagcaaaacugcuuaaggaacgcggauuuuucggcgcuaucgccggguuucuggagggagguugggaaggcaugauagcgggguggcauggauacacaagccacggcgcccacgguguggcaguugcugccgauuugaagaguacccaggaggcuauuaacaaaaucacuaagaaucucaacucucuguccgaauuagaggugaaaaaucugcagcgacucagcggggccauggacgagcuucauaacgaaauccuggaguuggaugaaaaggucgacgaccuaagagcagauacgauuucgucucaaaucgagcuggccgugcuccuguccaaugaaggcauuauaaacucagaggacgagcaccuucuggcuuuggaaaggaaacucaagaagaugcugggaccuagugcgguagagaucggcaauggguguuucgaaacaaaacauaagugcaaccagaccugcuuagaucggauugcagccggaacuuuuaaugcuggugaguucagccugcccaccuuugacucccuaaacaucacagccgcaucucucaaugaugacggccuggauaaccacaccauccuuuuguauuacagcacugccgcuucaagucuggccguuacacucaugauugcaauauucguggucuauauggugucccgugacaacgucagcuguucuaucugccuguga

SEQ ID NO: 156092 - RNA, 1758 nt, Artificial Sequence
  derived and/or modified CDS sequence (opt3) from hemagglutinin__InfluenzaB__AHL93312
augaaggccaucauugugcugcucauggucguuaccagcaacgcugacagaauaugcacaggcaucacuuccucuaauucaccccacgugguaaaaacggcaacccagggggaggugaacgucacaggagugauuccucuuacuaccacaccaaccaagagucauuucgccaaucugaaagguacugaaacaaggggcaaguuguguccgaaaugcuuaaacuguaccgaucuggacguugcgcuagggcggcccaagugcacgggaaagaucccuagcgcucgcguguccauucuccacgagguccgaccagugacuucuggcuguuuucccaucaugcaugaucguaccaaaauaagacaacugccuaaucuucugagggguuacgaacacauccgguugucgacacauaacguaauuaaugccgagaacgcaccagggggacccuauaagaucggcacuucaggcagcugcccuaauauuaccaacgggaauggauucuacgccacaauggcuugggcaguuccgaaaaacgacaagaauaaaaccgccacgaacccacucacuaucgaagugcccuauauauguacagagggugaggaucagauuaccgucuggggcuuucacagugacaaugaaacucagauggcuaagcuguacggggauuccaagccucagaaauucacaucuagcgccaacggagugaccacgcacuaugugucccaaaucggcgguuuuccaaaccagaccgaggacgggggacugccccagucaggccgcauugucguugauuacauggugcagaagaguggcaaaacagggacuaucaccuaucaaagaggaauccucuuaccucagaagguauggugcgcgagcgguaggucuaaagugauuaagggcucccugccacuuauaggggaagcagacuguuugcaugagaaauacggaggccugaauaagucaaagcccuacuauacaggugagcacgccaaagcuaucgggaacugcccgauuugggucaagacuccucuaaaacucgccaauggcaccaaguaccggcccccagcaaaacugcuuaaggaacgcggauucuuuggcgcuaucgccggguuccuggagggagguugggaaggcaugauagcgggguggcauggauauacaagccacggcgcccacgguguggcaguugcugccgauuugaagaguacccaggaggcuauuaacaaaaucacuaagaaucucaacucucuguccgaauuagaggugaaaaaucugcagcgacucagcggggccauggacgagcuucauaacgaaauccuggaguuggaugaaaaggucgacgaccuaagagcagauacgauuucgucucaaaucgagcuggccgugcuccuguccaaugaaggcauuauaaacucagaggacgagcaccuucuggcuuuggaaaggaaacucaagaagaugcugggaccuagugcgguagagaucggcaauggguguuuugaaacaaaacauaagugcaaccagaccugcuuagaucggauugcagccggaacuuucgacgcuggugaguuuagccugcccaccuucgauucccuaaauaucacagccgcaucucucaacgacgauggccuggacaaucacaccauccuuuuguacuauagcacugccgcuucaagucuggccguuacacucaugauugcaauauuuguggucuacauggugucccgugauaacgucagcuguucuaucugccuguga

SEQ ID NO: 156093 - RNA, 1758 nt, Artificial Sequence
  derived and/or modified CDS sequence (opt3) from hemagglutinin__InfluenzaB__AHL93323
augaaggccaucauugugcugcucauggucguuaccagcaacgcugacagaauaugcacaggcaucacuuccucuaauucaccccacgugguaaaaacggcaacccagggggaggugaacgucacaggagugauuccucuuacuaccacaccaaccaagagucauuucgccaaucugaaagguacugaaacaaggggcaaguuguguccgaaaugcuuaaacuguaccgaucuggacguugcgcuagggcggcccaagugcacgggaaagaucccuagcgcucgcguguccauucuccacgagguccgaccagugacuucuggcuguuuucccaucaugcaugaucguaccaaaauaagacaacugccuaaucuucugagggguuacgaacacauccgguugucgacacauaacguaauuaaugccgagaacgcaccagggggacccuauaagaucggcacuucaggcagcugcccuaauauuaccaacgggaauggauucuuugccacaauggcuugggcaguuccgaaaaacgacaagaauaaaaccgccacgaacccacucacuaucgaagugcccuacauauguacagagggugaggaucagauuaccgucuggggcuuccacagugacaaugaaacucagauggcuaagcuguauggggauuccaagccucagaaauuuacaucuagcgccaacggagugaccacgcacuacgugucccaaaucggcgguuucccaaaccagaccgaggacgggggacugccccagucaggccgcauugucguugauuauauggugcagaagaguggcaaaacagggacuaucaccuaccaaagaggaauccucuuaccucagaagguauggugcacaagcgguaggucuaaagugauuaagggcucccugccacuuauaggggaagcggacuguuugcaugagaaauauggaggccugaauaagucaaagcccuacuacacuggugagcacgcaaaagccaucgggaacugcccgauuugggucaagaccccucuaaaacucgcuaauggcacaaaguaucggcccccagccaaacugcuuaaggaacgcggauuuuucggcgcaaucgcuggguuucuggagggagguugggaaggcaugauagccggguggcauggauacaccagccacggcgcgcacgguguggccguugcagcugauuugaagaguacucaggaggccauuaacaaaaucacgaagaaucucaacucucuguccgaauuagaggugaaaaaucugcagcgacucagcggggcuauggacgagcuucauaacgaaauccuggaguuggaugaaaaggucgacgaccuaagagccgauacaauuucgucucaaaucgagcuggcagugcuccuguccaaugaaggcauuauaaacucagaggacgagcaccuucuggccuuggaaaggaaacucaagaagaugcugggaccuagugcuguagagaucggcaauggguguuucgaaaccaaacauaagugcaaccagacuugcuuagaucggauugcggcaggaaccuuugacgccggugaguucagccugcccacauuugauucccuaaauaucaccgcugccucucucaacgacgauggccuggacaaucacacuauccuuuuguauuacagcacagcagccucaagucuggcuguuacgcucaugauugccauauucguggucuauauggugucccgugauaacgucagcuguucuaucugccuguga

SEQ ID NO: 156094 - RNA, 1758 nt, Artificial Sequence
  derived and/or modified CDS sequence (opt3) from hemagglutinin__InfluenzaB__AHL93334
augaaggccaucauugugcugcucauggucguuaccagcaacgcugacagaauaugcacaggcaucacuuccucuaauucaccccacgugguaaaaacggcaacccagggggaggugaacgucacaggagugauuccucuuacuaccacaccaaccaagagucauuucgccaaucugaaagguacugaaacaaggggcaaguuguguccgaaaugccccaacuguaccgauuuagacguugcgcuggggcggccuaagugcacgggaaagaucccaagcgcucgcguguccauucuacacgagguccgacccgugacuucuggcuguuuuccuaucaugcaugaucguaccaaaauaagacaacucccaaaucugcuuagggguuacgaacacauccggcugucgacacauaacguaauuaaugccgagaacgcacccgggggaccuuauaagaucggcacuucaggcagcugcccaaauauuaccaacgggaauggauucuuugccacaauggcuugggcaguuccgaaaaacgacaagaauaaaaccgccacgaaccccuugacuaucgaagugccuuacauauguacagagggugaggaucagauuaccgucuggggcuuccacagugacaaugaaacucagauggcuaagcucuauggggauuccaagccacagaaauuuacaucuagcgccaacggagugaccacgcacuacgugucccaaaucggcgguuuccccaaccagaccgaggacgggggacugccucagucaggccgcauugucguugauuauauggugcagaagaguggcaaaacagggacuaucaccuaccaaagaggaauccugcucccacagaagguauggugcacaagcgguaggucuaaagugauuaagggcuccuuaccccugauaggggaagcggacugucuucaugagaaauauggaggcuugaauaagucaaagccguacuacacuggugagcacgcaaaagccaucgggaacugcccuauuugggucaagaccccacugaaacuagcuaauggcacaaaguaucggcccccugccaaacuccugaaggaacgcggauuuuucggcgcaaucgcuggguuucuugagggagguugggaaggcaugauagccggguggcauggauacaccagccacggcgcgcacgguguggccguugcagcugaucugaagaguacucaggaggccauuaacaaaaucacgaagaauuugaacucucucuccgaacuggaggugaaaaauuuacagcgacugagcggggcuauggacgagcuccauaacgaaauccuugagcuggaugaaaaggucgacgacuugagagccgauacaauuucgucucaaaucgagcuagcagugcugcucuccaaugaaggcauuauaaacucagaggacgagcaucugcuugcccuggaaaggaaauugaagaagaugcucggacccagugcuguagagaucggcaauggguguuucgaaaccaaacacaagugcaaccagacuugccuggaucggauugcggcaggaaccuuugacgccggugaguucagcuuaccaacauuugauucccugaauaucaccgcugccucucuaaacgacgauggccucgacaaucacacuauccugcuuuauuacagcacagcagccucaaguuuggcuguuacgcugaugauugccauauucguggucuauauggugucccgugauaacgucagcuguucuaucugccucuga

SEQ ID NO: 156095 - RNA, 1758 nt, Artificial Sequence; identical to SEQ ID NO: 155037
  derived and/or modified CDS sequence (opt3) from hemagglutinin__InfluenzaB__AHL93345

SEQ ID NO: 156096 - RNA, 1758 nt, Artificial Sequence; identical to SEQ ID NO: 155037
  derived and/or modified CDS sequence (opt3) from hemagglutinin__InfluenzaB__AHL93356

SEQ ID NO: 156097 - RNA, 1758 nt, Artificial Sequence
  derived and/or modified CDS sequence (opt3) from hemagglutinin__InfluenzaB__AHL93367
augaaggccaucauugugcugcucauggucguuaccagcaacgcugacagaauaugcacaggcaucacuuccucuaauucaccccacgugguaaaaacggcaacccagggggaggugaacgucacaggagugauuccucuuacuaccacaccaaccaagagucauuucgccaaucugaaagguacugaaacaaggggcaaguuguguccgaaaugcuuaaacuguaccgaucuggacguugcgcuagggcggcccaagugcacgggaaagaucccuagcgcucgcguguccauucuccacgagguccgaccagugacuucuggcuguuuucccaucaugcaugaucguaccaaaauaagacaacugccuaaucuucugagggguuacgaauauauccgguugucgacacacaacguaauuaaugccgagaacgcaccagggggacccuacaagaucggcacuucaggcagcugcccuaauauuaccaacgggaauggauucuuugccacaauggcuugggcaguuccgaaaaacgacaagaauaaaaccgccacgaacccacucacuaucgaagugcccuauauauguacagagggugaggaucagauuaccgucuggggcuuccauagugacaaugaaacucagauggcuaagcuguacggggauuccaagccucagaaauuuacaucuagcgccaacggagugaccacgcacuaugugucccaaaucggcgguuucccaaaccagaccgaggacgggggacugccccagucaggccgcauugucguugauuacauggugcagaagaguggcaaaacagggacuaucaccuaucaaagaggaauccucuuaccucagaagguauggugcgcgagcgguaggucuaaagugauuaagggcucccugccacuuauaggggaagcagacuguuugcacgagaaauacggaggccugaauaagucaaagcccuacuauacaggugagcaugccaaagcuaucgggaacugcccgauuugggucaagacuccucuaaaacucgccaauggcaccaaguaccggcccccagcaaaacugcuuaaggaacgcggauuuuucggcgcuaucgccggguuucuggagggagguugggaaggcaugauagcgggguggcacggauauacaagccauggcgcccacgguguggcaguugcugccgauuugaagaguacccaggaggcuauuaacaaaaucacuaagaaucucaacucucuguccgaauuagaggugaaaaaucugcagcgacucagcggggccauggacgagcuucacaacgaaauccuggaguuggaugaaaaggucgacgaccuaagagcagauacgauuucgucucaaaucgagcuggccgugcuccuguccaaugaaggcauuauaaacucagaggacgagcaucuucuggcuuuggaaaggaaacucaagaagaugcugggaccuagugcgguagagaucggcaauggguguuucgaaacaaaacacaagugcaaccagaccugcuuagaucggauugcagccggaacuuuugacgcuggugaguucagccugcccaccuuugauucccuaaauaucacagccgcaucucucaacgacgauggccuggacaaucauaccauccuuuuguacuauagcacugccgcuucaagucuggccguuacacucaugauugcaauauucguggucuacauggugucccgugauaacgucagcuguucuaucugccuguga

SEQ ID NO: 156098 - RNA, 1758 nt, Artificial Sequence; identical to SEQ ID NO: 155037
  derived and/or modified CDS sequence (opt3) from hemagglutinin__InfluenzaB__AHL93378

SEQ ID NO: 156099 - RNA, 1758 nt, Artificial Sequence
  derived and/or modified CDS sequence (opt3) from hemagglutinin__InfluenzaB__AHL93389
augaaggccaucauugugcugcucauggucguuaccagcaacgcugacagaauaugcacaggcaucacuuccucuaauucaccccacgugguaaaaacggcaacccagggggaggugaacgucacaggagugauuccucuuacuaccacaccaaccaagaguuacuucgccaaucugaaagguacugaaacaaggggcaaguuguguccgaaaugcuuaaacuguaccgaucuggacguugcgcuagggcggcccaagugcacgggaaagaucccuagcgcucgcguguccauucuccaugagguccgaccagugacuucuggcuguuuucccaucaugcacgaucguaccaaaauaagacaacugccuaaucuucugagggguuaugaacauauccgguugucgacacacaacguaauuaaugccgagaacgcaccagggggacccuacaagaucggcacuucaggcagcugcccuaauauuaccaacgggaauggauucuuugccacaauggcuugggcaguuccgaaaaacgacaagaauaaaaccgccacgaacccacucacuaucgaagugcccuauauauguacagagggugaggaucagauuaccgucuggggcuuccauagugacaaugaaacucagauggcuaagcuguacggggauuccaagccucagaaauuuacaucuagcgccaacggagugaccacgcacuaugugucccaaaucggcgguuucccaaaccagaccgaggacgggggacugccccagucaggccgcauugucguugauuacauggugcagaagaguggcaaaacagggacuaucaccuaucaaagaggaauccucuuaccucagaagguauggugcgcgagcgguaggucuaaagugauuaagggcucccugccacuuauaggggaagcagacuguuugcacgagaaauacggaggccugaauaagucaaagcccuacuauacaggugagcaugccaaagcuaucgggaacugcccgauuugggucaagacuccucuaaaacucgccaauggcaccaaguaccggcccccagcaaaacugcuuaaggaacgcggauuuuucggcgcuaucgccggguuucuggagggagguugggaaggcaugauagcgggguggcacggauauacaagccauggcgcccacgguguggcaguugcugccgauuugaagaguacccaggaggcuauuaacaaaaucacuaagaaucucaacucucuguccgaauuagaggugaaaaaucugcagcgacucagcggggccauggacgagcuucacaacgaaauccuggaguuggaugaaaaggucgacgaccuaagagcagauacgauuucgucucaaaucgagcuggccgugcuccuguccaaugaaggcauuauaaacucagaggacgagcaucuucuggcuuuggaaaggaaacucaagaagaugcugggaccuagugcgguagagaucggcaauggguguuucgaaacaaaacacaagugcaaccagaccugcuuagaucggauugcagccggaacuuuugacgcuggugaguucagccugcccaccuuugauucccuaaauaucacagccgcaucucucaacgacgauggccuggacaaucauaccauccuuuuguacuauagcacugccgcuucaagucuggccguuacacucaugauugcaauauucguggucuacauggugucccgugauaacgucagcuguucuaucugccuguga

SEQ ID NO: 156100 - RNA, 1758 nt, Artificial Sequence; identical to SEQ ID NO: 155037
  derived and/or modified CDS sequence (opt3) from hemagglutinin__InfluenzaB__AHL93400

SEQ ID NO: 156101 - RNA, 1758 nt, Artificial Sequence; identical to SEQ ID NO: 155370
  derived and/or modified CDS sequence (opt3) from hemagglutinin__InfluenzaB__AHL93411

SEQ ID NO: 156102 - RNA, 1758 nt, Artificial Sequence; identical to SEQ ID NO: 155370
  derived and/or modified CDS sequence (opt3) from hemagglutinin__InfluenzaB__AHL93422

SEQ ID NO: 156103 - RNA, 1758 nt, Artificial Sequence; identical to SEQ ID NO: 155370
  derived and/or modified CDS sequence (opt3) from hemagglutinin__InfluenzaB__AHL93433

SEQ ID NO: 156104 - RNA, 1758 nt, Artificial Sequence; identical to SEQ ID NO: 155037
  derived and/or modified CDS sequence (opt3) from hemagglutinin__InfluenzaB__AHL93444

SEQ ID NO: 156105 - RNA, 1758 nt, Artificial Sequence
  derived and/or modified CDS sequence (opt3) from hemagglutinin__InfluenzaB__AHL93455
augaaggccaucauugugcugcucauggucguuaccagcaacgcugacagaauaugcacaggcaucacuuccucuaauucaccccacgugguaaaaacggcaacccagggggaggugaacgucacaggagugauuccucuuacuaccacaccaaccaagagucauuucgccaaucugaaagguacugaaacaaggggcaaguuguguccgaaaugcuuaaacuguaccgaucuggacguugcgcuagggcggcccaagugcacgggaaagaucccuagcgcucgcguguccauucuccacgagguccgaccagugacuucuggcuguuuucccaucaugcaugaucguaccaaaauaagacaacugccuaaucuucugagggguuacgaacacauccgguugucgacacauaacguaauuaaugccgagaacgcaccagggggacccuauaagaucggcacuucaggcagcugcccuaauauuaccaacgggaauggauucuuugccacaauggcuugggcaguuccgaaaaacgacaagaauaaaaccgccacgaacccacucacuaucgaagugcccuacauauguacagagggugaggaucagauuaccgucuggggcuuccacagugacaaugaaacucagauggcuaagcuguauggggauuccaagccucagaaauuuacaucuagcgccaacggagugaccacgcacuacgugucccaaaucggcgguuucccaaaccagaccgaggacgggggacugccccagucaggccgcauugucguugauuauauggugcagaagaguggcaaaacagggacuaucaccuaccaaagaggaauccucuuaccucagaagguauggugcgcgagcgguaggucuaaagugauuaagggcucccugccacuuauaggggaagcagacuguuugcaugagaaauauggaggccugaauaagucaaagcccuacuacacaggugagcacgccaaagcuaucgggaacugcccgauuugggucaagacuccucuaaaacucgccaauggcaccaaguaucggcccccagcaaaacugcuuaaggaacgcggauuuuucggcgcuaucgccggguuucuggagggagguugggaaggcaugauagcgggguggcauggauacacaagccacggcgcccacgguguggcaguugcugccgauuugaagaguacccaggaggcuauuaacaaaaucacuaagaaucucaacucucuguccgaauuagaggugaaaaaucugcagcgacucagcggggccaugaacgagcuucauaaugaaauccuggaguuggacgaaaaggucgaugaccuaagagcagacacgauuucgucucaaaucgagcuggccgugcuccuguccaacgaaggcauuauaaauucagaggaugagcaccuucuggcuuuggaaaggaaacucaagaagaugcugggaccuagugcgguagagaucggcaacggguguuucgaaacaaaacauaagugcaaucagaccugcuuagaccggauugcagccggaacuuuugaugcuggugaguucagccugcccaccuuugacucccuaaacaucacagccgcaucucucaaugaugacggccuggauaaccacaccauccuuuuguauuacagcacugccgcuucaagucuggccguuacacucaugauugcaauauucguggucuauauggugucccgugacaacgucagcuguucuaucugccuguga

SEQ ID NO: 156106 - RNA, 1758 nt, Artificial Sequence; identical to SEQ ID NO: 155037
  derived and/or modified CDS sequence (opt3) from hemagglutinin__InfluenzaB__AHL93466

SEQ ID NO: 156107 - RNA, 1758 nt, Artificial Sequence; identical to SEQ ID NO: 154656
  derived and/or modified CDS sequence (opt3) from hemagglutinin__InfluenzaB__AHL93477

SEQ ID NO: 156108 - RNA, 1758 nt, Artificial Sequence; identical to SEQ ID NO: 154731
  derived and/or modified CDS sequence (opt3) from hemagglutinin__InfluenzaB__AHL93488

SEQ ID NO: 156109 - RNA, 1755 nt, Artificial Sequence
  derived and/or modified CDS sequence (opt3) from hemagglutinin__InfluenzaB__AHL93499
augaaggccaucauugugcugcucauggucguuaccagcaacgcugacagaauaugcacaggcaucacuuccucuaauucaccccacgugguaaaaacggcaacccagggggaagugaacgucacaggagugauuccucuuacuaccacaccaaccaagaguuacuucgccaaucugaaagguacuaggacacggggcaaguuguguccggauugcuuaaacuguaccgaccuggauguugcgcuagggcgccccaugugcgugggaacgacuccuagcgcuaaagccuccauccuccaugaaauucgaccagucaccucuggcuguuuucccaucaugcacgaccguacaaagauaagacaacugccuaaucuucugagggguuaugagaacauccgguugucgacucagaaugugauugaugcagaaaaggccccagggggacccuaccgccucggcaccucaggcagcugcccuaacgcuacaaguaaaaucggguucuuugcaaccauggccugggcuguaccaaaggacaauuauaaaaacgccacgaauccgcugacuguugaggugcccuacauuuguacagaaggagaggaucagaucaccgucugggguuuccauuccgacaacaagacucagaugaaaaaucuguauggcgauucuaacccucaaaaguuuacaagcuccgcgaauggggugaccgcacacuacgugucacagauaggagacuucccagaucagacggaggacggcggucucccccagagugggagaauugucguugauuauaugaugcaaaagccuggaaaaaccggcacaaucguguaccagaggggcguauuacugccacagaagguguggugcgccagcgggcggucuaaagucauuaagggaucccuucccuugaucggugaagcugacugucugcaugagaaauacggcgggcuaaacaagucaaaaccguauuacacuggagaacacgccaaggcaaucggcaacugcccuauuugggugaagaccccucucaaacuggcuaaugguacaaaguaucgcccacccgccaaacuucugaaggagcgaggguuuuucggcgcgauagccggauuuuuggagggcgggugggaaggaaugaucgcagguuggcacggcuacacuagccauggggcucacggaguugccguggcugccgaccucaaaaguacccaggaggcaauuaacaagaucacaaagaaucugaacucuuuauccgaacuggaggucaaaaaucuccaaagacuuagcggcgccauggaugaacugcauaacgagauauuggagcuagacgaaaagguggaugaccugagggcugauaccauuucgucucagaucgagcucgcgguacugcuuuccaaugaagguaucauuaacucagaggacgaacaccuguuggcacucgagcggaaacugaagaaaauguuagggcccagugccguugauaucggcaauggauguuucgagacuaagcacaagugcaaccagacgugccuggaccguauugcugccggcacauuuaaugcaggggaguucagccuaccaaccuuugauucccucaacauaacugccgcuucucugaaugacgauggacuugacaaccauaccaucuugcuguauuacagcacagccgcaucaagucucgcggugacccugaugcuugcuauuuucaucgucuauauggugucccgcgacaaugucagcuguucuaucugccuguga

SEQ ID NO: 156110 - RNA, 1758 nt, Artificial Sequence; identical to SEQ ID NO: 154656
  derived and/or modified CDS sequence (opt3) from hemagglutinin__InfluenzaB__AHL93510

SEQ ID NO: 156111 - RNA, 1755 nt, Artificial Sequence
  derived and/or modified CDS sequence (opt3) from hemagglutinin__InfluenzaB__AHL93521
augaaggccaucauugcucugcucaugguggucaccagcaacgcagacagaauaugcacaggcaucacuuccucuaauucaccccacguugugaaaacggccacccagggggaaguaaacgugacaggagucauuccucuuacuaccacaccaaccaagaguuacuucgcgaaucugaaagguacuaggacacggggcaaguuguguccggauugcuuaaacuguaccgaccuggauguggcucuagggcgccccaugugcguuggaacgacuccuagcgccaaagcauccauccuccaugaagugcgaccagucaccucuggcuguuuucccauuaugcacgaccguacaaagaucagacaacugccuaaucuucugagggguuaugagaacauacgguugucgacucagaaugugaucgaugccgaaaaggcuccagggggacccuaccgccucggcaccucaggcagcugcccuaacgcaacaaguaaaauuggguucuuugccaccauggcuugggccguaccaaaggacaauuauaaaaacgcgacgaauccgcugacuguugaggugcccuacaucuguacagaaggagaggaucagauuaccgucugggguuuccauuccgacaacaagacucagaugaaaaaucuguauggcgauucuaacccucaaagauuuacaagcuccgcaaauggggugaccacgcacuacgugucacagaucggagacuucccagaucagaccgaggacggcggucucccccagagugggaggauagucguugauuauauggugcaaaagccuggaaagacaggcacuauuguauaccagcggggcguguuacugccacagaaagucuggugcgccagcgggcgcucuaaggugaucaaaggaucccuucccuugauuggugaagcugacugucugcaugagaaguacggcgggcuaaacaaaucaaagccguauuacaccggagaacacgccaaagcaaucggcaacugcccuaucuggguuaagacaccccucaagcuggcuaaugguacuaaauaucgaccuccagccaaacuucugaaggagagaggguuuuucggcgcgauugccggauuuuuggagggcgggugggaaggaaugauagcagguuggcacggcuacaccagccauggggcucacggaguggccgucgcugccgaccucaagaguacacaggaggcaaucaacaaaauuaccaagaaucugaacucuuuauccgaacuggaggugaagaaucuccaaaggcuuagcggcgccauggaugaacugcauaacgagaucuuggagcuagacgaaaaaguagaugaccugcgggcugauacuauaucgucucagauugagcucgcgguucugcuuuccaaugaagguaucaucaacucagaggacgaacaccuguuggcacucgagcguaagcugaaaaagauguuagggcccagugccguggauauuggcaauggauguuucgagacgaaacacaagugcaaccagacaugccuggaccgcaucgcugccggcaccuuuaaugcaggggaguucagccuaccaacuuuugauucccucaacauuaccgccgcuucucugaaugacgauggacuugacaaccauacaauauugcuguauuacagcaccgccgcaucaagucucgcggucacucugaugcuugcuaucuucauuguguauauggucuccagagacaaugugagcuguucuaucugccuguga

SEQ ID NO: 156112 - RNA, 1758 nt, Artificial Sequence; identical to SEQ ID NO: 154731
  derived and/or modified CDS sequence (opt3) from hemagglutinin__InfluenzaB__AHL93532

SEQ ID NO: 156113 - RNA, 1758 nt, Artificial Sequence; identical to SEQ ID NO: 154693
  derived and/or modified CDS sequence (opt3) from hemagglutinin__InfluenzaB__AHL93543

SEQ ID NO: 156114 - RNA, 1758 nt, Artificial Sequence; identical to SEQ ID NO: 154693
  derived and/or modified CDS sequence (opt3) from hemagglutinin__InfluenzaB__AHL93554

SEQ ID NO: 156115 - RNA, 1758 nt, Artificial Sequence; identical to SEQ ID NO: 154693
  derived and/or modified CDS sequence (opt3) from hemagglutinin__InfluenzaB__AHL93565

SEQ ID NO: 156116 - RNA, 1758 nt, Artificial Sequence; identical to SEQ ID NO: 154731
  derived and/or modified CDS sequence (opt3) from hemagglutinin__InfluenzaB__AHL93576

SEQ ID NO: 156117 - RNA, 1758 nt, Artificial Sequence; identical to SEQ ID NO: 154731
  derived and/or modified CDS sequence (opt3) from hemagglutinin__InfluenzaB__AHL93587

SEQ ID NO: 156118 - RNA, 1758 nt, Artificial Sequence
  derived and/or modified CDS sequence (opt3) from hemagglutinin__InfluenzaB__AHL93609
augaaggccaucauugugcugcucauggucguuaccagcaacgcugacagaauaugcacaggcaucacuuccucuaauucaccccacgugguaaaaacggcaacccagggggaggugaacgucacaggagugauuccucuuacuaccacaccaaccaagagucauuucgccaaucugaaagguacugaaacaaggggcaaguuguguccgaaaugccccaacuguaccgauuuagacguugcgcuggggcggccuaagugcacgggaaagaucccaagcgcucgcguguccauucuacacgagguccgacccgugacuucuggcuguuuuccuaucaugcaugaucguaccaaaauaagacaacucccaaaucugcuuagggguuacgaacacauccggcugucgacacauaacguaauuaaugccgagaacgcacccgggggaccuuauaagaucggcacuucaggcagcugcccaaauguuaccaacgggaauggauucuuugccacaauggcuugggcagugccgaaaaacgacaagaauaaaaccgccacgaaccccuugacuauugaagucccuuacaucuguacagagggugaggaucagauaaccguguggggcuuccacagugacaaugaaacucagauggcuaagcucuauggggauuccaagccacagaaauuuacaucuagcgccaacggagugaccacgcacuacgucucccaaauuggcgguuuccccaaccagaccgaggacgggggacugccucagucaggccgcaucguuguggauuauaugguacagaagaguggcaaaacagggacuauuaccuaccaaagaggaauccugcucccacagaagguguggugcgcgagcgguaggucuaaagucaucaagggcuccuuaccccugauuggggaagcagacugucuucaugagaaauauggaggcuugaauaagucaaagccguacuacacaggugagcacgccaaagcuauagggaacugcccuaucugggugaagacuccccugaaacuagccaauggcaccaaguaucggccuccagcaaaacuccugacagaacgcggauuuuucggcgcuauugccggguuucuugagggagguugggaaggcaugaucgcgggguggcauggauacaccagccacggcgcccacgguguugcaguggcugccgaucugaagaguacucaggaggcuauaaacaagauuacgaaaaauuugaacucucucuccgaacuggaggucaagaauuuacagcgacugagcggggccauggacgagcuccauaacgaaauccuugagcuggaugaaaaaguggacgacuugagagcagauacaaucucgucucaaauugagcuagccguacugcucuccaaugaaggcaucauuaacucagaggacgagcaucugcuugcucuggaaaggaaguugaaaaagaugcucggacccagugcgguugagauaggcaauggguguuucgaaaccaagcacaaaugcaaccagacuugccuggaucggaucgcagccggaaccuuugacgcuggugaguucagcuuaccaacauuugauucccugaauauuaccgccgcaucucuaaacgacgauggccucgacaaucacacuauccugcuuuauuacagcacagccgcuucaaguuuggccgugacgcugaugaucgcaauuuucgucguguauauggucucccgugauaacgugagcuguucuauaugccucuga

SEQ ID NO: 156119 - RNA, 1758 nt, Artificial Sequence; identical to SEQ ID NO: 154731
  derived and/or modified CDS sequence (opt3) from hemagglutinin__InfluenzaB__AHL93620

SEQ ID NO: 156120 - RNA, 1758 nt, Artificial Sequence; identical to SEQ ID NO: 156118
  derived and/or modified CDS sequence (opt3) from hemagglutinin__InfluenzaB__AHL93631

SEQ ID NO: 156121 - RNA, 1758 nt, Artificial Sequence; identical to SEQ ID NO: 156118
  derived and/or modified CDS sequence (opt3) from hemagglutinin__InfluenzaB__AHL93642

SEQ ID NO: 156122 - RNA, 1755 nt, Artificial Sequence
  derived and/or modified CDS sequence (opt3) from hemagglutinin__InfluenzaB__AHL93653
augaaggccaucauugugcugcucauggucguuaccagcaacgcugacagaauaugcacaggcaucacuuccucuaauucaccccacgugguaaaaacggcaacccagggggaagugaacgucacaggagugauuccucuuacuaccacaccaaccaagaguuacuucgccaaucugaaagguacuaggacacggggcaaguuguguccggauugcuuaaacuguaccgaccuggauguugcgcuagggcgccccaugugcgugggaacgacuccuagcgcuaaagccuccauccuccaugaaguccgaccagugaccucuggcuguuuucccauuaugcacgaccguacaaagaucagacaacugccuaaucuucugagggguuaugagaacauacgguugucgacucagaauguaaucgaugcagaaaaggccccagggggacccuaccgccucggcaccucaggcagcugcccuaacgcuacaaguaaaauuggguucuuugcaaccauggccugggcuguuccaaaggacaauuauaaaaacgccacgaauccgcugacuguggagguccccuacaucuguacagaaggagaggaucagauuaccgugugggguuuccauuccgacaacaagacucagaugaaaaaucuguauggcgauucuaacccucaaaaguuuacaagcuccgcgaauggggugaccacgcacuacgucucacagaucggagacuucccagaucagaccgaggacggcggucucccccagagugggagaauaguuguggauuauaugguacaaaagccuggaaaaacaggcacuauuguguaccagaggggcgucuuacugccacagaagguguggugcgcaagcgggcggucuaaaguuaucaagggaucccuucccuugauuggugaagccgacugucugcaugagaaauacggcgggcuaaacaagucaaaaccguauuacaccggagaacacgcuaaggccaucggcgacugcccuaucugggugaagacaccccucaaacuggcaaacgguacuaaguaucgcccuccagcuaaacuucugaaggagcgaggguuuuucggcgccauugcgggauuuuuggagggcgggugggaaggaaugauagccgguuggcacggcuacaccagccauggggcacacggagucgcuguggccgcugaucucaaaaguacacaggaggccaucaauaagauuaccaagaacuuaaauucucuguccgaacuggagguuaaaaaccuccaaagacuuagcggcgcaauggacgaacugcauaaugagaucuuggagcuagaugaaaagguagacgaucugagggccgacacuauaucgucucagauugagcucgcugugcugcuuuccaacgaagguaucaucaauucagaggaugaacaccuguuggcgcucgagcggaaacugaagaaaauguuagggcccagugcagucgacauuggcaacggauguuucgagacgaagcacaagugcaaucagacaugccuggaucguaucgccgcuggcaccuuuaacgccggggaguucagccuaccaacuuuugacucccucaauauuaccgcagccucucugaacgaugacggacuugacaaucauacaauauugcuguauuacagcaccgcugccucaagucucgcagugacucugaugcuugcgaucuucauugucuauauggugucccgcgauaacguuagcuguucuaucugccuguga

SEQ ID NO: 156123 - RNA, 1758 nt, Artificial Sequence; identical to SEQ ID NO: 154731
  derived and/or modified CDS sequence (opt3) from hemagglutinin__InfluenzaB__AHL93664

SEQ ID NO: 156124 - RNA, 1758 nt, Artificial Sequence; identical to SEQ ID NO: 154656
  derived and/or modified CDS sequence (opt3) from hemagglutinin__InfluenzaB__AHL93675

SEQ ID NO: 156125 - RNA, 1758 nt, Artificial Sequence; identical to SEQ ID NO: 156118
  derived and/or modified CDS sequence (opt3) from hemagglutinin__InfluenzaB__AHL93686

SEQ ID NO: 156126 - RNA, 1758 nt, Artificial Sequence; identical to SEQ ID NO: 156118
  derived and/or modified CDS sequence (opt3) from hemagglutinin__InfluenzaB__AHL93697

SEQ ID NO: 156127 - RNA, 1758 nt, Artificial Sequence
  derived and/or modified CDS sequence (opt3) from hemagglutinin__InfluenzaB__AHL93708
augaaggccaucauugugcugcucauggucguuaccagcaacgcugacagaauaugcacaggcaucacuuccucuaauucaccccacgugguaaaaacggcaacccagggggaagugaacgucacaggagugauuccucuuacuaccacaccaaccaagagucauuucgccaaucugaaagguacugaaacaaggggcaaguuguguccgaaaugccccaacuguaccgauuuagacguugcgcuggggcggccuaagugcacgggaaagaucccaagcgcucgcguguccauucuacacgagguccgacccgugacuucuggcuguuuuccuaucaugcaugaucguaccaaaauaagacaacucccaaaucugcuuagggguuacgaacacauccggcugucgacacauaacguaauuaaugccgagaacgcacccgggggaccuuauaagaucggcacuucaggcagcugcccaaauguuaccaacgggaauggauucuuugccacaauggcuugggcagugccgaaaaacgacaagaauaaaaccgccacgaaccccuugacuauugaagucccuuacaucuguacagagggugaggaucagauaaccguguggggcuuccacagugacaaugaaacucagauggcuaagcucuauggggauuccaagccacagaaauuuacaucuagcgccaacggagugaccacgcacuacgucucccaaauuggcgguuuccccaaccagaccgaggacgggggacugccucagucaggccgcaucguuguggauuauaugguacagaagaguggcaaaacagggacuauuaccuaccaaagaggaauccugcucccacagaagguguggugcgcgagcgguaggucuaaagucaucaagggcuccuuaccccugauuggggaagcagacugucuucaugagaaauauggaggcuugaauaagucaaagccguacuacacagguaaacacgccaaggcuauagggaacugcccuaucugggugaaaacuccccugaagcuagccaauggcaccaaauaucggccuccagcaaagcuccugacagagcgcggauuuuucggcgcuauugccggguuucuugaaggagguugggagggcaugaucgcgggguggcauggauacaccagccacggcgcccacgguguugcaguggcugccgaucugaagaguacucaggaagcuauaaacaaaauuacgaagaauuugaacucucucuccgagcuggaagucaaaaauuuacagcgacugagcggggccauggacgagcuccauaacgagauccuugaacuggaugagaagguggacgacuugagagcagauacaaucucgucucaaauugaacuagccguacugcucuccaaugagggcaucauuaacucagaagacgagcaucugcuugcucuggagaggaaauugaagaagaugcucggacccagugcgguugaaauaggcaauggguguuucgagaccaaacacaagugcaaccagacuugccuggaucggaucgcagccggaaccuuugacgcuggugaguucagcuuaccaacauuugauucccugaauauuaccgccgcaucucuaaacgacgauggccucgacaaucacacuauccugcuuuauuacagcacagccgcuucaaguuuggccgugacgcugaugaucgcaauuuucgucguguauauggucucccgugauaacgugagcuguucuauaugccucuga

SEQ ID NO: 156128 - RNA, 1758 nt, Artificial Sequence
  derived and/or modified CDS sequence (opt3) from hemagglutinin__InfluenzaB__AHL93719
augaaggccaucauugugcugcucauggucguuaccagcaacgcugacagaauaugcacaggcaucacuuccucuaauucaccccacauugugaaaacggcaacccagggggagguaaacgugacaggagucaucccucuuacuaccacaccaaccaagagucauuucgccaaucugaaagguacugaaacaaggggcaaguuguguccgaaaugcuuaaacuguaccgaucuggacguggcgcuagggcggcccaagugcacgggaaagauuccuagcgcucgcguuuccauccuccacgaggugauaccagucacuucuggcuguuuucccaucaugcaugaucgaaccaaaauucgucaacugccuaaucuucugagagguuacgaacacaucagguugucgacacauaacgugauuaaugccgagaacgcaccagggggacccuauaagaucggcacuucaggcagcugcccuaauauaaccaacgggaauggauucuuugccacaauggcuugggcaguaccgaaaaacgacaagaauaaaaccgccacgaacccacucacuauugaaguucccuacaucuguacagagggugaggaucagauuaccguguggggcuuccacagugacaaugaaacucagauggcuaagcuguauggggauuccaagccucagaaauuuacaucuagcgccaacggagucaccacgcacuacgugucccaaaucggcgguuucccaaaccagaccgaggacgggggacugccccagucaggccggaucguggucgauuauaugguucagaagaguggcaaaacagggacuauuaccuaccaacgcggaauacucuuaccucagaagguguggugcgcgagcgguagaucuaaaguaaucaagggcucccugccacuuauuggggaagcagacuguuugcaugagaaauauggaggccugaauaagucaaagcccuacuacacaggugagcacgccaaagcuaucgggaacugcccgauaugggugaagacuccucuaaaacucgccaauggcaccaaguauaggcccccagcaaaacugcuuaaggaacggggauuuuucggcgcuauugccggguuucuggagggagguugggaaggcaugaucgcgggguggcauggauacacaagccacggcgcccacggugucgcaguggcugccgauuugaagaguacccaggaggcuaucaacaaaauuacuaagaaucucaacucucuguccgaauuagagguuaaaaaucugcagcgccucagcggggccauggacgagcuucauaacgaaauccuggaguuggaugaaaagguggacgaccuacgagcagauacgauuucgucucaaauagagcuggccguccuccuguccaaugaaggcaucauuaacucagaggacgagcaccuucuggcuuuggaaagaaaacucaagaagaugcugggaccuagugcgguggagaucggcaauggguguuucgaaacaaaacauaagugcaaccagaccugcuuagauaggaucgcagccggaacuuuugacgcuggugaguucagccugcccaccuuugauucccuaaauauuacagccgcaucucucaacgacgauggccuggacaaucacaccauacuuuuguauuacagcacugccgcuucaagucuggccguaacacucaugaucgcaauuuucguuguguauauggucucccgggauaacgugagcuguucuaucugccuguga

SEQ ID NO: 156129 - RNA, 1758 nt, Artificial Sequence; identical to SEQ ID NO: 154731
  derived and/or modified CDS sequence (opt3) from hemagglutinin__InfluenzaB__AHL93730

SEQ ID NO: 156130 - RNA, 1758 nt, Artificial Sequence; identical to SEQ ID NO: 154731
  derived and/or modified CDS sequence (opt3) from hemagglutinin__InfluenzaB__AHL93741

SEQ ID NO: 156131 - RNA, 1758 nt, Artificial Sequence; identical to SEQ ID NO: 154693
  derived and/or modified CDS sequence (opt3) from hemagglutinin__InfluenzaB__AHL93752

SEQ ID NO: 156132 - RNA, 1758 nt, Artificial Sequence; identical to SEQ ID NO: 156118
  derived and/or modified CDS sequence (opt3) from hemagglutinin__InfluenzaB__AHL93763

SEQ ID NO: 156133 - RNA, 1758 nt, Artificial Sequence; identical to SEQ ID NO: 154656
  derived and/or modified CDS sequence (opt3) from hemagglutinin__InfluenzaB__AHL93774

SEQ ID NO: 156134 - RNA, 1758 nt, Artificial Sequence; identical to SEQ ID NO: 156118
  derived and/or modified CDS sequence (opt3) from hemagglutinin__InfluenzaB__AHL93785

SEQ ID NO: 156135 - RNA, 1758 nt, Artificial Sequence; identical to SEQ ID NO: 154731
  derived and/or modified CDS sequence (opt3) from hemagglutinin__InfluenzaB__AHL93796

SEQ ID NO: 156136 - RNA, 1758 nt, Artificial Sequence; identical to SEQ ID NO: 154656
  derived and/or modified CDS sequence (opt3) from hemagglutinin__InfluenzaB__AHL93818

SEQ ID NO: 156137 - RNA, 1758 nt, Artificial Sequence
  derived and/or modified CDS sequence (opt3) from hemagglutinin__InfluenzaB__AHL93829
augaaggccaucauugugcugcucauggucguuaccagcaacgcugacagaauaugcacaggcaucacuuccucuaauucaccccacauugugaaaacggcaacccagggggagguaaacgugacaggagucaucccucuuacuaccacaccaaccaagagucauuucgccaaucugaaagguacugaaacaaggggcaaguuguguccgaaaugcuuaaacuguaccgaucuggacguggcgcuagggcggcccaagugcacgggaaagauuccuagcgcucgcguuuccauccuccacgaggugcgaccagucacuucuggcuguuuucccauaaugcaugaucguaccaaaaucagacaacugccuaaucuucugagggguuacgaacacauucgguugucgacacauaacgugaucaauacugagaacgccccagggggacccuauaagauuggcaccucaggcagcugcccuaauaucacaaacgggaauggauucuuugcaaccauggccugggcuguaccgaaaaacgacaagaauaaaacggcaacuaacccacucacaauagaaguucccuacauuuguaccgagggugaggaucagaucacuguguggggcuuccacagugacaaugaaacacagauggccaagcuguauggggauuccaagccucagaaauuuaccucuagcgcuaacggagucacgacccacuacgugucccaaauuggcgguuucccaaaccagacagaggacgggggacugccccagucaggccgcaucguggucgauuauaugguucagaagaguggcaaaacugggaccaucacauaccaaagagguauucucuuaccucagaagguguggugcgccagcggaaggucuaaaguaauaaagggcucccugccacuuaucggggaagcggacuguuugcaugagaaauauggaggccugaauaagucaaagcccuacuacacuggugagcacgcaaaagccauugggaacugcccgaucugggugaagaccccucuaaaacucgcuaauggcacaaaguaucggcccccagccaaacugcuuaaggaacgcggauuuuucggcgcaauagcuggguuucuggagggagguugggaaggcaugauugccggguggcauggauacaccagccacggcgcgcacggugucgccguggcagcugauuugaagaguacucaggaggccaucaacaaaaucacgaagaaucucaacucucuguccgaauuagagguuaaaaaucugcagcgacucagcggggcuauggacgagcuucauaacgaaauucuggaguuggaugaaaagguggacgaccuaagagccgauacaaucucgucucaaauugagcuggcaguccuccuguccaaugaaggcauaaucaacucagaggacgagcaccuucuggccuuggaaaggaaacucaagaagaugcugggaccuagugcuguggagauuggcaauggguguuucgaaaccaaacauaagugcaaccagacuugcuuagaucggaucgcggcaggaaccuuugacgccggugaguucagccugcccacauuugauucccuaaauaucaccgcugccucucucaacgacgauggccuggacaaucacacuauucuuuuguauuacagcacagcagccucaagucuggcuguaacgcucaugauagccaucuucguuguguauauggucucccgugauaacgugagcuguucuauuugccuguga

SEQ ID NO: 156138 - RNA, 1758 nt, Artificial Sequence; identical to SEQ ID NO: 155037
  derived and/or modified CDS sequence (opt3) from hemagglutinin__InfluenzaB__AHL93840

SEQ ID NO: 156139 - RNA, 1758 nt, Artificial Sequence; identical to SEQ ID NO: 154731
  derived and/or modified CDS sequence (opt3) from hemagglutinin__InfluenzaB__AHL93851

SEQ ID NO: 156140 - RNA, 1758 nt, Artificial Sequence; identical to SEQ ID NO: 154731
  derived and/or modified CDS sequence (opt3) from hemagglutinin__InfluenzaB__AHL93862

SEQ ID NO: 156141 - RNA, 1758 nt, Artificial Sequence
  derived and/or modified CDS sequence (opt3) from hemagglutinin__InfluenzaB__AHL93873
augaaggccaucauugugcugcucauggucguuaccagcaacgcugacagaauaugcacaggcaucacuuccucuaauucaccccacauugugaaaacggcaacccagggggaaguaaacgugacaggagucaucccucuuacuaccacaccaaccaagagucauuucgccaaucugaaagguacugaaacaaggggcgaguuguguccgaagugcuuaaacuguaccgaucuggacguggcgcuagggcggcccaaaugcacgggaaagauuccuagcgcucgcguuuccauccuccacgaagugcgaccagucacuucuggcuguuuucccauaaugcaugaucguaccaagaucagacaacugccuaaucuucugagggguuacgagcacauucgguugucgacacauaacgugaucaaugccgaaaacgcaccagggggacccuauaaaauuggcacuucaggcagcugcccuaauaucaccaacgggaauggauucuuugccacaauggcuugggcaguaccaaagaacgacaaaaauaagaccgccacgaacccgcucacuauagagguucccuacauuuguacagagggugaagaucagaucaccguguggggcuuccacagugacaaugagacucagauggcuaaacuguauggggauuccaagccucagaaguuuacaucuagcgccaacggagucaccacgcacuacgugucccaaauuggcgguuucccaaaccagaccgaagacgggggacugccccagucaggccgcaucguggucgauuauaugguucagaaaaguggcaagacagggacuaucaccuaccaaagagguauucucuuaccucagaaaguguggugcgcgagcggaaggucuaagguaauaaaaggcucccugccacuuaucggggaggcagacuguuugcaugagaaguauggaggccugaauaaaucaaagcccuacuacacaggugaacacgccaaggcuauugggaacugcccgaucugggugaaaacuccucuaaagcucgccaauggcaccaaauaucggcccccagcaaagcugcuuaaagagcgcggauuuuucggcgcuauagccggguuucuggaaggagguugggagggcaugauugcgggguggcauggauacacaagccacggcgcccacggugucgcaguggcugccgauuugaagaguacccaggaagcuaucaacaagaucacuaaaaaucucaacucucuguccgaguuagagguuaagaaucugcagcgacucagcggggccauggacgaacuucauaacgagauucuggaauuggaugagaaaguggacgaccuaagagcagauacgaucucgucucaaauugaacuggccguccuccuguccaaugagggcauaaucaacucagaggacgaacaccuucuggcuuuggagaggaagcucaaaaagaugcugggaccuagugcgguggaaauuggcaauggguguuucgagacaaagcauaaaugcaaccagaccugcuuagaucggaucgcagccggaacuuuugacgcuggugaguucagccugcccaccuuugauucccuaaauaucacagccgcaucucucaacgacgauggccuggacaaucacaccauucuuuuguauuacagcacugccgcuucaagucuggccguaacacucaugauagcaaucuucguuguguauauggucucccgugauaacgugagcuguucuauuugccuguga

SEQ ID NO: 156142 - RNA, 1758 nt, Artificial Sequence; identical to SEQ ID NO: 154731
  derived and/or modified CDS sequence (opt3) from hemagglutinin__InfluenzaB__AHL93884

SEQ ID NO: 156143 - RNA, 1758 nt, Artificial Sequence; identical to SEQ ID NO: 154731
  derived and/or modified CDS sequence (opt3) from hemagglutinin__InfluenzaB__AHL93895

SEQ ID NO: 156144 - RNA, 1758 nt, Artificial Sequence; identical to SEQ ID NO: 154731
  derived and/or modified CDS sequence (opt3) from hemagglutinin__InfluenzaB__AHL93906

SEQ ID NO: 156145 - RNA, 1758 nt, Artificial Sequence; identical to SEQ ID NO: 154731
  derived and/or modified CDS sequence (opt3) from hemagglutinin__InfluenzaB__AHL93917

SEQ ID NO: 156146 - RNA, 1758 nt, Artificial Sequence; identical to SEQ ID NO: 154656
  derived and/or modified CDS sequence (opt3) from hemagglutinin__InfluenzaB__AHL93928

SEQ ID NO: 156147 - RNA, 1758 nt, Artificial Sequence; identical to SEQ ID NO: 154693
  derived and/or modified CDS sequence (opt3) from hemagglutinin__InfluenzaB__AHL93939

SEQ ID NO: 156148 - RNA, 1758 nt, Artificial Sequence; identical to SEQ ID NO: 154731
  derived and/or modified CDS sequence (opt3) from hemagglutinin__InfluenzaB__AHL93950

SEQ ID NO: 156149 - RNA, 1758 nt, Artificial Sequence; identical to SEQ ID NO: 154693
  derived and/or modified CDS sequence (opt3) from hemagglutinin__InfluenzaB__AHL93961

SEQ ID NO: 156150 - RNA, 1758 nt, Artificial Sequence
  derived and/or modified CDS sequence (opt3) from hemagglutinin__InfluenzaB__AHL93972
augaaggccaucauugugcugcucauggucguuaccagcacagcugacagaauaugcacuggcaucacguccucuaacucaccccacgugguaaaaaccgcaacacagggggaggugaaugucacuggagugauuccucuuaccacaaccccaacuaagagucauuucgccaaccugaaagguacagaaaccaggggcaaguuguguccgaaaugcuuaaauuguacggaucuggacguugcgcuagggcggcccaagugcacuggaaagaucccuagcgcucgcguguccauucuccacgagguccgaccagugaccucuggcuguuuucccaucaugcaugaucguacaaaaauaagacaacugccuaaccuucugagggguuacgaacacauccgguugucgacucauaauguaauuaacgccgagaaugcaccagggggacccuauaagaucggcaccucaggcagcugcccuaacguuacaaaugggaacggauucuuugccaccauggcuugggcagugccgaaaaaugacaagaacaaaacggccacuaauccacucacaauugaaguccccuacaucuguaccgagggugaggaucagauaacuguguggggcuuccacagugacaacgaaacacagauggcuaagcuguauggggauuccaagccucagaaauuuaccucuagcgccaauggagugacgacccacuacgucucccaaauuggcgguuucccaaaccagacagaggacgggggacugccccagucaggccgcaucguuguggauuauaugguacagaagaguggcaaaacugggaccauuacauaccaaagaggaauccucuuaccucagaagguguggugcgcgagcgguaggucuaaagucaucaagggcucccugccacuuauuggggaagcagacuguuugcaugagaaauauggaggccugaacaagucaaagcccuacuacacuggugagcacgccaaagcuguggggaauugcccgauauggguuaagaccccucuaaaacucgccaacggcacaaaguaucggcccccagcaaaacugcuuaaggaacgcggauuuuucggcgcuaucgccggguuucuggagggagguugggaaggcaugauugcgggguggcauggauacaccagccacggcgcccacgguguggcagucgcugccgauuugaagaguacucaggaggcuaucaauaaaauaacgaagaaccucaauucucuguccgaauuagaggugaaaaaccugcagcgacucagcggggccauggacgagcuucauaaugaaauucuggaguuggaugaaaagguagacgaccuaagagcagauacaaucucgucucaaaucgagcuggccguucuccuguccaacgaaggcauuaucaauucagaggacgagcaccuucuggcuuuggaaaggaaacucaagaagaugcugggaccuagugcgguggagauuggcaacggguguuucgaaaccaaacauaagugcaaucagacuugcuuagaucggauagcagccggaaccuuugacgcuggugaguucagccugcccacauuugauucccuaaacaucaccgccgcaucucucaaugacgauggccuggacaaccacacuauucuuuuguauuacagcacagccgcuucaagucuggccgucacgcucaugaucgcaaucuucguggucuauauggugucccgugauaauguuagcuguucuauuugccuguga

SEQ ID NO: 156151 - RNA, 1758 nt, Artificial Sequence; identical to SEQ ID NO: 154656
  derived and/or modified CDS sequence (opt3) from hemagglutinin__InfluenzaB__AHL93983

SEQ ID NO: 156152 - RNA, 1755 nt, Artificial Sequence
  derived and/or modified CDS sequence (opt3) from hemagglutinin__InfluenzaB__AHL93994
augaaggccaucauugugcugcucauggucguuaccagcaacgcugacagaauaugcacaggcaucacuuccucuaauucaccccacgugguaaaaacggcaacccagggggaggugaacgucacaggagugauuccucuuacuaccacaccaaagaaaaguuacuucgccaaucugaaggguaccaaaacuaggggcaaguuguguccggauugcuuaaacuguacagaccuggauguugcgcuagggcggcccaugugcgugggaaccacgccuagcgcuaaggccuccauccuccaugaaguccgcccagugacuucuggcuguuuucccauuaugcacgaccgaaccaaaauccgucaacuggcaaaucuucugagagguuaugagaacauaagguugucgacacagaauguaaucgaugccgaaaaggcuccugggggaccauaccggcucggcacuucaggcagcugccccaacgcaaccaguaaauccggguucuuugccacaauggcuugggccguuccuaaggacaauaacaaaaaugcgaccaacccacugacgguggaggucccguauauuugugcagaaggagaggaucagaucacugugugggguuuccauucugacaauaagacacagaugaagaaccuguacggcgauagcaauccccaaaaauuuaccuccucagccaacggggugacuacacacuaugucagucagauuggaggcuucccugaccagaccgaggauggugggcucccacagagcggacgcaucguuguggacuacaugaugcaaaagcccggcaaaacgggcaccauaguauaucagagagggguguuacugccucagaaggucuggugcgcuucuggaagguccaaagugauuaaggguucacuuccauugaucggcgaagccgauugucugcaugagaaauacgggggacuaaacaagagcaagcccuacuauacaggcgaacacgcaaaagcuauugguaauugcccgaucuggguuaagacuccucucaaacuggccaacgggaccaaguaccggcccccagcgaaacuucugaaggagcgcggcuuuuucggagccaucgcaggcuuuuuggaagggggaugggaagguaugauugcuggcuggcacggguauacaagucauggagcccacggcguggcugucgccgcagaccucaagucuacucaggaggccauaaauaaaaucaccaagaacuuaaauucccugagcgaacuggaggugaaaaaccuccaacgacuuucgggugcuauggacgaacugcauaaugagauuuuggagcuagaugaaaagguagacgaucugagagcggacacaaucucuucccagauagagcucgcaguucugcuuucaaacgaagggauuaucaauagugaggaugaacaccuguuggcccucgagaggaaacugaagaagauguuaggcccuagcgcuguggacaucggaaacggcuguuucgagaccaaacacaagugcaaucagacuugccuggaucggauugccgcagggacguuuaacgccggagaguucucccuacccacauuugacucucucaauaucaccgcugccagccugaacgaugacggucuugauaaucauacuauuuugcuguacuauucaaccgcagcgaguucccucgcugucacacugaugcuugccauauucaucguguacaugauuagccgugacaacgucucuuguucaaucugccuguga

SEQ ID NO: 156153 - RNA, 1758 nt, Artificial Sequence; identical to SEQ ID NO: 154731
  derived and/or modified CDS sequence (opt3) from hemagglutinin__InfluenzaB__AHL94005

SEQ ID NO: 156154 - RNA, 1758 nt, Artificial Sequence; identical to SEQ ID NO: 154731
  derived and/or modified CDS sequence (opt3) from hemagglutinin__InfluenzaB__AHL94016

SEQ ID NO: 156155 - RNA, 1758 nt, Artificial Sequence
  derived and/or modified CDS sequence (opt3) from hemagglutinin__InfluenzaB__AHL94027
augaaggccaucauugugcugcucauggucguuaccagcaacgcugacagaauaugcacaggcaucacuuccucuaauucaccccacauugugaaaacggcaacccagggggagguaaacgugacaggagucaucccucuuacuaccacaccaaccaagagucauuucgccaaucugaaagguacugaaacaaggggcaaguuguguccgaaaugcuuaaacuguaccgaucuggacguggcgcuagggcggcccaagugcacgggaaagauuccuagcgcucgcguuuccauccuccacgaggugcgaccagucacuucuggcuguuuucccauaaugcaugaucguaccaaaaucagacaacugccuaaucuucugagggguuacgaacacauucgguugucgacacauaacgugaucaaugccgagaacgcaccagggggacccuauaagauuggcacuucaggcagcugcccuaauaucaccaacgggaauggauucuuugccacaauggcuugggcaguaccgaaaaacgacaagaauaaaaccgccacgaacccacucacuauagaaguucccuacauuuguacagagggugaggaucagaucaccguguggggcuuccacagugacaaugaaacucagauggcuaagcuguauggggauuccaagccucagaaauuuacaucuagcgccaacggagucaccacgcacuacgugucccaaauuggcgguuucccaaaccagaccgaggacgggggacugccccagucaggccgcaucguggucgauuauaugguucagaagaguggcaaaacagggacuaucaccuaccaaaugggagugcucuuaccucagaagguauggugcgcgagcgguagaucuaaagugauuaagggcucccugccacuuauaggggaagcagacuguuugcaugagaaauauggaggccugaauaagucaaagcccuacuacacaggugagcacgccaaagcuaucgggaacugcccgauuugggucaagacuccucuaaaacucgccaauggcaccaaguauaggcccccagcaaaacugcuuaaggaacggggauuuuucggcgcuaucgccggguuucuggagggagguugggaaggcaugauagcgggguggcauggauacacaagccacggcgcccacgguguggcaguugcugccgauuugaagaguacccaggaggcuauuaacaaaaucacuaagaaucucaacucucuguccgaauuagaggugaaaaaucugcagcgccucagcggggccauggacgagcuucauaacgaaauccuggaguuggaugaaaaggucgacgaccuacgagcagauacgauuucgucucaaaucgagcuggccgugcuccuguccaaugaaggcauuauaaacucagaggacgagcaccuucuggcuuuggaaagaaaacucaagaagaugcugggaccuagugcgguagagaucggcaauggguguuucgaaacaaaacauaagugcaaccagaccugcuuagauaggauugcagccggaacuuuugacgcuggugaguucagccugcccaccuuugauucccuaaauaucacagccgcaucucucaacgacgauggccuggacaaucacaccauccuuuuguauuacagcacugccgcuucaagucuggccguuacacucaugauugcaauauucguggucuauauggugucccgggauaacgucagcuguucuaucugccuguga

SEQ ID NO: 156156 - RNA, 1758 nt, Artificial Sequence; identical to SEQ ID NO: 154693
  derived and/or modified CDS sequence (opt3) from hemagglutinin__InfluenzaB__AHL94038

SEQ ID NO: 156157 - RNA, 1758 nt, Artificial Sequence; identical to SEQ ID NO: 154656
  derived and/or modified CDS sequence (opt3) from hemagglutinin__InfluenzaB__AHL94049

SEQ ID NO: 156158 - RNA, 1758 nt, Artificial Sequence; identical to SEQ ID NO: 154731
  derived and/or modified CDS sequence (opt3) from hemagglutinin__InfluenzaB__AHL94060

SEQ ID NO: 156159 - RNA, 1758 nt, Artificial Sequence
  derived and/or modified CDS sequence (opt3) from hemagglutinin__InfluenzaB__AHL94071
augaaggccaucauugugcugcucauggucguuaccagcaacgcugacagaauaugcacaggcaucacuuccucuaauucaccccacauugugaaaacggcaacccagggggagguaaacgugacaggagucaucccucuuacuaccacaccaaccaagagucauuucgccaaucugaaagguacugaaacaaggggcaaguuguguccgaaaugcuuaaacuguaccgaucuggacguggcgcuagggcggcccaagugcacgggaaagauuccuagcgcucgcguuuccauccuccacgaggugcgaccagucacuucuggcuguuuucccauaaugcaugaucguaccaaaaucagacaacugccuaaucuucugagggguuacgaacacauucgguugucgacacauaacgugaucaaugccgagaacgcaccagggggacccuauaagauuggcacuucaggcagcugcccuaauaucaccaacgggaauggauucuuugccacaauggcuugggcaguaccgaaaaacgacaagaauaaaaccgccacgaacccacucacuauagaaguucccuacauuuguacagagggugaggaucagaucaccguguggggcuuccacagugacaaugaaacucagauggcuaagcuguauggggauuccaagccucagaaauuuacaucuagcgccaacggagucaccacgcacuacgugucccaaauuggcgguuucccaaaccagaccgaggacgggggacugccccagucaggccgcaucguggucgauuauaugaugcagaagaguggcaaaacagggacuaucaccuaccaaagagguauucucuuaccucagaagguuuggugcgcgagcggaaggucuaaagugauaaagggcucccugccacuuaucggggaagcagacuguuugcaugagaaauauggaggccugaauaagucaaagcccuacuacacaggugagcacgccaaagcuauugggaacugcccgaucuggguaaagacuccucuaaaacucgccaauggcaccaaguaucggcccccagcaaaacugcuuaaggaacgcggauuuuucggcgcuauagccggguuucuggagggagguugggaaggcaugauugcgggguggcauggauacacaagccacggcgcccacgguguggcagucgcugccgauuugaagaguacccaggaggcuaucucuaaaaucacuaagaaccucaauucccugagcgaauuagaggugaaaaaccugcagcgacucucgggggccauggacgagcuucauaaugaaauucuggaguuggaugaaaagguugacgaccuaagagcagauacgaucucuucccaaauugagcuggccgugcuccugucaaacgaaggcauaaucaauagugaggacgagcaccuucuggcuuuggaaaggaaacucaagaagaugcugggaccuagcgcggucgagauuggcaacggguguuucgaaacaaaacauaagugcaaucagaccugcuuagaucggaucgcagccggaacuuuugacgcuggugaguucucccugcccaccuuugauucucuaaacaucacagccgcaagccucaaugacgauggccuggacaaccacaccauucuuuuguauuacucaacugccgcuaguucccuggccgugacacucaugauagcaaucuucguaguuuauauggugagccgugauaaugucucuuguucaauuugccuguga

SEQ ID NO: 156160 - RNA, 1755 nt, Artificial Sequence
  derived and/or modified CDS sequence (opt3) from hemagglutinin__InfluenzaB__AHL94082
augaaggccaucauugugcugcucauggucguuaccagcaacgcugacagaauaugcacaggcaucacuuccucuaauucaccccacgugguaaaaacggcaacccagggggaagugaacgucacaggagugauuccucuuacuaccacaccaaccaagaguuacuucgccaaucugaaagguacuaggacacggggcaaguuguguccggauugcuuaaacuguaccgaccuggauguugcgcuagggcgccccaugugcgugggaacgacuccuagcgcuaaagccuccauccuccaugaaauucgaccagucaccucuggcuguuuucccaucaugcacgaccguacaaagauaagacaacugccuaaucuucugagggguuaugagaacauccgguugucgacucagaaugugauugaugcagaaaaggccccagggggacccuaccgccucggcaccucaggcagcugcccuaacgcuacaaguaaaaucggguucuuugcaaccauggccugggcuguaccaaaggacaauuauaaaaacgccacgaauccgcugacuguugaggugcccuacauuuguacagaaggagaggaucagaucaccgucugggguuuccauuccgacaacaagacucagaugaaaaaucuguauggcgauucuaacccucaaaaguuuacaagcuccgcgaauggggugaccacgcacuacgugucacagauaggagacuucccagaucagaccgaggacggcggucucccccagagugggagaauugucguugauuauaugaugcaaaagccuggaaaaacaggcacuaucguguaccagaggggcguauuacugccacagaagguguggugcgcaagcgggcggucuaaagucauuaagggaucccuucccuugaucggugaagccgacugucugcaugagaaauacggcgggcuaaacaagucaaaaccguauuacaccggagaacacgcuaaggccaucggcaacugcccuauuugggugaagacaccccucaaacuggcaaaugguacuaaguaucgcccuccagcuaaacuucugaaggagcgaggguuuuucggcgccauagcgggauuuuuggagggcgggugggaaggaaugaucgccgguuggcacggcuacaccagccauggggcacacggaguugcuguggccgcugaccucaaaaguacacaggaggccauuaacaagaucaccaagaaucugaacucuuuauccgaacuggaggucaaaaaucuccaaagacuuagcggcgcaauggaugaacugcauaacgagauauuggagcuagacgaaaagguggaugaccugagggccgauacuauuucgucucagaucgagcucgcuguacugcuuuccaaugaagguaucauuaacucagaggacgaacaccuguuggcgcucgagcggaaacugaagaaaauguuagggcccagugcaguugauaucggcaauggauguuucgagacgaagcacaagugcaaccagacaugccuggaccguauugccgcuggcaccuuuaaugccggggaguucagccuaccaacuuuugauucccucaacauaaccgcagccucucugaaugacgauggacuugacaaccauacaaucuugcuguauuacagcaccgcugccucaagucucgcagugacucugaugcuugcgauuuucaucgucuauauggugucccgcgacaaugucagcuguucuaucugccuguga

SEQ ID NO: 156161 - RNA, 1758 nt, Artificial Sequence; identical to SEQ ID NO: 154693
  derived and/or modified CDS sequence (opt3) from hemagglutinin__InfluenzaB__AHL94093

SEQ ID NO: 156162 - RNA, 1758 nt, Artificial Sequence; identical to SEQ ID NO: 154731
  derived and/or modified CDS sequence (opt3) from hemagglutinin__InfluenzaB__AHL94102

SEQ ID NO: 156163 - RNA, 1758 nt, Artificial Sequence
  derived and/or modified CDS sequence (opt3) from hemagglutinin__InfluenzaB__AHL94113
augaaggccaucauugugcugcucauggucguuaccagcaacgcugacagaauaugcacaggcaucacuuccucuaauucaccccacauugugaaaacggcaacccagggggagguaaacgugacaggagucaucccucuuacuaccacaccaaccaagagucauuucgccaaucugaaagguacugaaacaaggggcaaguuguguccgaaaugcuuaaacuguaccgaucuggacguggcgcuagggcggcccaagugcacgggaaagauuccuagcgcucgcguuuccauccuccacgaggugcgaccagucacuucuggcuguuuucccauaaugcaugaucguaccaaaaucagacaacugccuaaucuucugagggguuacgaacacauucgguugucgacacauaacgugaucaaugccgagaacgcaccagggggacccuauaagauuggcacuucaggcagcugccucaauaucaccaacgggaauggauucuuugccacaauggcuugggcaguaccuaaaaacgacaagaauaaaaccgccacgaacccacugacuauagaaguuccguacauuuguacagagggugaggaucagaucaccguguggggcuuccacagugacaaugaaacucagauggcuaagcuguauggggauuccaagccccagaaauuuacaucuagcgccaacggagucaccacgcacuacgugucccaaauuggcgguuucccuaaccagaccgaggacgggggacucccacagucaggccgcaucguggucgauuauaugguucagaagaguggcaaaacagggacuaucaccuaccaaagaggaauuuuacugccccagaagguguggugcgcgagcgguaggucuaaaguaauaaagggcucccuuccuuugaucggggaagcagacugucugcaugagaaauauggaggccuaaauaagucaaagccauacuacacaggugagcacgccaaagcuauugggaacugccccaucugggugaagacuccgcucaaacuggccaauggcaccaaguaucggccucccgcaaaacuucugaaggaacgcggauuuuucggcgcuauagccggguuuuuggagggagguugggaaggcaugauugcgggguggcauggauacacaagccacggcgcccacggugucgcaguggcugccgaucucaagaguacccaggaggcuaucaacaaaaucacuaagaaucugaacucuuuauccgaacuggagguuaaaaaucuccagcgacuuagcggggccauggacgagcugcauaacgaaauuuuggagcuagaugaaaagguggacgaccugagagcagauacgaucucgucucaaauugagcucgccguccugcuuuccaaugaaggcauaaucaacucagaggacgagcaccuguuggcucucgaaaggaaacugaagaagauguuaggaccaagugcgguggagauuggcaauggguguuucgaaacaaaacauaagugcaaccagaccugccuggaucggaucgcagccggaacuuuugacgcuggugaguucagccuaccuaccuuugauucccucaauaucacagccgcaucucugaacgacgauggccuugacaaucacaccauuuugcuguauuacagcacugccgcuucaagucucgccguaacacugaugauagcaaucuucguuguguauauggucucccgugauaacgugagcuguucuauuugccuuuga

SEQ ID NO: 156164 - RNA, 1758 nt, Artificial Sequence
  derived and/or modified CDS sequence (opt3) from hemagglutinin__InfluenzaB__AHL94124
augaaggccaucauugugcugcucauggucguuaccagcaacgcugacagaauaugcacaggcaucacuuccucuaauucaccccacauugugaaaacggcaacccagggggagguaaacgugacaggagucaucccucuuacuaccacaccaaccaagagucauuucgccaaucugaaagguacugaaacaaggggcaaguuguguccgaaaugcuuaaacuguaccgaucuggacguggcgcuagggcggcccaagugcacgggaaagauuccuagcgcucgcguuuccauccuccacgagauacgaccagugacuucuggcuguuuucccaucaugcaugaucguaccaaaauuagacaacugccuaaucuucugagggguuacgaacacauccgguugucgacacauaacgucauuaaugccgagaacgcaccagggggacccuauaagaucggcacuucaggcagcugcccuaauauaaccaacgggaauggauucuuugccacaauggcuugggcagugccgaaaaacgacaagaauaaaaccgccacgaacccacucacuauugaaguacccuacaucuguacagagggugaggaucagauuaccguuuggggcuuccacagugacaaugaaacucagauggcuaagcuguauggggauuccaagccucagaaauuuacaucuagcgccaacggagugaccacgcacuacgucucccaaaucggcgguuucccaaaccagaccgaggacgggggacugccccagucaggccgcaucgugguggauuauaugguccagaagaguggcaaaacagggacuauuaccuaccaaagaggaauacucuuaccucagaagguuuggugcgcgagcgguaggucuaaagugaucaagggcucccugccacuuauuggggaagcagacuguuugcaugagaaauauggaggccugaauaagucaaagcccuacuacacaggugagcacgccaaagcuaucgggaacugcccgauauggguaaagacuccucuaaaacucgccaauggcaccaaguaucggcccccagcaaaacugcuuaaggaacgcggauuuuucggcgcuauugccggguuucuggagggagguugggaaggcaugaucgcgggguggcauggauacacaagccacggcgcccacgguguggcagucgcugccgauuugaagaguacccaggaggcuaucaacaaaauuacuaagaaucucaacucucuguccgaauuagaggugaaaaaucugcagcgacucagcggggccauggacgagcuucauaacgaaauccuggaguuggaugaaaagguugacgaccuaagagcagauacgauuucgucucaaauagagcuggccgugcuccuguccaaugaaggcaucauuaacucagaggacgagcaccuucuggcuuuggaaaggaaacucaagaagaugcugggaccuagugcggucgagaucggcaauggguguuucgaaacaaaacauaagugcaaccagaccugcuuagaucggaucgcagccggaacuuuugacgcuggugaguucagccugcccaccuuugauucccuaaauauuacagccgcaucucucaacgacgauggccuggacaaucacaccauacuuuuguauuacagcacugccgcuucaagucuggccgugacacucaugaucgcaauuuucguaguuuauauggugucccgugauaacgucagcuguucuaucugccuguga

SEQ ID NO: 156165 - RNA, 1758 nt, Artificial Sequence; identical to SEQ ID NO: 154656
  derived and/or modified CDS sequence (opt3) from hemagglutinin__InfluenzaB__AHL94135

SEQ ID NO: 156166 - RNA, 1758 nt, Artificial Sequence; identical to SEQ ID NO: 154656
  derived and/or modified CDS sequence (opt3) from hemagglutinin__InfluenzaB__AHL94146

SEQ ID NO: 156167 - RNA, 1758 nt, Artificial Sequence; identical to SEQ ID NO: 154731
  derived and/or modified CDS sequence (opt3) from hemagglutinin__InfluenzaB__AHL94157

SEQ ID NO: 156168 - RNA, 1758 nt, Artificial Sequence; identical to SEQ ID NO: 154731
  derived and/or modified CDS sequence (opt3) from hemagglutinin__InfluenzaB__AHL94168

SEQ ID NO: 156169 - RNA, 1758 nt, Artificial Sequence; identical to SEQ ID NO: 154656
  derived and/or modified CDS sequence (opt3) from hemagglutinin__InfluenzaB__AHL94179

SEQ ID NO: 156170 - RNA, 1758 nt, Artificial Sequence; identical to SEQ ID NO: 154656
  derived and/or modified CDS sequence (opt3) from hemagglutinin__InfluenzaB__AHL94190

SEQ ID NO: 156171 - RNA, 1758 nt, Artificial Sequence
  derived and/or modified CDS sequence (opt3) from hemagglutinin__InfluenzaB__AHL94201
augaaggccaucauugugcugcucauggucguuaccagcaacgcugacagaauaugcacaggcaucacuuccucuaauucaccccacauugugaaaacggcaacccagggggaaguaaacgugacaggagucaucccucuuacuaccacaccaaccaagagucauuucgccaaucugaaagguacugaaacaaggggcaaguuguguccgaaaugcuuaaacuguaccgaucuggacguggcgcuagggcggcccaagugcacgggaaagauuccuagcgcucgcguuuccauccuccacgaggugcgaccagucacuucuggcuguuuucccauaaugcaugaucguaccaaaaucagacaacugccuaaucuucugagggguuacgaacacauucgguugucgacacauaacgugaucaaugccgagaacgcaccagggggacccuauaagauuggcacuucaggcagcugcccuaauaucaccaacgggaauggauucuuugaaacaauggccugggcuguaccgaaaaacgacaagaauaaaaccgcaacgaacccacucacuauagagguucccuacauuuguacagagggugaagaucagaucaccguguggggcuuccacagugacaaugagacucagauggccaagcuguauggggauuccaagccucagaaauuuacaucuagcgcuaacggagucaccacgcacuacgugucccaaauuggcgguuucccaaaccagaccgaagacgggggacugccccagucaggccgcaucguggucgauuauaugguucagaagaguggcaaaacagggacuaucaccuaccaaagagguauucucuuaccucagaagguguggugcgccagcggaaggucuaaaguaauaaagggcucccugccacuuaucggggaggcggacuguuugcaugagaaauauggaggccugaauaagucaaagcccuacuacacaggugaacacgcaaaagccauugggaacugcccgaucugggugaagacuccucuaaaacucgcuaauggcaccaaguaucggcccccagccaaacugcuuaaggagcgcggauuuuucggcgcaauagcuggguuucuggaaggagguugggagggcaugauugccggguggcauggauacacaagccacggcgcgcacggugucgccguggcagcugauuugaagaguacccaggaagccaucaacaaaaucacuaagaaucucaacucucuguccgaguuagagguuaaaaaucugcagcgacucagcggggcuauggacgaacuucauaacgagauucuggaauuggaugagaagguggacgaccuaagagccgauacgaucucgucucaaauugaacuggcaguccuccuguccaaugagggcauaaucaacucagaggacgaacaccuucuggccuuggagaggaaacucaagaagaugcugggaccuagugcuguggaaauuggcaauggguguuucgagacaaaacauaagugcaaccagaccugcuuagaucggaucgcggcaggaacuuuugacgccggugaguucagccugcccaccuuugauucccuaaauaucacagcugccucucucaacgacgauggccuggacaaucacaccauucuuuuguauuacagcacugcagccucaagucuggcuguaacacucaugauagccaucuucguuguguauauggucucccguaacaacgugagcuguucuauuugccuguga

SEQ ID NO: 156172 - RNA, 1758 nt, Artificial Sequence
  derived and/or modified CDS sequence (opt3) from hemagglutinin__InfluenzaB__AHL94212
augaaggccaucauugugcugcucauggucguuaccagcaacgcugacagaauaugcacaggcaucacuuccucuaauucaccccacgugguaaaaacggcaacccagggggaggugaacgucacaggagugauuccucuuacuaccacaccaaccaagagucauuucgccaaucugaaagguacugaaacaaggggcaaguuguguccgaaaugcuuaaacuguaccgaucuggacguugcgcuagggcggcccaagugcacgggaaagaucccuagcgcucgcguguccauucuccacgagguccgaccagugacuucuggcuguuuucccaucaugcaugaucguaccaaaauaagacaacugccuaaucuucugagggguuacgaacacauccgguugucgacacauaacguaauuaaugccgagaacgcaccagggggacccuauaagaucggcacuucaggcagcugcccuaauguuaccaacgggaauggauucuuugccacaauggcuugggcagugccgaaaaacgacaagaauaaaaccgccacgaacccacucacuauugaaguccccuacaucuguacagagggugaggaucaggugaccguguggggcuuccacagugacaaugaaacucagauggcuaagcuguauggggauuccaagccucagaaauuuacaucuagcgccaacggagucaccacgcacuacguuucccaaauaggcgguuucccaaaccagaccgaggacgggggacugccccagucaggccgcauugugguagauuauauggugcagaagaguggcaaaacagggacuaucaccuaccaaagagguauucucuuaccucagaaggucuggugcgcgagcggaaggucuaaagugaucaagggcucccugccacuuaucggggaagcagacuguuugcaugagaaauauggaggccugaauaagucaaagcccuacuacacaggugagcacgccaaagcuauugggaacugcccgauauggguuaagacuccucuaaaacucgccaauggcaccaaguaucggcccccagcaaaacugcuuaaggaacgcggauuuuucggcgcuaucgccggguuucuggagggagguugggaaggcaugauugcgggguggcauggauacacaagccacggcgcccacgguguggcagucgcugccgauuugaagaguacccaggaggcuaucaacaaaauaacuaagaaucucaacucucuguccgaauuagaggugaaaaaucugcagcgacucagcggggccauggacgagcuucauaacgaaauucuggaguuggaugaaaagguagacgaccuaagagcagauacgaucucgucucaaaucgagcuggccguucuccuguccaaugaaggcauuaucaacucagaggacgagcaccuucuggcuuuggaaaggaaacucaagaagaugcugggaccuagugcgguggagauuggcaauggguguuucgaaacaaaacauaagugcaaccagaccugcuuagaucggauagcagccggaacuuuugacgcuggugaguucagccugcccaccuuugauucccuaaauaucacagccgcaucucucaacgacgauggccuggacaaucacaccauucuuuuguauuacagcacugccgcuucaagucuggccgucacacucaugaucgcaaucuucguggucuauauggugucccgugauaacguuagcuguucuauuugccuguga

SEQ ID NO: 156173 - RNA, 1758 nt, Artificial Sequence; identical to SEQ ID NO: 154731
  derived and/or modified CDS sequence (opt3) from hemagglutinin__InfluenzaB__AHL94220

SEQ ID NO: 156174 - RNA, 1758 nt, Artificial Sequence; identical to SEQ ID NO: 154731
  derived and/or modified CDS sequence (opt3) from hemagglutinin__InfluenzaB__AHL94231

SEQ ID NO: 156175 - RNA, 1758 nt, Artificial Sequence
  derived and/or modified CDS sequence (opt3) from hemagglutinin__InfluenzaB__AHL94242
augaaggccaucauugugcugcucauggucguuaccagcaacgcugacagaauaugcacaggcaucacuuccucuaauucaccccacgugguaaaaacggcaacccagggggaggugaacgucacaggagugauuccucuuacuaccacaccaaccaagagucauuucgccaaucugaaagguacugaaacaaggggcaaguuguguccgaaaugcuuaaacuguaccgaucuggacguugcgcuagggcggcccaagugcacgggaaagaucccuagcgcucgcguguccauucuccacgagguccgaccagugacuucuggcuguuuucccaucaugcaugaucguaccaaaauaagacaacugccuaaucuucugagggguuacgaacacauccgguugucgacacauaacguaauuaaugccgagaacgcaccagggggacccuauaagaucggcacuucaggcagcugcccuaauguuaccaacgggaauggauucuuugccacaauggcuugggcagugccaaagaacgacaagaauaaaaccgccacgaacccgcucacuauugaaguccccuacaucuguacagagggugaggaucagauaaccguguggggcuuccacagugacaaugaaacucagauggcuaagcuguauggggauuccaagccucagaaauuuacaucuagcgccaacggagugaccacgcacuacgucucccaaauuggcgguuucccaaaccagaccgaggacgggggacugccccagucaggccgcaucguuguggauuauaugguacagaagaguggcaaaacagggacuauuaccuaccaaagaggaauccucuuaccucagaagguguggugcgcgaaugguaggagcaaagucaucaagggcucucugccacuuauuggggaagcagacuguuugcaugagaaauauggaggccugaacaaguccaagcccuacuacacaggugagcacgccaaagcuauagggaauugcccgaucugggugaagacuccucuaaaacucgccaacggcaccaaguaucggcccccagcaaaacugcuuaaggaacgcggauuuuucggcgcuauugccggguuucuggagggagguugggaaggcaugaucgcgggguggcauggauacacaucacacggcgcccacgguguugcaguggcugccgauuugaaaagcacccaggaggcuauaaauaaaauuacuaagaaccucaauagucugucugaauuagaggucaaaaaccugcagcgacucuccggggccauggacgagcuucauaaugaaauccuggaguuggaugaaaagguggacgaccuaagagcagauacgaucagcucgcaaauugagcuggccguacuccugucuaacgaaggcaucauuaauuccgaggacgagcaccuucuggcuuuggaaaggaaacucaagaagaugcugggaccuucagcgguugagauaggcaacggguguuucgaaacaaaacauaagugcaaucagaccugcuuagaucggaucgcagccggaacuuuugacgcuggugaguucagucugcccaccuuugauagccuaaacauuacagccgcaucccucaaugacgauggccuggacaaccacaccauccuuuuguauuacucuacugccgcuagcucacuggccgugacacucaugaucgcaauuuucgucguguauauggucagucgugauaacguguccuguagcauaugccuguga

SEQ ID NO: 156176 - RNA, 1758 nt, Artificial Sequence; identical to SEQ ID NO: 154693
  derived and/or modified CDS sequence (opt3) from hemagglutinin__InfluenzaB__AHL94253

SEQ ID NO: 156177 - RNA, 1755 nt, Artificial Sequence
  derived and/or modified CDS sequence (opt3) from hemagglutinin__InfluenzaB__AHL94274
augaaggccaucauugugcugcucauggucguuaccagcaacgcugacagaauaugcacaggcaucacuuccucuaauucaccccacgugguaaaaacggcaacccagggggaagugaacgucacaggagugauuccucuuacuaccacaccaaccaagaguuacuucgccaaucugaaagguacuaggacacggggcaaguuguguccggauugcuuaaacuguaccgaccuggauguugcgcuagggcgccccaugugcgugggaacgacuccuagcgcuaaagccuccauccuccaugaaguccgaccagugaccucuggcuguuuucccauuaugcacgaccguacaaagaucagacaacugccuaaucuucugagggguuaugagaagauacgguugucgacucagaacguaaucgaugcagaaaaagccccagggggacccuaccgccucggcaccucaggcagcugcccuaaugcuacaaguaagauuggguucuuugcaaccauggccugggcuguuccaaaagacaacuauaagaaugccacgaacccgcugacuguggagguccccuacaucuguacagaaggagaggaucagauuaccgugugggguuuccauuccgacaauaaaacucagaugaagucucuguauggcgauagcaacccucaaaaguuuacauccucagcgaauggggugaccacgcacuacgucagucagaucggagacuucccagaucagaccgaggacggcggucucccccagagcgggagaauaguuguggauuauaugaugcaaaaaccuggaaagacaggcacuauuguauaccagaggggcguguuacugccacagaaagucuggugcgcaucugggcgguccaaggugaucaaaggaucacuucccuugauuggugaagccgacugucugcaugaggaauacggcgggcuaaacaagagcaaaccguauuacaccggaaagcacgcuaaggccaucggcaauugcccuaucuggguuaaaacaccccucaagcuggcaaacgguacuaaauaucgcccuccagcuaaacuucugaaggagcgaggguuuuucggcgccauugcgggauuuuuggagggcgggugggaaggaaugauagccgguuggcacggcuacaccagucauggggcacacggaguggcugucgccgcugaccucaagucuacacaggaggccaucaacaagauuaccaaaaaucugaacuccuuaagcgaacuggaggugaagaaucuccaaagacuuucgggcgcaauggaugaacugcauaacgagaucuuggagcuagacgaaaaaguagaugaccugagggccgauacuauaucuucccagauugagcucgcuguucugcuuucaaaugaagguaucaucaacagugaggacgaacaccuguuggcgcucgagcggaagcugaaaaagauguuagggcccagcgcaguggauauuggcaauggauguuucgagacgaagcacaaaugcaaccagacaugccuggaccguaucgccgcuggcaccuuuaaugccggggaguucucccuaccaacuuuugauucucucaacauuaccgcagccagccugaaugacgauggacuugacaaccauacaauauugcuguauuacucaaccgcugccaguucccucgcagucacucugaugcuugcgaucuucauuguguauauggucagccgcgacaaugugucuuguucaaucugccuguga

SEQ ID NO: 156178 - RNA, 1755 nt, Artificial Sequence; identical to SEQ ID NO: 156177
  derived and/or modified CDS sequence (opt3) from hemagglutinin__InfluenzaB__AHL94295

SEQ ID NO: 156179 - RNA, 1755 nt, Artificial Sequence
  derived and/or modified CDS sequence (opt3) from hemagglutinin__InfluenzaB__AHL94306
augaaggccaucauugugcugcucauggucguuaccagcaacgcugacagaauaugcacaggcaucacuuccucuaauucaccccacgugguaaaaacggcaacccagggggaagugaacgucacaggagccauuccucuuacuaccacaccaaccaagaguuacuucgcgaaucugaaagguacuaggacacggggcaaguuguguccggauugcuuaaacuguaccgaccuggauguggcucuagggcgccccaugugcguuggaacgacuccuagcgccaaagcauccauccuccaugaagugcgaccagucaccucuggcuguuuucccauuaugcacgaccguacaaagaucagacaacugccuaaucuucugagggguuaugagaacauacgguugucgacucagaaugugaucgaugccgaaaaggcuccagggggacccuaccgccucggcaccucaggcagcugcccuaacgcaacaaguaaaauuggguucuuugccaccauggcuugggccguaccaaaggacaauuauaaaaacgcgacgaauccgcagacuguugaggugcccuacaucuguacagaaggagaggaucagauuaccgucugggguuuccauuccgacaacaagacucaaaugaaaaaucuguauggcgauucuaacccucagaaguuuacaagcuccgcaaauggggugaccacgcacuacgugucacagaucggagacuucccagaucagaccgaggacggcggucugccccaaagugggagaauagucguugauuauauggugcagaagccuggaaaaacaggcacuauuguauaccagaggggcgugcucuuaccacagaaggucuggugcgccagcgggcggucuaaagugaucaagggaucccugccccuuauuggugaagcugacuguuugcaugagaaauacggcgggcugaacaagucaaaaccguauuacaccggagaacacgccaaggcaaucggcaacugcccuaucuggguuaagacaccccuaaaacucgcuaaugguacuaaguaucgcccuccagccaaacugcuuaaggagcgaggguuuuucggcgcgauugccggauuucuggagggcgggugggaaggaaugauagcagguuggcacggcuacaccagccauggggcucacggaguggccgucgcugccgacuugaaaaguacacaagaggcaaucaacaagauuaccaagaaucucaacucucuguccgaauuagaggugaaaaaucugcagagacucagcggcgccauggaugaacuucauaacgagauccuggaguuggacgaaaagguagaugaccuaagggcugauacuauaucgucucagauugagcuggcgguucuccuguccaaugaagguaucaucaacucagaggacgaacaccuucuggcauuggagcggaaacucaagaaaaugcuggggcccagugccguggauauuggcaauggauguuucgagacgaagcacaagugcaaccaaacaugcuuagaccguaucgcugccggcaccuuuaaugcaggggaguucagccugccaacuuuugauucccuaaacauuaccgccgcuucucucaaugacgauggacuggacaaccauacaauacuuuuguauuacagcaccgccgcaucaagucuggcggucacucucaugcuggcuaucuucauuguguauauggucucccgcgacaaugugagcuguucuaucugccuuuga

SEQ ID NO: 156180 - RNA, 1755 nt, Artificial Sequence
  derived and/or modified CDS sequence (opt3) from hemagglutinin__InfluenzaB__AHL94317
augaaggccaucauugugcugcucauggucguuaccagcaacgcugacagaauaugcacaggcaucacuuccucuaauucaccccacgugguaaaaacggcaacccagggggaagugaacgucacaggagccauuccucuuacuaccacaccaaccaagaguuacuucgcgaaucugaaagguaucaggacucggggcaaguuguguccggauugcuuaaacuguacagaccuggauguggcucuagggcgccccaugugcguuggaaccacgccuagcgccaaagcauccauucuccaugaagugcgaccagucacuucuggcuguuuucccaucaugcacgaccguaccaagauaagacaacugccuaaucuucugagggguuaugagaacauccgguugucgacacagaaugugauugaugccgaaaaggcuccagggggacccuaccgccucggcacuucaggcagcugcccuaacgcaaccaguaaaaucggguucuuugccacaauggcuugggccguaccaagagacaauuauaagaacgcgaccaauccgcagacgguugaggugcccuacauuuguacugaaggagaggaucagaucacagucugggguuuccauuccgacaacaaaacccaaaugaagaaucuguauggcgauucuaacccucagaaauuuacuagcuccgcaaauggggugacaacccacuacgugucacagauaggagacuucccagaucagacggaggacggcggucugccccaaagugggaggauugucguugauuauauggugcagaagccuggaaagaccggcacaaucguauaccagcggggcgugcucuuaccacagaaagucuggugcgccagcgggcgcucuaaggugauuaaaggaucccugccccuuaucggugaagcugacuguuugcaugagaaguacggcgggcugaacaaaucaaagccguauuacacuggagaacacgccaaagcaaucggcaacugcccuauuuggguuaagaccccacuaaagcucgcuaaugguacaaaauaucgacccccugccaagcugcuuaaagagagaggguuuuucggcgcgauagccggauuucuggagggcgggugggaaggaaugaucgcagguuggcacggcuacacuagccauggggcucacggaguggccgucgcugccgacuugaagaguacccaagaggcaauuaacaaaaucacaaagaaucucaacucucuguccgaauuagaggugaagaaucugcagaggcucagcggcgccauggaugaacuucauaacgagauacuggaguuggacgaaaaaguagaugaccuacgggcugauaccauuucgucucagaucgagcuggcgguucuccuguccaaugaagguaucauuaacucagaggacgaacaccuucuggcauuggagcguaagcucaaaaagaugcuggggcccagugccguggauaucggcaauggauguuucgagacuaaacacaagugcaaccaaacgugcuuagaccgcauugcugccggcacauuuaaugcaggggaguucagccugccaaccuuugauucccuaaacauaacugccgcuucucucaaugacgauggacuggacaaccauaccauccuuuuguauuacagcacagccgcaucaagucuggcggucacccucaugcuggcuauuuucaucguguauauggucuccagagacaaugugagcuguucuaucugccuuuga

SEQ ID NO: 156181 - RNA, 1755 nt, Artificial Sequence; identical to SEQ ID NO: 156179
  derived and/or modified CDS sequence (opt3) from hemagglutinin__InfluenzaB__AHL94328

SEQ ID NO: 156182 - RNA, 1755 nt, Artificial Sequence; identical to SEQ ID NO: 156177
  derived and/or modified CDS sequence (opt3) from hemagglutinin__InfluenzaB__AHL94339

SEQ ID NO: 156183 - RNA, 1758 nt, Artificial Sequence
  derived and/or modified CDS sequence (opt3) from hemagglutinin__InfluenzaB__AHL94350
augaaggccaucauugugcugcucauggucguuaccagcaacgcugacagaauaugcacaggcaucacuuccucuaauucaccccacgugguaaaaacggcaacccagggggaggugaacgucacaggagugauuccucuuacuaccacaccaaccaagagucauuucgccaaucugaaagguacugaaacaaggggcaaguuguguccgaaaugcuuaaacuguaccgaucuggacguugcgcuagggcggcccaagugcacgggaaagaucccuagcgcucgcguguccauucuccacgagguccgaccagugacuucuggcuguuuucccaucaugcaugaucguaccaaaauaagacaacugccuaaucuucugagggguuacgaacacauccgguugucgacacauaacguaauuaaugccgagaacgcaccagggggacccuauaagaucggcacuucaggcagcugcccuaauguuaccaacgggaauggauucuuugccacaauggcuugggcagugccgaaaaacgacaagaauaaaaccgccacgaacccacucacuauugaaguccccuacaucuguacagagggugaggaucagauaaccguguggggcuuccacagugacaaugaaacucagauggcuaagcuguauggggauuccaacccucagaaguuuacaucuagcgccaacggagugaccacgcacuacgucucccaaauuggcgguuucccaaaucagaccgaggacgggggacugccccagucaggccgcaucguuguggauuauaugguacagaaaaguggcaagacagggacuauuaccuaccaaagaggaauccucuuaccucagaaaguguggugcgcgagcgguaggucuaaggucaucaaaggcucccugccacuuauuggggaagcagacuguuugcaugagaaguauggaggccugaacaaaucaaagcccuacuacacaggugagcacgccaaggcuauagggaauugcccgaucugggugaaaacuccucuaaagcucgccaacggcaccaaauaucggcccccagcaaagcugcuuaaagaacgcggauuuuucggcgcuauugccggguuucuggagggagguugggaaggcaugaucgcgggguggcauggauacacaagccacggcgcccacgguguugcaguggcugccgauuugaagaguacccaggaggcuauaaauaagauuacuaaaaaccucaauucucuguccgaauuagaggucaagaaccugcagcgacucagcggggccauggacgagcuucauaaugaaauccuggaguuggaugaaaaaguggacgaccuaagagcagauacgaucucgucucaaauugagcuggccguacuccuguccaacgaaggcaucauuaauucagaggacgagcaccuucuggcuuuggaaaggaagcucaaaaagaugcugggaccuagugcgguugagauaggcaacggguguuucgaaacaaagcauaaaugcaaucagaccugcuuagaucggaucgcagccggaacuuuugacgcuggugaguucagccugcccaccuuugauucccuaaacauuacagccgcaucucucaaugacgauggccuggacaaccacaccauccuuuuguauuacagcacugccgcuucaagucuggccgugacacucaugaucgcaauuuucgucguguauauggucuccaaggauaacgugagcuguucuauaugccuguga

SEQ ID NO: 156184 - RNA, 1758 nt, Artificial Sequence
  derived and/or modified CDS sequence (opt3) from hemagglutinin__InfluenzaB__AHL94361
augaaggccaucauugugcugcucauggucguuaccagcaacgcugacagaauaugcacaggcaucacuuccucuaauucaccccacgugguaaaaacggcaacccagggggaggugaacgucacaggagugauuccucuuacuaccacaccaaccaagagucauuucgccaaucugaaagguacugaaacaaggggcaaguuguguccgaaaugcuuaaacuguaccgaucuggacguugcgcuagggcggcccaagugcacgggaaagaucccuagcgcucgcguguccauucuccacgagguccgaccagugacuucuggcuguuuucccaucaugcaugaucguaccaaaauaagacaacugccuaaucuucugagggguuacgaacacauccgguugucgacacauaacguaauuaaugccgagaacgcaccagggggacccuauaagaucggcacuucaggcagcugcccuaauguuaccaacgggaauggauucuuugccacaauggcuugggcagugccgaaaaacgacaagaauaaaaccgccacgaacccacucacuauugaaguccccuacaucuguacagagggugaggaucagauaaccguguggggcuuccacagugacaaugaaacucagauggcuaagcuguauggggauuccaacccucagaaguuuacaucuagcgccaacggagugaccacgcacuacgucucccaaauuggcgguuucccaaaucagaccgaggacgggggacugccccagucaggccgcaucguuguggauuauaugguacagaaaaguggcaagacagggacuauugcguaccaaagaggaauccucuuaccucagaaaguguggugcgcaagcgguaggucuaaggucaucaaaggcucccugccacuuauuggggaagccgacuguuugcaugagaaguauggaggccugaacaaaucaaagcccuacuacaccggugagcacgcuaaggccauagggaauugcccgaucugggugaaaacaccucuaaagcucgcaaacggcacuaaauaucggcccccagcuaagcugcuuaaagaacgcggauuuuucggcgccauugcgggguuucuggagggagguugggaaggcaugaucgccggguggcauggauacaccagccacggcgcacacgguguugcuguggccgcugauuugaagaguacacaggaggccauaaauaagauuaccaaaaaccucaauucucuguccgaauuagaggucaagaaccugcagcgacucagcggggcaauggacgagcuucauaaugaaauccuggaguuggaugaaaaaguggacgaccuaagagccgauacuaucucgucucaaauugagcuggcuguacuccuguccaacgaaggcaucauuaauucagaggacgagcaccuucuggcguuggaaaggaagcucaaaaagaugcugggaccuagugcaguugagauaggcaacggguguuucgaaacgaagcauaaaugcaaucagacaugcuuagaucggaucgccgcuggaaccuuugacgccggugaguucagccugcccacuuuugauucccuaaacauuaccgcagccucucucaaugacgauggccuggacaaccacacaauccuuuuguauuacagcaccgcugccucaagucuggcagugacucucaugaucgcgauuuucgucguguauauggucucccgugauagcgugucuuguucaauaugccuguga

SEQ ID NO: 156185 - RNA, 1758 nt, Artificial Sequence
  derived and/or modified CDS sequence (opt3) from hemagglutinin__InfluenzaB__AHL94383
augaaggccaucauugugcugcucauggucguuaccagcaacgcugacagaauaugcacaggcaucacuuccucuaauucaccccacgugguaaaaacggcaacccagggggaagugaacgucacaggagugauuccucuuacuaccacaccaaccaagagucauuucgccaaucugaaagguacugaaacaaggggcaaguuguguccgaaaugcuuaaacuguaccgaucuggacguugcgcuagggcggcccaagugcacgggaaagaucccuagcgcucgcguguccauucuccacgagguccgaccagugacuucuggcuguuuucccaucaugcaugaucguaccaaaauaagacaacugccuaaucuucugagggguuacgaacacauccgguugucgacacauaacguaauuaaugccgagaacgcaccagggggacccuauaagaucggcacuucaggcagcugcccuaauguuaccaacgggaauggauucuuugccacaauggcuugggcagugccgaaaaacgacaagaauaaaaccgccacgaacccacucacuauugaaguccccuacaucuguacagagggugaggaucagauaaccguguggggcuuccacagugacaaugaaacucagauggagaagcuguauggggauuccaagccucagaaauuuacaucuagcgcuaacggagugaccacgcacuacgucucccaaauuggcgguuucccaaaccagaccgaagacgggggacugccccagucaggccgcaucguuguggauuauaugguacagaagaguggcaaaacagggacuauuaccuaccaaagaggaauccucuuaccucagaagguguggugcgccagcgguaggucuaaagucaucaagggcucccugccacuuauuggggaggcggacuguuugcaugagaaauauggaggccugaauaagucaaagcccuacuacacaggugaacacgcaaaagccauagggaacugcccgaucugggugaagacuccucuaaaacucgcuaauggcaccaaguaucggcccccagccaaacugcuuaaggagcgcggauuuuucggcgcaauugcuggguuucuggaaggagguugggagggcaugaucgccggguggcauggauacacaagccacggcgcgcacgguguugccguggcagcugauuugaagaguacccaggaagccauaaacaaaauuacuaagaaucucaacucucuguccgaguuagaggucaaaaaucugcagcgacucagcggggcuauggacgaacuucauaacgagauccuggaauuggaugagaagguggacgaccuaagagccgauacgaucucgucucaaauugaacuggcaguacuccuguccaaugagggcaucauuaacucagaggacgaacaccuucuggccuuggagaggaaacucaagaagaugcugggaccuagugcuguugaaauaggcaauggguguuucgagacaaaacauaagugcaaccagaccugcuuagaucggaucgcggcaggaacuuuugacgccggugaguucagccugcccaccuuugauucccuaaauauuacagcugccucucucaacgacgauggccuggacaaucacaccauccuuuuguauuacagcacugcagccucaagucuggcugugacacucaugaucgccauuuucgucguguauauggucucccgugauaacgugagcuguucuauaugccuguga

SEQ ID NO: 156186 - RNA, 1758 nt, Artificial Sequence; identical to SEQ ID NO: 154693
  derived and/or modified CDS sequence (opt3) from hemagglutinin__InfluenzaB__AHL94394

SEQ ID NO: 156187 - RNA, 1758 nt, Artificial Sequence
  derived and/or modified CDS sequence (opt3) from hemagglutinin__InfluenzaB__AHL94405
augaaggccaucauugugcugcucauggucguuaccagcaacgcugacagaauaugcacaggcaucacuuccucuaauucaccccacgugguaaaaacggcaacccagggggaggugaacgucacaggagugauuccucuuacuaccacaccaaccaagagucauuucgccaaucugaaagguacugaaacaaggggcaaguuguguccgaaaugcuuaaacuguaccgaucuggacguugcgcuagggcggcccaagugcacgggaaagaucccuagcgcucgcguguccauucuccacgagguccgaccagugacuucuggcuguuuucccaucaugcaugaucguaccaaaauaagacaacugccuaaucuucugagggguuacgaacacauccgguugucgacacauaacguaauuaaugccgagaacgcaccagggggacccuauaagaucggcacuucaggcagcugcccuaauguuaccaacgggaauggauucuuugccacaauggcuugggcagugccgaaaaacgacaagaauaaaaccgccacgaacccacucacuauugaaguccccuacaucuguacagagggugaggaucagauaaccguguggggcuuccacagugacaaugaaacucagauggcuaagcuguauggggauuccaagccucagaaauuuacaucuagcgccaacggagugaccacgcacuacgucucccaaauuggcgguuucccaaaccagaccgaggacgggggacugccccagucaggccgcaucguuguggauuauaugguacagaagaguggcaaaacagggacuauuaccuaccaaagaggaauccucuuaccucagaagguguggugcgcgagcgguaggucuaaagucaucaagggcucccugccacuuauuggggaagcagacuguuugcaugagaaauauggaggccugaauaagucaaagcccuacuacacaggugagcacgccaaagcuauagggaacugcccgaucugggugaagacuccucuaaaacucgccaauggcaccaaguaucggcccccagcaaaacugcuuaaggaacgcggauuuuucggcgcuauugccggguuucuggagggagguugggaaggcaugaucgcgggguggcauggauacacaagccacggcgcccacgguguugcaguggcugccgauuugaagaguacccaggaggcuauaaacaaaauuacuaagaaucucaacucucuguccgaauuagaggucaaaaaucugcagcgacucagcggggccauggacgagcuucauaacgaaauccuggaguuggaugaaaagguggacgaccuaagagcagauacgaucucgucucaaauugagcuggccguacuccuguccaaugaaggcaucauuaacucagaggacgagcaccuucuggcuuuggaaaggaaacucaagaagaugcugggaccuagugcgguugagauaggcaauggguguuucgaaacaaaacauaagugcaaccagaccugcuuagaucggaucgcagccggaacuuuuaaugcuggugaguucagccugcccaccuuugacucccuaaacauuacagccgcaucucucaaugaugacggccuggauaaccacaccauccuuuuguauuacagcacugccgcuucaagucuggccgugacacucaugaucgcaauuuucgucguguauauggucucccgugacaacgugagcuguucuauaugccuguga

SEQ ID NO: 156188 - RNA, 1758 nt, Artificial Sequence; identical to SEQ ID NO: 154693
  derived and/or modified CDS sequence (opt3) from hemagglutinin__InfluenzaB__AHL94416

SEQ ID NO: 156189 - RNA, 1755 nt, Artificial Sequence; identical to SEQ ID NO: 154902
  derived and/or modified CDS sequence (opt3) from hemagglutinin__InfluenzaB__AHL94427

SEQ ID NO: 156190 - RNA, 1755 nt, Artificial Sequence
  derived and/or modified CDS sequence (opt3) from hemagglutinin__InfluenzaB__AHL94438
augaaggccaucauugugcugcucauggucguuaccagcaacgcugacagaauaugcacaggcaucacuuccucuaauucaccccacgugguaaaaacggcaacccagggggaggugaacgucacaggagccauuccucuuacuaccacaccaaccaagaguuacuucgcgaaucugaaagguacuaggacacggggcaaguuguguccggauugcuuaaacuguaccgaccuggauguggcucuagggcgccccaugugcguuggaacgacuccuagcgccaaagcauccauccuccaugaagugcgaccagucaccucuggcuguuuucccauuaugcacgaccguacaaagaucagacaacugccuaaucuucugagggguuaugagaacauacgguugucgacucagaaugugaucgaugccgaaaaggcuccagggggacccuaccgccucggcaccucaggcagcugcccuaacgcaacaaguaaaauuggguucuuugagaccauggccugggcuguaccaaaggacaauuauaaaaacgccacgaauccgcagacuguugaagugcccuacaucuguacagagggagaggaucagauuaccgucugggguuuccauuccgacaacaagacucaaaugaaaaaucuguauggcgauucuaacccucagaaguuuacaagcuccgcgaauggggugaccacgcacuacgugucacagaucggagacuucccagaucagaccgaagacggcggucugccccaaagugggagaauagucguugauuauauggugcagaagccuggaaaaacaggcacuauuguauaccagaggggcgugcucuuaccacagaaggucuggugcgcaagcgggcggucuaaagugaucaagggaucccugccccuuauuggugaggccgacuguuugcaugaaaaauacggcgggcugaacaagucaaaaccguauuacaccggagagcacgcuaaggccaucggcaacugcccuaucuggguuaagacaccccuaaaacucgcaaaugguacuaaguaucgcccuccagcuaaacugcuuaaggagcgaggguuuuucggcgccauugcgggauuucuggaaggcgggugggagggaaugauagccgguuggcacggcuacaccagccauggggcacacggaguggcugucgccgcugacuugaaaaguacacaagaagccaucaacaagauuaccaagaaucucaacucucuguccgaguuagaagugaaaaaucugcagagacucagcggcgcaauggaugagcuucauaacgagauccuggaauuggacgagaagguagaugaccuaagggccgauacuauaucgucucagauugaacuggcuguucuccuguccaaugaggguaucaucaacucagaagacgagcaccuucuggcguuggagcggaaacucaagaaaaugcuggggcccagugcaguggauauuggcaauggauguuucgaaacgaagcacaagugcaaccaaacaugcuuagaccguaucgccgcuggcaccuuuaaugccggggaguucagccugccaacuuuugauucccuaaacauuaccgcagccucucucaaugacgauggacuggacaaccauacaauacuuuuguauuacagcaccgcugccucaagucuggcagucacucucaugcuggcgaucuucauuguguauauggucucccgcgacaaugugagcuguucuaucugccuuuga

SEQ ID NO: 156191 - RNA, 1755 nt, Artificial Sequence
  derived and/or modified CDS sequence (opt3) from hemagglutinin__InfluenzaB__AHL94460
augaaggccaucauugugcugcucauggucguuaccagcaacgcugacagaauaugcacaggcaucacuuccucuaauucaccccacgugguaaaaacggcaacccagggggaggugaacgucacaggagccauuccucuuacuaccacaccaaccaagaguuacuucgcgaaucugaaagguacuaggacacggggcaaguuguguccggauugcuuaaacuguaccgaccuggauguggcucuagggcgccccaugugcguuggaacgacuccuagcgccaaagcauccauccuccaugaagugcgaccagucaccucuggcuguuuucccauuaugcacgaccguacaaagaucagacaacugccuaaucuucugagggguuaugagaacauacgguugucgacucagaaugugaucgaugccgaaaaggcuccagggggacccuaccgccucggcaccucaggcagcugcccuaacgcaacaaguaaaauuggguucuuugccaccauggcuugggccguaccaaaggacaauuauaaaaacgcgacgaauccgcagacuguugaggugcccuacaucuguacagaagaggaggaucagauuaccgucuggggauuccauuccgacaacaagacucaaaugaaaaaucuguauggugauucuaacccucagaaguuuacaagcuccgcaaauggcgugaccacgcacuacgugucacagaucggggacuucccagaucagaccgaagacggaggccugccccaaagugguagaauagucguugauuauauggugcagaagccugggaaaacaggaacuauuguauaccagaggggcgugcucuuaccacagaaggucuggugcgccagcggccggucuaaagugaucaaggggucccugccccuuauuggagaggcugacuguuugcaugaaaaauacgguggccugaacaagucaaaaccguauuacaccggggagcacgccaaggcaaucggaaacugcccuaucuggguuaagacaccccuaaaacucgcuaauggcacuaaguaucgcccuccagccaaacugcuuaaggagcgaggguuuuucggugcgauugccggcuuucuggaaggaggcugggaggggaugauagcaggauggcacgguuacaccagccauggcgcucacgggguggccgucgcugccgacuugaaaaguacacaagaagcaaucaacaagauuaccaagaaucucaacucucuguccgaguuagaagugaaaaaucugcagagacucagcggagccauggaugagcuucauaacgagauccuggaauuggacgagaagguagaugaccuaagggcugauacuauaucgucucagauugaacuggcgguucuccuguccaaugagggcaucaucaacucagaagacgagcaccuucuggcauuggagcggaaacucaagaaaaugcugggucccagugccguggauauugggaauggcuguuucgaaacgaagcacaagugcaaccaaacaugcuuagaccguaucgcugccggaaccuuuaaugcaggcgaguucagccugccaacuuuugauucccuaaacauuaccgccgcuucucucaaugacgaugggcuggacaaccauacaauacuuuuguauuacagcaccgccgcaucaagucuggcggucacucucaugcuggcuaucuucauuguguauauggucucccgcgacaaugugagcuguucuaucugccuuuga

SEQ ID NO: 156192 - RNA, 1755 nt, Artificial Sequence
  derived and/or modified CDS sequence (opt3) from hemagglutinin__InfluenzaB__AHL94471
augaaggccaucauugugcugcucauggucguuaccagcaacgcugacagaauaugcacaggcaucacuuccucuaauucaccccacgugguaaaaacggcaacccagggggaagugaacgucacaggagugauuccucuuacuaccacaccaaccaagaguuacuucgccaaucugaaagguacuaggacacggggcaaguuguguccggauugcuuaaacuguaccgaccuggauguugcgcuagggcgccccaugugcgugggaacgacuccuagcgcuaaagccuccauccuccaugaaguccgaccagugaccucuggcuguuuucccauuaugcacgaccguacaaagaucagacaacugccuaaucuucugagggguuaugagaagauacgguugucgacucagaacguaaucgaugcagaaaaagccccagggggacccuaccgccucggcaccucaggcagcugcccuaaugcuacaaguaagauuggguucuuugcaaccauggccugggcuguuccaaaagacaacuauaagaaugccacgaacccgcugacuguggagguccccuacaucuguacagaaggagaggaucagauuaccgugugggguuuccauuccgacaauaaaacucagaugaagucucuguauggcgauagcaacccucaaaaguuuacauccucagcgaauggggugaccacgcacuacgucagucagaucggagacuucccagaucagaccgaggacggcggucucccccagagcgggagaauaguuguggauuauaugaugcaaaaaccuggaaagacaggcacuauuguauaccagaggggcguguuacugccacagaaagucuggugcgcaucugggcgguccaaggugaucaaaggaucacuucccuugauuggugaagccgacugucugcaugaggaauacggcgggcuaaacaagagcaaaccguauuacaccggaaagcacgcuaaggccaucggcaauugcccuaucuggguuaaaacaccccucaagcuggcaaacgguacuaaauaucgcccuccagcuaaacuucugaaggagcgaggguuuuucggcgccauugcgggauuuuuggagggcgggugggaaggaaugauagccgguuggcacggcuacaccagucauggggcacacggaguggcugucgccgcugaccucaagucuacacaggaggccaucaacaagauuaccaaaaaucugaacuccuuaagcgaacuggaggugaagaaucuccaaagacuuucgggcgcaauggaugaacugcauaacgagaucuuggagcuagacgaaaaaguagaugaccugagggccgauacuauaucuucccagauugagcucgcuguucugcuuucaaaugaagguaucaucaacagugaggacgaacaccuguuggcgcucgagcggaagcugaaaaagauguuagggcccagcgcaguggauauuggcaauggauguuucgagacgaagcacaaaugcaaccagacaugccuggaccguaucgccgcuggcaccuuuaaugccggggaguucucccuaccaacuuuugauucucucaacauuaccgcagccagccugaaugacgauggacuugacaaccauacaauauugcuguauuacucaaccgcugccaguucccucgcagucacucugaugcuugcgaucuucauuguguauauggucagccgcgacaauaucucuuguucaaucugccuguga

SEQ ID NO: 156193 - RNA, 1758 nt, Artificial Sequence
  derived and/or modified CDS sequence (opt3) from hemagglutinin__InfluenzaB__AHL94482
augaaggccaucauugugcugcucauggucguuaccagcaacgcugacagaauaugcacaggcaucacuuccucuaauucaccccacgugguaaaaacggcaacccagggggaggugaacgucacaggagugauuccucuuacuaccacaccaaccaagagucauuucgccaaucugaaagguacugaaacaaggggcaaguuguguccgaaaugcuuaaacuguaccgaucuggacguugcgcuagggcggcccaagugcacgggaaagaucccuagcgcucgcguguccauucuccacgagguccgaccagugacuucuggcuguuuucccaucaugcaugaucguaccaaaauaagacaacugccuaaucuucugagggguuacgaacacauccgguugucgacacauaacguaauuaaugccgagaacgcaccagggggacccuauaagaucggcacuucaggcagcugcccuaauguuaccaacgggaauggauucuuuacaaccauggccugggcugugccgaaaaacgacaagaauaaaacggcaacuaacccacucacaauugaaguccccuacaucuguaccgagggugaggaucagauaacuguguggggcuuccacagugacaaugaaacacagauggccaagcuguauggggauuccaagccucagaaauuuaccucuagcgcuaacggagugacgacccacuacgucucccaaauuggcgguuucccaaaccagacagaggacgggggacugccccagucaggccgcaucguuguggauuauaugguacagaagaguggcaaaacugggaccauuacauaccaaagaggaauccucuuaccucagaagguguggugcgccagcgguaggucuaaagucaucaagggcucccugccacuuauuggggaagcggacuguuugcaugagaaauauggaggccugaauaagucaaagcccuacuacacuggugagcacgcaaaagccauagggaacugcccgaucugggugaagaccccucuaaaacucgcuaauggcacaaaguaucggcccccagccaaacugcuuaaggaacgcggauuuuucggcgcaauugcuggguuucuggagggagguugggaaggcaugaucgccggguggcauggauacaccagccacggcgcgcacgguguugccguggcagcugauuugaagaguacucaggaggccauaaacaaaauuacgaagaaucucaacucucuguccgaauuagaggucaaaaaucugcagcgacucagcggggcuauggacgagcuucauaacgaaauccuggaguuggaugaaaagguggacgaccuaagagccgauacaaucucgucucaaauugagcuggcaguacuccuguccaaugaaggcaucauuaacucagaggacgagcaccuucuggccuuggaaaggaaacucaagaagaugcugggaccuagugcuguugagauaggcaauggguguuucgaaaccaaacauaagugcaaccagacuugcuuagaucggaucgcggcaggaaccuuugacgccggugaguucagccugcccacauuugauucccuaaauauuaccgcugccucucucaacgacgauggccuggacaaucacacuauccuuuuguauuacagcacagcagccucaagucuggcugugacgcucaugaucgccauuuucgucguguauauggucucccgugauaacgugagcuguucuauaugccuguga

SEQ ID NO: 156194 - RNA, 1755 nt, Artificial Sequence; identical to SEQ ID NO: 156177
  derived and/or modified CDS sequence (opt3) from hemagglutinin__InfluenzaB__AHL94493

SEQ ID NO: 156195 - RNA, 1755 nt, Artificial Sequence; identical to SEQ ID NO: 156179
  derived and/or modified CDS sequence (opt3) from hemagglutinin__InfluenzaB__AHL94504

SEQ ID NO: 156196 - RNA, 1758 nt, Artificial Sequence
  derived and/or modified CDS sequence (opt3) from hemagglutinin__InfluenzaB__AHL94515
augaaggccaucauugugcugcucauggucguuaccagcaacgcugacagaauaugcacaggcaucacuuccucuaauucaccccacgugguaaaaacggcaacccagggggaagugaacgucacaggagugauuccucuuacuaccacaccaaccaagagucauuucgccaaucugaaagguacugaaacaaggggcaaguuguguccgaaaugcuuaaacuguaccgaucuggacguugcgcuagggcggcccaagugcacgggaaagaucccuagcgcucgcguguccauucuccacgagguccgaccagugacuucuggcuguuuucccaucaugcaugaucguaccaaaauaagacaacugccuaaucuucugagggguuacgaacacauccgguugucgacauauaacguaauuaaugccgaggacgcaccagggggacccuacaagaucggcacuucaggcagcugcccuaacguuaccaaugggaacggauucuuugccacaauggcuugggcagugccgaaaaaugauaagaacaaaaccgccacgaauccacucacuauugaaguccccuauaucuguacagagggugaggaccagauaaccguguggggcuuccauagugauaacgaaacucagauggagaagcuguacggggacuccaagccucagaaauuuacaucuagcgcuaauggagugaccacgcacuaugucucccaaauuggcgguuucccaaaccagaccgaagaugggggacugccccagucaggccgcaucguuguggacuacaugguacagaagaguggcaaaacagggacuauuaccuaucaaagaggaauccucuuaccucagaagguguggugcgccagcgguaggucuaaagucaucaagggcucccugccacuuauuggggaggcggauuguuugcacgagaaauacggaggccugaacaagucaaagcccuacuauacaggugaacaugcaaaagccauagggaauugcccgaucugggugaagacuccucuaaaacucgcuaacggcaccaaguaccggcccccagccaaacugcuuaaggagcgcggauuuuucggcgcaauugcuggguuucuggaaggagguugggagggcaugaucgccggguggcacggauauacaagccauggcgcgcacgguguugccguggcagcugacuugaagaguacccaggaagccauaaauaaaauuacuaagaaccucaauucucuguccgaguuagaggucaaaaaccugcagcgacucagcggggcuauggaugaacuucacaaugagauccuggaauuggacgagaagguggacgaucuaagagccgacacgaucucgucucaaauugaacuggcaguacuccuguccaacgagggcaucauuaauucagaggaugaacaucuucuggccuuggagaggaaacucaagaagaugcugggaccuagugcuguugaaauaggcaacggguguuucgagacaaaacacaagugcaaucagaccugcuuagaccggaucgcggcaggaacuuuugaugccggugaguucagccugcccaccuuugacucccuaaacauuacagcugccucucucaaugaugacggccuggauaaccauaccauccuuuuguacuauagcacugcagccucaagucuggcugugacacucaugaucgccauuuucgucguguacauggucucccgugacaaugugagcuguucuauaugccuguga

SEQ ID NO: 156197 - RNA, 1755 nt, Artificial Sequence; identical to SEQ ID NO: 156179
  derived and/or modified CDS sequence (opt3) from hemagglutinin__InfluenzaB__AHL94526

SEQ ID NO: 156198 - RNA, 1758 nt, Artificial Sequence
  derived and/or modified CDS sequence (opt3) from hemagglutinin__InfluenzaB__AHL94537
augaaggccaucauugugcugcucauggucguuaccagcaacgcugacagaauaugcacaggcaucacuuccucuaauucaccccacgugguaaaaacggcaacccagggggaggugaacgucacaggagugauuccucuuacuaccacaccaaccaagagucauuucgccaaucugaaagguacugaaacaaggggcaaguuguguccgaaaugcuuaaacuguaccgaucuggacguugcgcuagggcggcccaagugcacgggaaagaucccuagcgcucgcguguccauucuccacgagguccgaccagugacuucuggcuguuuucccaucaugcaugaucguaccaaaauaagacaacugccuaaucuucugagggguuacgaacacauccgguugucgacacauaacguaauuaaugccgagaacgcaccagggggacccuauaagaucggcacuucaggcagcugcccuaauguuaccaacgggaauggauucuuugccacaauggcuugggcagugccgaaaaacgacaagaauaaaaccgccacgaacccacucacuauugaaguccccuacaucuguacagagggugaggaucagauaaccguguggggcuuccacagugacaaugaaacucagauggcuaagcuguauggggauuccaacccucagaaguuuacaucuagcgccaacggagugaccacgcacuacauuucccaaaucggcgguuucccaaaucagaccgaggacgggggacugccccagucaggccgcauugucguugauuauauggugcagaaaaguggcaagacagggacuaucaccuaccaaagaggaauccucuuaccucagaaaguauggugcgcgagcgguaggucuaaggugauuaaaggcucccugccacuuauaggggaagcagacuguuugcaugagaaguauggaggccugaacaaaucaaagcccuacuacacaggugagcacgccaaggcuaucgggaauugcccgauuugggucaaaacuccucuaaagcucgccaacggcaccaaauaucggcccccagcaaagcugcuuaaagaacgcggauuuuucggcgcuaucgccggguuucuggagggagguugggaaggcaugauagcgggguggcauggauacacaagccacggcgcccacgguguggcaguugcugccgauuugaagaguacccaggaggcuauuaauaagaucacuaaaaaccucaauucucuguccgaauuagaggugaagaaccugcagcgacucagcggggccauggacgagcuucauaaugaaauccuggaguuggaugaaaaagucgacgaccuaagagcagauacgauuucgucucaaaucgagcuggccgugcuccuguccaacgaaggcauuauaaauucagaggacgagcaccuucuggcuuuggaaaggaagcucaaaaagaugcugggaccuagugcgguagagaucggcaacggguguuucgaaacaaagcauaaaugcaaucagaccugcuuagaucggauugcagccggaacuuuugacgcuggugaguucagccugcccaccuuugauucccuaaacaucacagccgcaucucucaaugacgauggccuggacaaccacaccauccuuuuguauuacagcacugccgcuucaagucuggccguuacacucaugauugcaauauucguggucuauauggugucccgugauaacgucagcuguucuaucugccuguga

SEQ ID NO: 156199 - RNA, 1755 nt, Artificial Sequence
  derived and/or modified CDS sequence (opt3) from hemagglutinin__InfluenzaB__AHL94548
augaaggccaucauugugcugcucauggucguuaccagcaacgcugacagaauaugcacaggcaucacuuccucuaauucaccccacgugguaaaaacggcaacccagggggaggugaacgucacaggagugauuccucuuacuaccacaccaaucaagaguuacuucgccaaucugaaagguaccaagacuaggggcaaauuguguccggauugcuuaaacuguacagaccuggauguugcgcuagggcggcccaugugcgugggaaccacgccuagcgcuaaggccuccauucuccaugaaguccgcccagugacuucuggcuguuuucccaucaugcacgaccgaaccaagauacgucaacuggcaaaucuucugagagguuaugagaacaucagguugucgacacagaauguaauugaugccgaacgggcuccugggggaccauaccgccucggcacuucaggcagcugccccaacgcaaccaguaaauccggguucuuugccacaauggcuugggccguuccuaaggacaauaacaaaaaugcgaccaacccacugacgguggaggucccguauaucugugcagaaggagaggaucagauuacugugugggguuuccauucugacaauaagacacagaugaaaaaccuguacggcgauagcaauccccaaaaguuuaccuccucagccaacggggugacuacacacuaugucagucagaucggaggcuucccugaccagaccgaggauggugggcucccacagagcggaagaauaguuguggacuacaugaugcaaaagcccggcaaaacgggcaccauuguauaucagcgcgggguguuacugccucagaaggucuggugcgcuucuggacgguccaaagugaucaaggguucacuuccauugauuggcgaagccgauugucugcaugagaaauacgggggacuaaacaagagcaaacccuacuauacaggcgaacacgcaaaggcuaucgguaauugcccgaucuggguuaagacuccucucaaacuggccaacgggaccaaguacaggcccccagcgaaacuucugaaggagcgaggcuuuuucggagccauugcaggcuuuuuggaagggggaugggaagguaugauagcuggcuggcacggguauacaagucauggagcccacggcguggcugucgccgcagaccucaaaucuacucaggaggccaucaauaagauuaccaagaacuuaaauucccugagcgaacuggaggugaaaaaccuccaaagacuuucgggugcuauggacgaacugcauaaugagaucuuggagcuagaugaaaagguagacgaucugagggcggacacaauaucuucccagauugagcucgcaguucugcuuucaaacgaagggaucaucaauagugaggaugaacaccuguuggcccucgagcggaaacugaagaaaauguuaggcccuagcgcuguggacauuggaaacggcuguuucgagaccaagcacaagugcaaucagacuugccuggaucguaucgccgcagggacguuuaacgccggagaguucucccuacccacauuugacucucucaauauuaccgcugccagccugaacgaugacggucuugauaaucauacuauauugcuguacuauucaaccgcagcgaguucccucgcugucacacugaugcuugccaucuucauuguguacauggucagccgcgacaacgugucuuguucaaucugccuguga

SEQ ID NO: 156200 - RNA, 1755 nt, Artificial Sequence; identical to SEQ ID NO: 156177
  derived and/or modified CDS sequence (opt3) from hemagglutinin__InfluenzaB__AHL94559

SEQ ID NO: 156201 - RNA, 1755 nt, Artificial Sequence; identical to SEQ ID NO: 154902
  derived and/or modified CDS sequence (opt3) from hemagglutinin__InfluenzaB__AHL94570

SEQ ID NO: 156202 - RNA, 1755 nt, Artificial Sequence; identical to SEQ ID NO: 154902
  derived and/or modified CDS sequence (opt3) from hemagglutinin__InfluenzaB__AHL94581

SEQ ID NO: 156203 - RNA, 1755 nt, Artificial Sequence; identical to SEQ ID NO: 154902
  derived and/or modified CDS sequence (opt3) from hemagglutinin__InfluenzaB__AHL94592

SEQ ID NO: 156204 - RNA, 1758 nt, Artificial Sequence
  derived and/or modified CDS sequence (opt3) from hemagglutinin__InfluenzaB__AHL94603
augaaggccaucauugugcugcucauggucguuaccagcaacgcugacagaauaugcacaggcaucacuuccucuaauucaccccacgugguaaaaacggcaacccagggggaggugaacgucacaggagugauuccucuuacuaccacaccaaccaagagucauuucgccaaucugaaagguacugaaacaaggggcaaguuguguccgaaaugcuuaaacuguaccgaucuggacguugcgcuagggcggcccaagugcacgggaaagaucccuagcgcucgcguguccauucuccacgagguccgaccagugacuucuggcuguuuucccaucaugcaugaucguaccaaaauaagacaacugccuaaucuucugagggguuacgaaaacauccgguugucgacacacaauguaauuaacgccgagaaugcaccagggggacccuauaagaucggcacuucaggcagcugcccuaacguuaccaaugggaacggauucuuugccacaauggcuugggcagugccgaaaaaugacaagaacaaaaccgccacgaauccacucacuauugaaguccccuacaucuguacagagggugaggaucagauaaccguguggggcuuccauagugacaacgaaacucagauggcuaagcuguauggggauuccaagccucagaaauuuacaucuagcgccaacggagugaccacgcacuacgucucccaaauuggcgguuucccaaaucagaccgaggacgggggacugccccagucaggccgcaucguuguggauuauaugguacagaagaguggcaaaacagggacuauuaccuaccaaagaggaauccucuuaccucagaagguguggugcgcgagcgguaggucuaaagucaucaagggcucccugccacuuauuggggaagcagacuguuugcacgagaaauauggaggccugaacaagucaaagcccuacuacacaggugagcaugccaaagcuauagggaauugcccgaucugggugaagacuccucuaaaacucgccaacggcaccaaguaucggcccccagcaaaacugcuuaaggaacgcggauuuuucggcgcuauugccggguuucuggagggagguugggaaggcaugaucgcgggguggcacggauacacaagccauggcgcccacgguguugcaguggcugccgauuugaagaguacccaggaggcuauaaauaaaauuacuaagaaccucaauucucuguccgaauuagaggucaaaaaccugcagcgacucagcggggccauggacgagcuucacaaugaaauccuggaguuggaugaaaagguggacgaccuaagagcagauacgaucucgucucaaauugagcuggccguacuccuguccaacgaaggcaucauuaauucagaggacgagcaucuucuggcuuuggaaaggaaacucaagaagaugcugggaccuagugcgguugagauaggcaacggguguuucgaaacaaaacacaagugcaaucagaccugcuuagaucggaucgcagccggaacuuuugacgcuggugaguucagccugcccaccuuugauucccuaaacauuacagccgcaucucucaaugacgauggccuggacaaccauaccauccuuuuguauuacagcacugccgcuucaagucuggccgugacacucaugaucgcaauuuucgucguguauauggucucccgugauaacgugagcuguucuauaugccuguga

SEQ ID NO: 156205 - RNA, 1758 nt, Artificial Sequence
  derived and/or modified CDS sequence (opt3) from hemagglutinin__InfluenzaB__AHL94614
augaaggccaucauugugcugcucauggucguuaccagcaacgcugacagaauaugcacaggcaucacuuccucuaauucaccccacgugguaaaaacggcaacccagggggaggugaacgucacaggagugauuccucuuacuaccacaccaaccaagagucauuucgccaaucugaaagguacugaaacaaggggcaaguuguguccgaaaugcuuaaacuguaccgaucuggacguugcgcuagggcggcccaagugcacgggaaagaucccuagcgcucgcguguccauucuccacgagguccgaccagugacuucuggcuguuuucccaucaugcaugaucguaccaaaauaagacaacugccuaaucuucugagggguuacgaacacauccgguugucgacacauaacguaauuaaugccgagaacgcaccagggggacccuauaagaucggcacuucaggcagcugcccuaauguuaccaacgggaauggauucuuugccacaauggcuugggcagugccgaaaaacgacaagaauaaaaccgccacgaacccacucacuauugaaguccccuacaucuguacagagggugaggaucagauaaccguguggggcuuccacagugacaaugaaacucagauggcuaagcuguauggggauuccaagccucagaaauuuacaucuagcgccaacggagugaccacgcacuacgucucccaaauuggcgguuucccaaaccagaccgaggacgggggacugccccagucaggccgcaucguuguggauuauaugguacagaagaguggcaaaacagggacuauuaccuaccaaagaggaauccucuuaccucagaagguguggugcgcgagcgguaggucuaaagucaucaagggcucccugccacuuauuggggaagcagacuguuugcaugagaaauauggaggccugaauaagucaaagcccuacuacacaggugagcacgccaaagcuauagggaacugcccgaucugggugaagacuccucuaaaacucgccaauggcaccaaguaucggcccccagcaaaacugcuuaaggaacgcggauuuuucggcgcuauugccggguuucuggagggagguugggaaggcaugaucgcgggguggcauggauacauaagccacggcgcccacgguguugcaguggcugccgauuugaagaguacacaggaggcuauuaacaaaaucaccaagaaucucaacucucuguccgaauuagaggucaaaaaucugcagcgacucagcggggccauggacgagcuucauaacgaaauccuggaguuggaugaaaagguggacgaccuaagagcagauacuauuucgucucaaaucgagcuggccguacuccuguccaaugaaggcauuauaaacucagaggacgagcaccuucuggcuuuggaaaggaaacucaagaagaugcugggaccuagugcgguugagaucggcaauggguguuucgaaacgaaacauaagugcaaccagacaugcuuagaucggauugcagccggaaccuuugacgcuggugaguucagccugcccacuuuugauucccuaaauaucaccgccgcaucucucaacgacgauggccuggacaaucacacaauccuuuuguauuacagcaccgccgcuucaagucuggccgugacucucaugauugcaauauucgucguguauauggucucccgugauaacgugagcuguucuaucugccuguga

SEQ ID NO: 156206 - RNA, 1755 nt, Artificial Sequence; identical to SEQ ID NO: 156179
  derived and/or modified CDS sequence (opt3) from hemagglutinin__InfluenzaB__AHL94624

SEQ ID NO: 156207 - RNA, 1758 nt, Artificial Sequence
  derived and/or modified CDS sequence (opt3) from hemagglutinin__InfluenzaB__AHL94646
augaaggccaucauugugcugcucauggucguuaccagcaacgcugacagaauaugcacaggcaucacuuccucuaauucaccccacgugguaaaaacggcaacccagggggaggugaacgucacaggagugauuccucuuacuaccacaccaaccaagagucauuucgccaaucugaaagguacugaaacaaggggcaaguuguguccgaaaugcuuaaacuguaccgaucuggacguugcgcuagggcggcccaagugcacgggaaagaucccuagcgcucgcguguccauucuccacgagguccgaccagugacuucuggcuguuuucccaucaugcaugaucguaccaaaauaagacaacugccuaaucuucugagggguuacgaacacauccgguugucgacacauaacguaauuaaugccgagaacgcaccagggggacccuauaagaucggcacuucaggcagcugccucaauguuaccaacgggaauggauucuuugccacaauggcuugggcagugccuaaaaacgacaagaauaaaaccgccacgaacccacugacuauugaagucccguacaucuguacagagggugaggaucagauaaccguguggggcuuccacagugacaaugaaacucagauggcuaagcuguauggggauuccaagccccagaaauuuacaucuagcgccaacggagugaccacgcacuacgucucccaaauuggcgguuucccuaaccagaccgaggacgggggacucccacagucaggccgcaucguuguggauuauaugguacagaagaguggcaaaacagggacuauuaccuaccaaagaggaaucuuacugccccagaagguguggugcgcgagcgguaggucuaaagucaucaagggcucccuuccuuugauuggggaagcagacugucugcaugagaaauauggaggccuaaauaagucaaagccauacuacacaggugagcacgccaaagcuauagggaacugccccaucugggugaagacuccgcucaaacuggccaauggcaccaaguaucggccucccgcaaaacuucugaaggaacgcggauuuuucggcgcuauugccggguuuuuggagggagguugggaaggcaugaucgcgggguggcauggauacacaagccacggcgcccacgguguugcaguggcugccgaucucaagaguacccaggaggcuauaaacaaaauuacuaagaaucugaacucuuuauccgaacuggaggucaaaaaucuccagcgacuuagcggggccauggacgagcugcauaacgaaaucuuggagcuagaugaaaagguggacgaccugagagcagauacgaucucgucucaaauugagcucgccguacugcuuuccaaugaaggcaucauuaacucagaggacgagcaccuguuggcucucgaaaggaaacugaagaagauguuaggaccaagugcgguugagauaggcaauggguguuucgaaacaaaacauaagugcaaccagaccugccuggaucggaucgcagccggaacuuuugacgcuggugaguucagccuaccuaccuuugauucccucaauauuacagccgcaucucugaacgacgauggccuugacaaucacaccaucuugcuguauuacagcacugccgcuucaagucucgccgugacacugaugaucgcaauuuucgucguguauauggucucccgugauaacgugagcuguucuauaugccuuuga

SEQ ID NO: 156208 - RNA, 1758 nt, Artificial Sequence
  derived and/or modified CDS sequence (opt3) from hemagglutinin__InfluenzaB__AHL94657
augaaggccaucauugugcugcucauggucguuaccagcaacgcugacagaauaugcacaggcaucacuuccucuaauucaccccacgugguaaaaacggcaacccagggggaggugaacgucacaggagugauuccucuuacuaccacaccaaccaagagucauuucgccaaucugaaagguacugaaacaaggggcaaguuguguccgaaaugccccaacuguaccgauuuagacguugcgcuggggcggccuaagugcacgggaaagaucccaagcgcucgcguguccauucuacacgagguccgacccgugacuucuggcuguuuuccuaucaugcaugaucguaccaaaauaagacaacucccaaaucugcuuagggguuacgaacacauccggcugucgacacauaacguaauuaaugccgagucagcacccgggggaccuuauaagaucggcacuagcggcaguugcccaaacguuaccaaugggaacggauucuuugccacaauggcuugggcagugccgaaaaaugacaagaacaaaaccgccacggaucccuugacuauugaagucccuuacaucuguacagagggugaggaccagauaaccguguggggcuuccacuccgauaaugaaacucagauggcuaagcucuauggggacucuaagccacagaaauuuacaagcuccgccaacggagugaccacgcacuacgucucacaaauuggcgguuuccccaaucagaccgaggaugggggacugccucagaguggccgcaucguuguggacuauaugguacaaaagagcggcaaaacagggacuauuaccuaccagagaggaauccugcucccacagaagguguggugcgcgucugguagguccaaagucaucaagggcucauuaccccugauuggggaagcagauugucuucaugagaaauauggaggcuugaacaagagcaagccguacuacacaggugagcacgccaaagcuauagggaacugcccuaucugggugaagacuccccugaaacuagccaauggcaccaaguaucggccuccagcaaaacuccugaaggaacgcggauuuuucggcgcuauugccggguuucuugagggagguugggaaggcaugaucgcgggguggcauggauacacaagucacggcgcccacgguguugcaguggcugccgaccugaagucuacccaggaggcuauaaacaaaauuacuaagaauuugaacucccucagcgaacuggaggucaaaaauuuacagcgacugucgggggccauggaugagcuccauaacgaaauccuugagcuggacgaaaagguggacgauuugagagcagacacgaucucuucccaaauugagcuagccguacugcucucaaaugaaggcaucauuaacagugaggaugagcaucugcuugcucuggaaaggaaauugaagaagaugcucggacccagcgcgguugagauaggcaauggguguuucgaaacaaaacacaagugcaaccagaccugccuggaccggaucgcagccggaacuuuugaugcuggugaguucuccuuaccaaccuuugacucucugaauauuacagccgcaagccuaaacgaugacggccucgauaaucacaccauccugcuuuauuacucaacugccgcuaguuccuuggccgugacacugaugaucgcaauuuucgucguguauauggucagccgugacaacgugucuuguucaauaugccucuga

SEQ ID NO: 156209 - RNA, 1755 nt, Artificial Sequence; identical to SEQ ID NO: 156179
  derived and/or modified CDS sequence (opt3) from hemagglutinin__InfluenzaB__AHL94668

SEQ ID NO: 156210 - RNA, 1755 nt, Artificial Sequence; identical to SEQ ID NO: 156179
  derived and/or modified CDS sequence (opt3) from hemagglutinin__InfluenzaB__AHL94679

SEQ ID NO: 156211 - RNA, 1758 nt, Artificial Sequence; identical to SEQ ID NO: 156204
  derived and/or modified CDS sequence (opt3) from hemagglutinin__InfluenzaB__AHL94690

SEQ ID NO: 156212 - RNA, 1758 nt, Artificial Sequence
  derived and/or modified CDS sequence (opt3) from hemagglutinin__InfluenzaB__AHL94701
augaaggccaucauugugcugcucauggucguuaccagcaacgcugacagaauaugcacaggcaucacuuccucuaauucaccccacgugguaaaaacggcaacccagggggaggugaacgucacaggagugauuccucuuacuaccacacugaccaagagucauuucgccaauuugaaagguacugaaacaaggggcaaguuauguccaaaaugccugaacuguaccgaucuagacguugcgcucgggcggccgaagugcacgggaaagauccccagcgcucgcguguccauucugcacgagguccgaccugugacuucuggcuguuuuccaaucaugcaugaucguaccaaaauaagacaacuucccaaucuguugagggguuacgaacacauccggcucucgacacauaacguaauuaaugccgagaacgcaccugggggaccauauaagaucggcacuucaggcagcugccugaauguuaccaacgggaauggauucuuugccacaauggcuugggcagugcccaaaaacgacaagaauaaaaccgccacgaacccucugacuauugaagucccauacaucuguacagagggugaggaucagauaaccguguggggcuuccacagugacaaugaaacucagauggcuaagcucuauggggauuccaagccgcagaaauuuacaucuagcgccaacggagugaccacgcacuacgucucccaaauuggcgguuuccccaaccagaccgaggacgggggauuaccucagucaggccgcaucguuguggauuauaugguacagaagaguggcaaaacagggacuauuaccuaccaaagaggaauccugcuuccacagaagguguggugcgcgagcgguaggucuaaagucaucaagggcuccuugccccugauuggggaagcagacugucuacaugagaaauauggaggccucaauaagucaaagccuuacuacacaggugagcacgccaaagcuauagggaacugcccaaucugggugaagacuccccugaaacuugccaauggcaccaaguaucggccgccugcaaaacuguugaaggaacgcggauuuuucggcgcuauugccggguuucucgagggagguugggaaggcaugaucgcgggguggcauggauacacaagccacggcgcccacgguguugcaguggcugccgaucugaagaguacccaggaggcuauaaacaaaauuacuaagaauuuaaacucucuguccgaacucgaggucaaaaaucuucagcgacugagcggggccauggacgaguugcauaacgaaauccuagagcuggaugaaaagguggacgaccucagagcagauacgaucucgucucaaauugagcuggccguacuucuguccaaugaaggcaucauuaacucagaggacgagcacuugcucgcucuggaaaggaaauuaaagaagaugcugggacccagugcgguugagauaggcaauggguguuucgaaacaaaacauaagugcaaccagaccugccuagaucggaucgcagccggaacuuuugacgcuggugaguucagccucccaaccuuugauucccugaauauuacagccgcaucucuuaacgacgauggcuuggacaaucacaccauccugcucuauuacagcacugccgcuucaagucuggccgugacacuuaugaucgcaauuuucgucguguauauggucucccgugauaacgugagcuguucuauaugccuguga

SEQ ID NO: 156213 - RNA, 1755 nt, Artificial Sequence; identical to SEQ ID NO: 156177
  derived and/or modified CDS sequence (opt3) from hemagglutinin__InfluenzaB__AHL94712

SEQ ID NO: 156214 - RNA, 1758 nt, Artificial Sequence; identical to SEQ ID NO: 156208
  derived and/or modified CDS sequence (opt3) from hemagglutinin__InfluenzaB__AHL94723

SEQ ID NO: 156215 - RNA, 1755 nt, Artificial Sequence; identical to SEQ ID NO: 156177
  derived and/or modified CDS sequence (opt3) from hemagglutinin__InfluenzaB__AHL94734

SEQ ID NO: 156216 - RNA, 1758 nt, Artificial Sequence
  derived and/or modified CDS sequence (opt3) from hemagglutinin__InfluenzaB__AHL94745
augaaggccaucauugugcugcucauggucguuaccagcaacgcugacagaauaugcacaggcaucacuuccucuaauucaccccacgugguaaaaacggcaacccagggggaggugaacgucacaggagugauuccucuuacuaccacaccaaccaagagucauuucgccaaucugaaagguacugaaacaaggggcaaguuguguccgaaaugcuuaaacuguaccgaucuggacguugcgcuagggcggcccaagugcacgggaaagaucccuagcgcucgcguguccauucuccacgagguccgaccagugacuucuggcuguuuucccaucaugcaugaucguaccaaaauaagacaacugccuaaucuucugagggguuacgaacacauccgguugucgacacauaacguaauuaaugccgagaacgcaccagggggacccuauaagaucggcacuucaggcagcugccucaauguuaccaacgggaauggauucuuugccacaauggcuugggcagugccuaaaaacgacaagaauaaaaccgccacgaacccacugacuauugaagucccguacaucuguacagagggugaggaucagauaaccguguggggcuuccacagugacaaugaaacucagauggcuaagcuguauggggauuccaagccccagaaauuuacaucuagcgccaacggagugaccacgcacuacgucucccaaauuggcgguuucccuaaccagaccgaggacgggggacucccacagucaggccgcaucguuguggauuauaugguacagaagaguggcaaaacagggacuauuaccuaccaaagaggaaucuuacugccccagaagguguggugcgcgagcgguaggucuaaagucaucaagggcucccuuccuuugauuggggaagcagacugucugcaugagaaauauggaggccuaaauaagucaaagccauacuacacaggugagcacgccaaagcuauagggaacugccccaucugggugaagacuccgcucaaacuggccaauggcaccaaguaucggccucccgcaaaacuucugaaggaacgcggauuuuucggcgcuauugccggguuuuuggagggagguugggaaggcaugaucgcgggguggcauggauacacaagccacggcgcccacgguguugcaguggcugccgaucucaagaguacccaggaggcuauaaacaaaauuacuaagaaucugaacucuuuauccgaacuggaggucaaaaaucuccagcgacuuagcggggccauggacgagcugcauaacgaaaucuuggagcuagaugaaaagguggacgaccugagagcagauacgaucucgucucaaauugagcucgccguacugcuuuccaaugaaggcaucauuaacucagaggacgagcaccuguuggcucucgaaaggaaacugaagaagauguuaggaccaagugcgguugagauaggcaauggguguuucgaaacaaaacauaagugcaaccagaccugccuggaucggaucgcagccggaacuuuugacgcuggugaguucagccuaccuaccuuugauucccucaauauuacagccgcaucucugaacggcgacgggcuugauaaucacaccaucuugcuguauuacagcacugccgcuucaagucucgccgugacacugaugaucgcaauuuucgucguguauauggucucccgugacaacgugagcuguucuauaugccuuuga

SEQ ID NO: 156217 - RNA, 1755 nt, Artificial Sequence; identical to SEQ ID NO: 154902
  derived and/or modified CDS sequence (opt3) from hemagglutinin__InfluenzaB__AHL94756

SEQ ID NO: 156218 - RNA, 1758 nt, Artificial Sequence; identical to SEQ ID NO: 156207
  derived and/or modified CDS sequence (opt3) from hemagglutinin__InfluenzaB__AHL94766

SEQ ID NO: 156219 - RNA, 1755 nt, Artificial Sequence
  derived and/or modified CDS sequence (opt3) from hemagglutinin__InfluenzaB__AHL94777
augaaggccaucauugugcugcucauggucguuaccagcaacgcugacagaauaugcacaggcaucacuuccucuaauucaccccacgugguaaaaacggcaacccagggggaggugaacgucacaggagccauuccucuuacuaccacaccaaccaagaguuacuucgcgaaucugaaagguacuaggacacggggcaaguuguguccggauugcuuuaacuguaccgacuuagauguggcucuggggcgccccaugugcguuggaacgacuccuagcgccaaagcauccauccuacaugaagugcgaccagucaccucuggcuguuuccccauuaugcacgaccguacaaagaucagacaacucccuaaucugcuuagggguuaugagaacauacggcugucgacucagaaugccaucgaugcugaaaaggcaccagggggacccuaccgcuugggcaccucaggcagcugcccuaacgccacaaguaaaauuggguuuuucgcuaccauggccugggcggugccaaaggacaauuauaaaaacgcaacgaauccgcagacuguagagguucccuacaucuguacagaaggagaggaucagauuaccgugugggguuuucauuccgacaacaagacucaaaugaaaaaucucuauggcgauucuaacccucagaaguucacaagcuccgccaauggggucaccacgcacuacgugucacagaucggagacuuuccagaucagaccgaggacggcggucugccccaaagugggagaauaguggucgauuauaugguucagaagccuggaaaaacaggcacuauuguguaccagaggggcguacugcucccacagaagguguggugcgcuagcgggcggucuaaagucaucaagggauccuuaccccugauuggugaagccgacugucuucaugagaaauacggcggguugaacaagucaaaaccguauuacaccggagaacacgcaaaggcuaucggcaacugcccuaucugggugaagacaccccugaaacuagccaaugguacuaaguaucgcccuccagcgaaacuccugaaggagcgaggguucuuuggcgccauugcaggauuccuugagggcgggugggaaggaaugauagcugguuggcacggcuacaccagccauggggcccacggaguugcuguggccgcagaccugaaaaguacacaagaggccaucaacaagauuaccaagaauuugaacucucucuccgaacuggaggucaaaaauuuacagagacugagcggcgcuauggaugaacuccauaacgagauccuugagcuggacgaaaagguggaugacuugagggcggauacuauaucgucucagauugagcuagcaguacugcucuccaaugaagguaucaucaacucagaggacgaacaucugcuugcccuggagcggaaauugaagaaaaugcucgggcccagugcuguugauauuggcaauggauguuuugagacgaagcacaagugcaaccaaacaugccuggaccguaucgccgcaggcaccuucaaugccggggaauuuagcuuaccaacuuucgauucccugaacauuaccgcugccucucuaaaugacgauggacucgacaaccacacaauacugcuuuauuacagcaccgcagcgucaaguuuggcugugacucugaugcucgccaucuucauugucuauauggugucccgcgacaaugucagcuguucuaucugccuguga

SEQ ID NO: 156220 - RNA, 1758 nt, Artificial Sequence; identical to SEQ ID NO: 156204
  derived and/or modified CDS sequence (opt3) from hemagglutinin__InfluenzaB__AHL94797

SEQ ID NO: 156221 - RNA, 1755 nt, Artificial Sequence
  derived and/or modified CDS sequence (opt3) from hemagglutinin__InfluenzaB__AHL94808
augaaggccaucauugugcugcucauggucguuaccagcaacgcugacagaauaugcacaggcaucacuuccucuaauucaccccacgugguaaaaacggcaacccagggggaagugaacgucacaggagccauuccucuuacuaccacaccaaccaagaguuacuucgcgaaucugaaagguaucaggacucggggcaaguuguguccggauugcuuaaacuguacagaccuggauguggcucuagggcgccccaugugcguuggaaccacgccuagcgccaaagcauccauucuccaugaagugcgaccagucacuucuggcuguuuucccaucaugcacgaccguaccaagauaagacaacugccuaaucuucugagggguuaugagaacauccgguugucgacacagaaugugauugaugccgaaaaggcuccagggggacccuaccgccucggcacuucaggcagcugcccuaacgcaaccaguaaaaucggguucuuugccacaauggcuugggccguaccaaaggacaauuauaaaaacgcgaccaauccgcagacgguugaggugcccuacauuuguacugaaggagaggaucagaucacagucugggguuuccauuccgacaacaagacccaaaugaaaaaucuguauggcgauucuaacccucagaaguuuacuagcuccgcaaauggggugacaacccacuacgugucacagauaggagacuucccagaucagacggaggacggcggucugccccaaagugggagaauugucguugauuauauggugcagaagccuggaaaaaccggcacaaucguauaccagaggggcgugcucuuaccacagaaggucuggugcgccagcgggcggucuaaagugauuaagggaucccugccccuuaucggugaagcugacuguuugcaugagaaauacggcgggcugaacaagucaaaaccguauuacacuggagaacacgccaaggcaaucggcaacugcccuauuuggguuaagaccccucuaaaacucgcuaaugguacaaaguaucgcccacccgccaaacugcuuaaggagcgaggguuuuucggcgcgauagccggauuucuggagggcgggugggaaggaaugaucgcagguuggcacggcuacacuagccauggggcucacggaguggccgucgcugccgacuugaaaaguacccaagaggcaauuaacaagaucacaaagaaucucaacucucuguccgaauuagaggugaaaaaucugcagagacucagcggcgccauggaugaacuucauaacgagauacuggaguuggacgaaaagguagaugaccuaagggcugauaccauuucgucucagaucgagcuggcgguucuccuguccaaugaagguaucauuaacucagaggacgaacaccuucuggcauuggagcggaaacucaagaaaaugcuggggcccagugccguggauaucggcaauggauguuucgagacuaagcacaagugcaaccaaacgugcuuagaccguauugcugccggcacauuuaaugcaggggaguucagccugccaaccuuugauucccuaaacauaacugccgcuucucucaaugacgauggacuggacaaccauaccauccuuuuguauuacagcacagccgcaucaagucuggcggucacccucaugcuggcuauuuucaucguguauauggucucccgcgacaaugugagcuguucuaucugccuuuga

SEQ ID NO: 156222 - RNA, 1755 nt, Artificial Sequence
  derived and/or modified CDS sequence (opt3) from hemagglutinin__InfluenzaB__AHL94817
augaaggccaucauugugcugcucauggucguuaccagcaacgcugacagaauaugcacaggcaucacuuccucuaauucaccccacgugguaaaaacggcaacccagggggaagugaacgucacaggagccauuccucuuacuaccacaccaaccaagaguuacuucgcgaaucugaaagguacuaggacacggggcaaguuguguccggauugcuuaaacuguaccgaccuggauguggcucuagggcgccccaugugcguuggaacgacuccuagcgccaaagcauccauccuccaugaagugcgaccagucaccucuggcuguuuucccauuaugcacgaccguacaaagaucagacaacugccuaaucuucugagggguuaugagaacauacgguugucgacucagaaugugaucgaugccgaaaaggcuccagggggacccuaccgccucggcaccucaggcagcugcccuaacgcaacaaguaaaauuggguucuuugccaccauggcuugggccguaccaaaggacaauuauaaaaacgcgacgaauccgcagacuguugaggugcccuacaucuguacagaaggagaggaucagauuaccgucugggguuuccauuccgacaacaagacucaaaugaaaaaucuguauggcgauucuaacccucagaaguuuacaagcuccgcaaauggggugaccacgcacuacgugucacagaucggagacuucccagaucagaccgaggacggcggucugccccaaagugggagaauagucguugauuauauggugcagaagccuggaaaaacaggcacuauuguauaccagaggggcgugcucuuaccacagaaggucuggugcgccagcgggcggucuaaagugaucaagggaucccugccccuuauuggugaagcugacuguuugcaugagaaauacggcgggcugaacaagucaaaaccguauuacaccggagaacacgccaaggcaaucggcaacugcccuaucuggguuaagacaccccuaaaacucgcuaaugguacuaaguaucgcccuccagccaaacugcuuaaggagcgaggguuuuucggcgcgauugccggauuucuggagggcgggugggaaggaaugauagcagguuggcacggcuacaccagccauggggcucacggaguggccgucgcugccgacuugaaaaguacacaagaggcaaucaacaagauuaccaagaaucucaacucucuguccgaauuagaggugaaaaaucugcagagacucagcggcgccauggaugaacuucauaacgagaucauagagcuggacgaaaagguagaugacuugagggcugauacuauuucgucucagaucgagcuagcgguucugcucuccaaugaagguaucauuaacucagaggacgaacaucugcuugcacuggagcggaaauugaagaaaaugcucgggcccagugccguggauaucggcaauggauguuucgagacgaagcacaagugcaaccaaacaugccuggaccguauugcugccggcaccuuuaaugcaggggaguucagcuuaccaacuuuugauucccugaacauaaccgccgcuucucuaaaugacgauggacucgacaaccacacaauccugcuuuauuacagcaccgccgcaucaaguuuggcggucacucugaugcucgcuauuuucaucguguauauggucucccgcgacaaugugagcuguucuaucugccuguga

SEQ ID NO: 156223 - RNA, 1758 nt, Artificial Sequence; identical to SEQ ID NO: 155913
  derived and/or modified CDS sequence (opt3) from hemagglutinin__InfluenzaB__AHL94827

SEQ ID NO: 156224 - RNA, 1755 nt, Artificial Sequence
  derived and/or modified CDS sequence (opt3) from hemagglutinin__InfluenzaB__AHL94837
augaaggccaucauugugcugcucauggucguuaccagcaacgcugacagaauaugcacaggcaucacuuccucuaauucaccccacgugguaaaaacggcaacccagggggaagugaacgucacaggagugauuccucuuacuaccacaccagccaagaguuacuucgcgaaucugaaagguaccaggacucggggcaaguuguguccggauugcuuaaacuguacagaccuggauguugcucuagggcgccccaugugcgugggaaccacgccuagcgccaaagcauccauccuccaugaaguccgaccagugacuucuggcuguuuucccauuaugcacgaccguaccaagaucagacaacugccuaaucuucugagggguuaugagaacauacgguugucgacacagaauguaaucgaugccgaaaaggcuccagggggacccuacaaacucggcacuucaggcagcugcccuaacgcaaccaguaagauuggguucuuugccacaauggcuugggccguuccaaaagacaauuauaagaacgcgaccaauccgcugacgguggagguccccuacaucuguaaagaaggagaggaucagauuacugugugggguuuccauuccgacaacaagacacagaugaagaaucuguauggcgauucuaacccucaaaaauuuaccagcuccgcaaauggggugacuacacacuacgucucacagaucggagacuucccagaucagaccgaggacggcggucucccccagagugggcgcauaguuguggauuauaugaugcaaaagccuggaaaaacgggcaccauuguauaccagagaggcguguuacugccacagaaggucuggugcgccagcgggaggucuaaagugaucaagggaucccuucccuugauuggugaagcugacugucugcaugaggaauacggcgggcuaaacaaaucaaagccguauuacacaggaaagcacgccaaagcaaucggcaacugcccuaucuggguuaagacuccccucaaacuggcuaaugguaccaaguaucggccuccagccaaacuucugaaggagcgcggguuuuucggcgcgauugccggauuuuuggagggcgggugggaaggaaugauagcagguuggcacggcuacacaagccauggggcucacggaguggccgucgcugccgaccucaagaguacucaggaggcaaucaacaaaauuaccaagaaucugaacucuuuauccgaacuggaggugaaaaaucuccaacgacuuagcggcgccauggaugaacugcauaacgagaucuuggagcuagacgaaaagguagaugaccugagagcugauacaauaucgucucagauugagcucgcgguucugcuuuccaaugaagguaucaucaacucagaggacgaacaccuguuggcacucgagaggaaacugaagaagauguuagggcccagugccguggauauuggcaauggauguuucgagaccaaacacaagugcaaccagacuugccuggaccggaucgcugccggcacguuuaaugcaggggaguucagccuaccaacauuugauucccucaacauuaccgccgcuucucugaaugacgauggacuugacaaccauacuauauugcuguauuacagcaccgccgcaucaagucucgcggucacacugaugcuugcuaucuucauuguguauauggucucccgugacaaugugagcuguucuaucugccuguga

SEQ ID NO: 156225 - RNA, 1755 nt, Artificial Sequence; identical to SEQ ID NO: 154902
  derived and/or modified CDS sequence (opt3) from hemagglutinin__InfluenzaB__AHL94847

SEQ ID NO: 156226 - RNA, 1758 nt, Artificial Sequence
  derived and/or modified CDS sequence (opt3) from hemagglutinin__InfluenzaB__AHL94858
augaaggccaucauugugcugcucauggucguuaccagcaacgcugacagaauaugcacaggcaucacuuccucuaauucaccccacgugguaaaaacggcaacccagggggaggugaacgucacaggagugauuccucuuacuaccacaccaaccaagagucauuucgccaaucugaaagguacugaaacaaggggcaaguuguguccgaaaugcuuaaacuguaccgaucuggacguugcgcuagggcggcccaagugcacgggaaauaucccuagcgcucgcguguccauucuccacgagguccgaccagugacuucuggcuguuuucccaucaugcaugaucguaccaagauaagacaacugccuaaccuucugagggguuacgaacacauccgguugucgacacauaauguaauuaacgccgagaaugcaccagggggacccuauaaaaucggcacuucaggcagcugcccuaacguuaccaaugggaacggauucuuugccacaauggcuugggcagugccaaagaaugacaacaauaaaaccgccacgaacagucucacuauugaagucccguacaucuguacagagggugaggaucagauaaccguguggggcuuccacuccgacaacgaaacucagauggcuaagcuguauggggauucuaaaccccagaaguuuacaagcuccgccaauggagugaccacgcacuacgucucacaaauuggcgguuucccuaaccagaccgaggacgggggacugccacagaguggccgcaucguuguggauuauaugguacaaaagagcggcaaagcggggacaauuacuuaccagagaggaauccucuuaccccagaagguguggugcgcaucugguagguccaaagucaucaagggcucacugccucuuauuggggaagccgacuguuugcaugagaaauauggaggccugaauaagagcaaaccauacuacaccggugagcacgcuaaggccauagggaacugccccaucugggugaagacaccgcuaaaacucgcaaauggcacuaaguaucggccucccgcuaaacugcuuaaggaacgcggauuuuucggcgccauugcgggguuucuggagggagguugggaaggcaugaucgccggguggcauggauacaccagucacggcgcacacgguguugcuguggccgcugauuugaaaucuacacaggaggccauaaacaagauuaccaagaaucucaacucccugagcgaauuagaggucaaaaaucugcagcgacucucgggggcaauggacgagcuucauaacgaaauccuggaguuggaugaaaagguggacgaccuaagagccgauacuaucucuucccaaauugagcuggcuguacuccugucaaaugaaggcaucauuaacagugaggacgagcaccuucuggcguuggaaaggaaacucaagaaaaugcugggaccaagcgcaguugagauaggcaauggguguuucgaaacgaagcauaagugcaaccagacaugcuuagaucggaucgccgcuggaaccuuugacgccggugaguucucccugccuacuuuugauucucuaaauauuaccgcagccagccucaacgacgauggccuggacaaccacacaauccuuuuguauuacucaaccgcugccaguucccuggcagugacucucaugaucgcgauuuucgucguguauauggucagccgugauaaugugucuuguucaauaugccuguga

SEQ ID NO: 156227 - RNA, 1755 nt, Artificial Sequence; identical to SEQ ID NO: 154868
  derived and/or modified CDS sequence (opt3) from hemagglutinin__InfluenzaB__AHL94869

SEQ ID NO: 156228 - RNA, 1758 nt, Artificial Sequence; identical to SEQ ID NO: 155037
  derived and/or modified CDS sequence (opt3) from hemagglutinin__InfluenzaB__AHL94880

SEQ ID NO: 156229 - RNA, 1758 nt, Artificial Sequence; identical to SEQ ID NO: 155370
  derived and/or modified CDS sequence (opt3) from hemagglutinin__InfluenzaB__AHL94889

SEQ ID NO: 156230 - RNA, 1758 nt, Artificial Sequence; identical to SEQ ID NO: 155037
  derived and/or modified CDS sequence (opt3) from hemagglutinin__InfluenzaB__AHL94900

SEQ ID NO: 156231 - RNA, 1758 nt, Artificial Sequence
  derived and/or modified CDS sequence (opt3) from hemagglutinin__InfluenzaB__AHL94911
augaaggccaucauugugcugcucauggucguuaccagcaacgcugacagaauaugcacaggcaucacuuccucuaauucaccccacgugguaaaaacggcaacccagggggaggugaacgucacaggagugauuccucuuacuaccacaccaaccaagagucauuucgccaaucugaaagguacugaaacaaggggcaaguuguguccgaaaugccccaacuguaccgauuuagacguugcgcuggggcggccuaagugcacgggaaagaucccaagcgcucgcguguccauucuacacgagguccgacccgugacuucuggcuguuuuccuaucaugcaugaucguaccaaaauaagacaacucccaaaucugcuuagggguuacgaacacauccggcugucgacacauaacguaauuaaugccgagaacgcacccgggggaccuuauaagaucggcacuucaggcagcugcccaaauguuaccaacgggaauggauucuuugccacaauggcuugggcagugccgaaaaacgacaagaauaaaaccgccacgaaccccuugacuauugaagucccuuacaucuguacagagggugaggaucagauaaccguguggggcuuccacagugacaaugaaacucagauggcuaagcucuauggggauuccaagccacagaaauuuacaucuagcgccaacggagugaccacgcacuacgucucccaaauuggcgguuuccccaaccagaccgaggacgggggacugccucagucaggccgcaucguuguggauuauaugguacagaagaguggcagaacagggacuauuaccuaccaaaggggaauccugcucccacagaaaguguggugcgcgagcggucggucuaaggucaucaaaggcuccuuaccccugauuggggaagcagacugucuucaugagaaguauggaggcuugaauaaaucaaagccguacuacacaggugagcacgccaaggcuauagggaacugcccuaucugggugaaaacuccccugaagcuagccaauggcaccaaauaucgcccuccagcaaagcuccugaaagaacgaggauuuuucggcgcuauugccggguuucuugagggagguugggaaggcaugaucgcgggguggcauggauacacaagccacggcgcccacgguguugcaguggcugccgaucugaagaguacccaggaggcuauaaacaagauuacuaaaaauuugaacucucucuccgaacuggaggucaagaauuuacagagacugagcggggccauggacgagcuccauaacgaaauccuugagcuggaugaaaaaguggacgacuugagggcagauacgaucucgucucaaauugagcuagccguacugcucuccaaugaaggcaucauuaacucagaggacgagcaucugcuugcucuggaacggaaguugaaaaagaugcucggacccagugcgguugagauaggcaauggguguuucgaaacaaagcacaaaugcaaccagaccugccuggaucguaucgcagccggaacuuuugacgcuggugaguucagcuuaccaaccuuugauucccugaauauuacagccgcaucucuaaacgacgauggccucgacaaucacaccauccugcuuuauuacagcacugccgcuucaaguuuggccgugacacugaugaucgcaauuuucgucguguauauggucucccgcgauaacgugagcuguucuauaugccucuga

SEQ ID NO: 156232 - RNA, 1758 nt, Artificial Sequence; identical to SEQ ID NO: 155037
  derived and/or modified CDS sequence (opt3) from hemagglutinin__InfluenzaB__AHL94922

SEQ ID NO: 156233 - RNA, 1758 nt, Artificial Sequence
  derived and/or modified CDS sequence (opt3) from hemagglutinin__InfluenzaB__AHL94933
augaaggccaucauugugcugcucauggucguuaccagcaacgcugacagaauaugcacaggcaucacuuccucuaauucaccccacgugguaaaaacggcaacccagggggaggugaacgucacaggagugauuccucuuacuaccacaccaaccaagagucauuucgccaaucugaaagguacugaaacaaggggcaaguuguguccgaaaugcuuaaacuguaccgaucuggacguugcgcuagggcggcccaagugcacgggaaagaucccuagcgcucgcguguccauucuccacgagguccgaccagugacuucuggcuguuuucccaucaugcaugaucguaccaaaauaagacaacugccuaaucuucugagggguuacgaacacauccgguugucgacacauaacguaauuaaugccgagaacgcaccagggggacccuauaagaucggcacuucaggcagcugcccuaauauuaccaacgggaauggauucuuugccacaauggcuugggcaguuccgaaaaacgacaagaauaaaaccgccacgaacccacucacuaucgaagugcccuacauauguacagagggugaggaucagauuaccgucuggggcuuccacagugacaaugaaacucagauggcuaagcuguauggggauuccaagccucagaaauuuacaucuagcgccaacggagugaccacgcacuacgugucccaaaucggcgguuucccaaaccagaccgaggacgggggacugccccagucaggccgcauugucguugauuauauggugcagaagaguggcaaagcggggacaaucacuuaccaaagaggaauccucuuaccucagaagguauggugcgcaagcgguaggucuaaagugauuaagggcucccugccacuuauaggggaagccgacuguuugcaugagaaauauggaggccugaauaagucaaagcccuacuacaccggugagcacgcuaaagccaucgggaacugcccgauuugggucaagacaccucuaaaacucgcaaauggcacuaaguaucggcccccagcuaaacugcuuaaggaacgcggauuuuucggcgccaucgcgggguuucuggagggagguugggaaggcaugauagccggguggcauggauacaccagccacggcgcacacgguguggcuguugccgcugauuugaagaguacacaggaggccauuaacaaaaucaccaagaaucucaacucucuguccgaauuagaggugaaaaaucugcagcgacucagcggggcaauggacgagcuucauaacgaaauccuggaguuggaugaaaaggucgacgaccuaagagccgauacuauuucgucucaaaucgagcuggcugugcuccuguccaaugaaggcauuauaaacucagaggacgagcaccuucuggcguuggaaaggaaacucaagaagaugcugggaccuagugcaguagagaucggcaauggguguuucgaaacgaaacauaagugcaaccagacaugcuuagaucggauugccgcuggaaccuuugacgccggugaguucagccugcccacuuuugauucccuaaauaucaccgcagccucucucaacgacgauggccuggacaaucacacaauccuuuuguauuacagcaccgcugccucaagucuggcaguuacucucaugauugcgauauucguggucuauauggugucccgugauaacgucagcuguucuaucugccuguga

SEQ ID NO: 156234 - RNA, 1758 nt, Artificial Sequence; identical to SEQ ID NO: 156118
  derived and/or modified CDS sequence (opt3) from hemagglutinin__InfluenzaB__AHL94944

SEQ ID NO: 156235 - RNA, 1758 nt, Artificial Sequence; identical to SEQ ID NO: 154731
  derived and/or modified CDS sequence (opt3) from hemagglutinin__InfluenzaB__AHL94955

SEQ ID NO: 156236 - RNA, 1758 nt, Artificial Sequence; identical to SEQ ID NO: 154731
  derived and/or modified CDS sequence (opt3) from hemagglutinin__InfluenzaB__AHL94965

SEQ ID NO: 156237 - RNA, 1758 nt, Artificial Sequence; identical to SEQ ID NO: 154731
  derived and/or modified CDS sequence (opt3) from hemagglutinin__InfluenzaB__AHL94975

SEQ ID NO: 156238 - RNA, 1755 nt, Artificial Sequence; identical to SEQ ID NO: 154902
  derived and/or modified CDS sequence (opt3) from hemagglutinin__InfluenzaB__AHM00986

SEQ ID NO: 156239 - RNA, 1758 nt, Artificial Sequence; identical to SEQ ID NO: 154935
  derived and/or modified CDS sequence (opt3) from hemagglutinin__InfluenzaB__AHM00997

SEQ ID NO: 156240 - RNA, 1758 nt, Artificial Sequence
  derived and/or modified CDS sequence (opt3) from hemagglutinin__InfluenzaB__AHM01008
augaaggccaucauugugcugcucauggucguuaccagcaacgcugacagaauaugcacaggcaucacuuccucuaauucaccccacgugguaaaaacggcaacccagggggaggugaacgucacaggagugauuccucuuacuaccacaccaaccaagagucauuucgccaaucugaaagguacugaaacaaggggcaaguuguguccgaaaugcuuaaacuguaccgaucuggacguugcgcuagggcggcccaagugcacgggaaagaucccuagcgcucgcguguccauucuccacgagguccgaccagugacuucuggcuguuuucccaucaugcaugaucguaccaaaauaagacaacugccuaaucuucugagggguuacgaacacauccgguugucgacacauaacguaauuaaugccgaggacgcaccagggggacccuauaagaucggcacuucaggcagcugcccuaacguuaccaaugggaacggauucuuugccacaauggcuuggaccgugccgaaaaaugauaagaacaaaacggcaacuaauccacucacaauugaaguccccuacaucuguaccgagggugaggaccagauaacuguguggggcuuccacagugauaacgaaacacagauggccaagcuguauggggacuccaagccucagaaauuuaccucuagcgcuaauggagugacgacccacuacgucucccaaauuggcgguuucccaaaccagacagaggaugggggacugccccagucaggccgcaucguuguggacuauaugguacagaagaguggcaaaacugggaccauuacauaccaaagaggaauccucuuaccucagaagguguggugcgccagcgguaggucuaaagucaucaagggcucccugccacuuauuggggaagcggauuguuugcaugagaaauauggaggccugaacaagucaaagcccuacuacacuggugagcacgcaaaagccauagggaauugcccgaucugggugaagaccccucuaaaacucgcuaacggcacaaaguaucggcccccagccaaacugcuuaaggaacgcggauuuuucggcgcaauugcuggguuucuggagggagguugggaaggcaugaucgccggguggcauggauacaccagccacggcgcgcacgguguugccguggcagcugacuugaagaguacucaggaggccauaaauaaaauuacgaagaaccucaauucucuguccgaauuagaggucaaaaaccugcagcgacucagcggggcuauggaugagcuucauaaugaaauccuggaguuggacgaaaagguggacgaucuaagagccgacacaaucucgucucaaauugagcuggcaguacuccuguccaacgaaggcaucauuaauucagaggaugagcaccuucuggccuuggaaaggaaacucaagaagaugcugggaccuagugcuguugagauaggcaacggguguuucgaaaccaaacauaagugcaaucagacuugcuuagaccggaucgcggcaggaaccuuugaugccggugaguucagccugcccacauuugacucccuaaacauuaccgcugccucucucaaugaugacggccuggauaaccacacuauccuuuuguauuacagcacagcagccucaagucuggcugugacgcucaugaucgccauuuucgucguguauauggucucccgugacaaugugagcuguucuauaugccuguga

SEQ ID NO: 156241 - RNA, 1758 nt, Artificial Sequence; identical to SEQ ID NO: 154935
  derived and/or modified CDS sequence (opt3) from hemagglutinin__InfluenzaB__AHM01019

SEQ ID NO: 156242 - RNA, 1758 nt, Artificial Sequence; identical to SEQ ID NO: 154935
  derived and/or modified CDS sequence (opt3) from hemagglutinin__InfluenzaB__AHM01030

SEQ ID NO: 156243 - RNA, 1758 nt, Artificial Sequence
  derived and/or modified CDS sequence (opt3) from hemagglutinin__InfluenzaB__AHM01041
augaaggccaucauugugcugcucauggucguuaccagcaacgcugacagaauaugcacaggcaucacuuccucuaauucaccccacgugguaaaaacggcaacccagggggaagugaacgucacaggagugauuccucuuacuaccacaccaaccaagagucauuucgccaaucugaaagguacugaaacaaggggcaaguuguguccgaaaugcuuaaacuguaccgaucuggacguugcgcuagggcggcccaagugcacgggaaagaucccuagcgcucgcguguccauucuccacgagguccgaccagugacuucuggcuguuuucccaucaugcaugaucguaccaaaauaagacaacugccuaaucuucugagggguuacgaacacauccgguugucgacacauaacguaauuaaugccgaggacgcaccagggggacccuauaagaucggcacuucaggcagcugcccuaacguuaccaaugggaacggauucuuugccacaauggcuugggcagugccgaaaaaugauaagaacaaaaccgccacgaauccacucacuauugaaguccccuacaucuguacagagggugaggaccagauaaccguguggggcuuccacagugauaacgaaacucagauggcuaagcuguauggggacuccaagccucagaaauuuacaucuagcgccaauggagugaccacgcacuacgucucccaaauuggcgguuucccaaaccagaccgaggaugggggacugccccagucaggccgcaucguuguggacuauaugguacagaagagugagaaaacaggcacuauuaccuaccaaagagggauccucuuaccucagaagguguggugcgcgagcggaaggucuaaagucaucaaggguucccugccacuuauuggcgaagcagauuguuugcaugagaaauaugggggacugaacaagucaaagcccuacuacacaggcgaacacgccaaagcuauagguaauugcccgaucugggugaagacuccucuaaaacucgccaacgggaccaaguaucggcccccagcaaaacugcuuaaggagcgcggcuuuuucggagcuauugccggcuuucuggaagggggaugggaggguaugaucgcgggcuggcauggguacacaagccacggagcccacggcguugcaguggcugccgacuugaagaguacccaggaagcuauaaauaaaauuacuaagaaccucaauucucuguccgaguuagaggucaaaaaccugcagcgacucagcggugccauggaugaacuucauaaugagauccuggaauuggacgagaagguggacgaucuaagagcagacacgaucucgucucaaauugaacuggccguacuccuguccaacgaggggaucauuaauucagaggaugaacaccuucuggcuuuggagaggaaacucaagaagaugcugggcccuagugcgguugaaauaggaaacggcuguuucgagacaaaacauaagugcaaucagaccugcuuagaccggaucgcagccgggacuuuugaugcuggagaguucagccugcccaccuuugacucccuaaacauuacagccgcaucucucaaugaugacggucuggauaaccacaccauccuuuuguauuacagcacugccgcuucaagucuggccgugacacucaugaucgcaauuuucgucguguauauggucucccgugacaaugugagcuguucuauaugccuguga

SEQ ID NO: 156244 - RNA, 1758 nt, Artificial Sequence
  derived and/or modified CDS sequence (opt3) from hemagglutinin__InfluenzaB__AHM01052
augaaggccaucauugugcugcucauggucguuaccagcaacgcugacagaauaugcacaggcaucacuuccucuaauucaccccacgugguaaaaacggcaacccagggggaggugaacgucacaggagugauuccucuuacuaccacaccaaccaagagucauuucgccaaucugaaagguacugaaacaaggggcaaguuguguccgaaaugcuuaaacuguaccgaucuggacguugcgcuagggcggcccaagugcacgggaaagaucccuagcgcucgcguguccauucuccacgagguccgaccagugacuucuggcuguuuucccaucaugcaugaucguaccaaaauaagacaacugccuaaucuucugagggguuacgaacacauccgguugucgacacauaacguaauuaaugccgagaacgcaccagggggacccuauaagaucggcacuucaggcagcugcccuaauguuaccaacgggaauggauucuuugccacaauggcuugggcagugccgaaaaacgacaagaauaaaaccgccacgaacccacucacuauugaaguccccuacaucuguacagagggugaggaucagauaaccguguggggcuuccacagugacaaugaaacucagauggcuaagcuguauggggauuccaagccucagaaauuuacaucuagcgccaacggagugaccacgcacuacgucucccaaauuggcgguuucccaaaccagaccgaggacgggggacugccccagucaggccgcaucguuguggauuauaugguacagaagaguggcaaaacagggacuauuaccuaccaaagaggaauccucuuaccucagaagguguggugcgcgagcgguaggucuaaagucaucaagggcucccugccacuuauuggggaagcagacuguuugcaugagaaauauggaggccugaauaagucaaagcccuacuacacaggugagcacgccaaagcuauagggaacugcccgaucugggugaagacuccucuaaaacucgccaauggcaccaaguaucggcccccagcaaaacugcuuaaggaacgcggauuuuucggcgcuauugccggguuucuggagggagguugggaaggcaugaucgcgggguggcauggauacacaagccacggcgcccacgguguugcaguggcugccgauuugaagaguacccaggaggcuauaaacaaaauuacuaagaaucucaacucucuguccgaauuagaggucaaaaaucugcagcgacucagcggggccauggacgagcuucauaacgaaauccuggaguuggaugaaaagguggacgaccuaagagcagauacgaucucgucucaaauugagcuggccguacuccuguccaaugaaggcaucauuaacucagaggacgagcaccuucuggcuuuggaaaggaaacucaagaagaugcugggaccuagugcgguugagauaggcaauggguguuucgaaacaaaacauaagugcaaccagaccugcuuagaucggaucgcagccggaacuuuugacgcuggugaguucagccugcccaccuuugauucccuaaauauuacagccgcaucucucaacgacgauggccuggacaaucacaccaucaugcuuuauuacagcacugccgcuucaaguuuggccgugacacugaugaucgcaauuuucgucguguauauggucucccgugauaacgugagcuguucuauaugccucuga

SEQ ID NO: 156245 - RNA, 1758 nt, Artificial Sequence; identical to SEQ ID NO: 154935
  derived and/or modified CDS sequence (opt3) from hemagglutinin__InfluenzaB__AHM01063

SEQ ID NO: 156246 - RNA, 1755 nt, Artificial Sequence; identical to SEQ ID NO: 154902
  derived and/or modified CDS sequence (opt3) from hemagglutinin__InfluenzaB__AHM01074

SEQ ID NO: 156247 - RNA, 1755 nt, Artificial Sequence
  derived and/or modified CDS sequence (opt3) from hemagglutinin__InfluenzaB__AHM01096
augaaggccaucauugugcugcucauggucguuaccagcaacgcugacagaauaugcacaggcaucacuuccucuaauucaccccacgugguaaaaacggcaacccagggggaggugaacgucacaggagugauuccucuuacuaccacaccaaccaagaguuacuucgccaaucugaaagguacuaagacaaggggcaaauuguguccggauugcuuaaacuguaccgaccuggauguugcgcuagggcggcccaugugcgugggaacgacuccuagcgcuaaggccuccauccuccaugaaguccgcccagugaccucuggcuguuuucccauuaugcacgaccgaacaaagauccgucaacuggcaaaucuucugagagguuaugagaacauaagguugucgacucagaauguaaucgaugccgaaaaagcuccugggggaccauaccggcucggcaccucaggcagcugccccaacgcaacaaguaaguccggguucuuugccaccauggcuugggccguuccuaaagacaauaacaagaaugcgacgaacccacugacuguggaggucccguauauuugugcagaaggagaggaucagaucacagugugggguuuccauucugacaauaaaacccagaugaagaaccuguacggcgauagcaauccccaaaaguuuacuuccucagccaacggggugacaacccacuaugucagucagauuggaggcuucccugaccagacggaggauggugggcucccacagagcggacgcaucguuguggacuacaugaugcaaaaacccggcaagaccggcacaauaguauaucagagagggauuuuacugccucagaaaguguggugcgcuucuggaagguccaaggucaucaaagguucacuuccauugauuggcgaagccgauugucugcaugagaaguacgggggacuaaacaaaagcaagcccuacuauacuggcgaacacgcaaaggcuaucgguaauugcccgaucugggugaaaaccccucucaagcuggccaacgggacaaaauaccggcccccagcgaagcugcugaaagagcgcggcuuuuucggagccauugcaggcuuuuuggaagggggaugggaagguaugauagcuggcuggcacggguauacaagucauggagcccacggcguugcuguggccgcagaccucaagucuacccaggaggccaucaauaagauuacuaaaaaccuuaauuccuuaagcgaacuggaggucaagaaccuccaacgacuuucgggugcuauggacgaacugcauaaugagaucuuggagcuagaugaaaaaguggacgaucugagagcggacaccauaucuucccagauugagcucgcaguacugcuuucaaacgaagggaucaucaauagugaggaugaacaccuguuggcccucgagaggaagcugaaaaagauguuaggcccuagcgcuguugacauuggaaacggcuguuucgagacuaagcacaaaugcaaucagacgugccuggaucggaucgccgcagggacauuuaacgccggagaguucucccuacccaccuuugacucucucaauauuacugcugccagccugaacgaugacggucuugauaaucauaccauauugcuguacuauucaacagcagcgaguucccucgcugugacccugaugcuugccaucuucauugucuacauggugagccgugacaacgucucuuguucaaucugccuguga

SEQ ID NO: 156248 - RNA, 1758 nt, Artificial Sequence; identical to SEQ ID NO: 154935
  derived and/or modified CDS sequence (opt3) from hemagglutinin__InfluenzaB__AHM01107

SEQ ID NO: 156249 - RNA, 1758 nt, Artificial Sequence
  derived and/or modified CDS sequence (opt3) from hemagglutinin__InfluenzaB__AHM01118
augaaggccaucauugugcugcucauggucguuaccagcaacgcugacagaauaugcacaggcaucacuuccucuaauucaccccacgugguaaaaacggcaacccagggggaggugaacgucacaggagugauuccucuuacuaccacaccaaccaagagucauuucgccaaucugaaagguacugaaacaaggggcaaguuguguccgaaaugcuuaaacuguaccgaucuggacguugcgcuagggcggcccaagugcacgggaaagaucccuagcgcucgcguguccauucuccacgagguccgaccagugacuucuggcuguuuucccaucaugcaugaucguaccaaaauaagacaacugccuaaucuucugagggguuacgaacacauccgguugucgacacauaacguaauuaaugccgaggacgcaccagggggacccuauaagaucggcacuucaggcagcugcccuaacguuaccaaugggaacggauucuuugccacaauggcuugggcagugccgaaaaaugauaagaacaaaaccgccacgaauccacucacuauugaaguccccuacaucuguacagagggugaggaccagauaaccguguggggcuuccacagugauaacgaaacucagauggcuaagcuguauggggacuccaagccucagaaauuuacaucuagcgccaauggagugaccacgcacuacgucucccaaauuggcgguuucccaaaccagaccgaggaugggggacugccccagucaggccgcaucguuguggacuauaugguacagaagaguggcaaaacagggacuauuaccuaccaaagaggaauccucuuaccucagaagguguggugcgcgagcgguaggucuaaagucaucaagggcucccugccacuuauuggggaagcagauuguuugcaugagaaauauggaggccugaacaagucaaagcccuacuacacaggugagcacgccaaagcuauagggaauugcccgaucugggugaagacuccucuaaaacucgccaacggcaccaaguaucggcccccagcaaaacugcuuaaggaacgcggauuuuucggcgcuauugccggguuucuggagggagguugggaaggcaugaucgcgggguggcauggauacacaagccacggcgcccacgguguugcaguggcugccgacuugaagaguacccaggaggcuauaaauaaaauuacuaagaaccucaauucucuguccgaauuagaggucaaaaaccugcagcgacucagcggggccauggaugagcuucauaaugaaauccuggaguuggacgaaaagguggacgaucuaagagcagacacgaucucgucucaaauugagcuggccguacuccuguccaacgaaggcaucauuaauucagaggaugagcaccuucuggcuuuggaaaggaaacucaagaagaugcugggaccuagugcgguugagauaggcaacggguguuucgaaacaaaacauaagugcaaucagaccugcuuagaccggaucgcagccggaacuuuugaugcuggugaguucagccugcccaccuuugacucccuaaacauuacagccgugucucucaaugaugacggccuggauaaccacaccauccuuuuguauuacagcacugcagccucaagucuggcugucacacucaugaucgccauuuucguggucuauauggugucccgugacaauguuagcuguucuauaugccuguga

SEQ ID NO: 156250 - RNA, 1758 nt, Artificial Sequence; identical to SEQ ID NO: 154935
  derived and/or modified CDS sequence (opt3) from hemagglutinin__InfluenzaB__AHM01129

SEQ ID NO: 156251 - RNA, 1758 nt, Artificial Sequence
  derived and/or modified CDS sequence (opt3) from hemagglutinin__InfluenzaB__AHM01140
augaaggccaucauugugcugcucauggucguuaccagcaacgcugacagaauaugcacaggcaucacuuccucuaauucaccccacgugguaaaaacggcaacccagggggaggugaacgucacaggagugauuccucuuacuaccacaccaaccaagagucauuucgccaaucugaaagguacugaaacaaggggcaaguuguguccgaaaugcuuaaacuguaccgaucuggacguugcgcuagggcggcccaagugcacgggaaagaucccuagcgcucgcguguccauucuccacgagguccgaccagugacuucuggcuguuuucccaucaugcaugaucguaccaaaauaagacaacugccuaaucuucugagggguuacgaacacauccgguugucggcccauaacguaauuaaugcagagaacgccccagggggacccuauaagaucggcacaucaggcagcugcccuaauguuacuaacgggaauggauucuuugcuaccauggcaugggccgugccgaaaaacgacaagaauaaaacagcuaccaacccacucacgauugaaguccccuacaucuguacugagggugaggaucagauaacaguguggggcuuccacagugacaaugaaacccagauggccaagcuguauggggauuccaagccucagaaauuuacuucuagcgcgaacggagugacaacccacuacgucucccaaauuggcgguuucccaaaccagacggaggacgggggacugccccagucaggccgcaucguuguggauuauaugguacagaagaguggcaaaaccgggacaauuacuuaccaaagaggaauccucuuaccucagaagguguggugcgcaagcgguaggucuaaagucaucaagggcucccugccacuuauuggggaagccgacuguuugcaugagaaauauggaggccugaauaagucaaagcccuacuacaccggugagcacgcuaaagccauagggaacugcccgaucugggugaagacaccucuaaaacucgcaaauggcacuaaguaucggcccccagcuaaacugcuuaaggaacgcggauuuuucggcgccauugcgggguuucuggagggagguugggaaggcaugaucgccggguggcauggauacaccagccacggcgcacacgguguugcuguggccgcugauuugaagaguacacaggaggccauaaacaaaauuaccaagaaucucaacucucuguccgaauuagaggucaaaaaucugcagcgacucagcggggcaauggacgagcuucauaacgaaauccuggaguuggaugaaaagguggacgaccuaagagccgauacuaucucgucucaaauugagcuggcuguacuccuguccaaugaaggcaucauuaacucagaggacgagcaccuucuggcguuggaaaggaaacucaagaagaugcugggaccuagugcaguugagauaggcaauggguguuucgaaacgaaacauaagugcaaccagacaugcuuagaucggaucgccgcuggaaccuuugacgccggugaguucagccugcccacuuuugauucccuaaauauuaccgcagccucucucaacgacgauggccuggacaaucacacaauccuuuuguauuacagcaccgcugccucaagucuggcagugacucucaugaucgcgauuuucgucguguauauggucucccgugauaacgugagcuguucuauaugccuguga

SEQ ID NO: 156252 - RNA, 1758 nt, Artificial Sequence; identical to SEQ ID NO: 154920
  derived and/or modified CDS sequence (opt3) from hemagglutinin__InfluenzaB__AHM01151

SEQ ID NO: 156253 - RNA, 1758 nt, Artificial Sequence
  derived and/or modified CDS sequence (opt3) from hemagglutinin__InfluenzaB__AHM01162
augaaggccaucauugugcugcucauggucguuaccagcaacgcugacagaauaugcacaggcaucacuuccucuaauucaccccacgugguaaaaacggcaacccagggggaagugaacgucacaggagugauuccucuuacuaccacaccaaccaagagucauuucgccaaucugaaagguacugaaacaaggggcaaguuguguccgaaaugcuuaaacuguaccgaucuggacguugcgcuagggcggcccaagugcacgggaaagaucccuagcgcucgcguguccauucuccacgagguccgaccagugacuucuggcuguuuucccaucaugcaugaucguaccaaaauaagacaacugccuaaucuucugagggguuacgaacacauccgguugucgacacauaacguaauuaaugccaaggacgcaccagggggacccuauaaaaucggcacuucaggcagcugcccuaacguuaccaaugggaacggauucuuugccacaauggcuugggcagugccaaagaaugauaaaaacaagaccgccacgaauccgcucacuauugagguccccuacaucuguacagaaggugaggaccagauaaccguguggggcuuccacagugauaacgagacucagauggcuaagcuguauggggacuccaaaccucagaaguuuacaucuagcgccaauggagugaccacgcacuacgucucccaaauuggcgguuucccaaaccagaccgaagaugggggacugccccagucaggccgcaucguuguggacuauaugguacagaaaaguggcaagacagggacuauuaccuaccaaagaggaauccucuuaccucagaaaguguggugcgcgagcgguaggucuaaggucaucaaaggcucccugccacuuauuggggaggcagauuguuugcaugaaaaguauggaggccugaacaagucaaaacccuacuacacaggugagcacgccaaggcuauagggaauugcccgaucugggugaaaacuccucuaaagcucgccaacggcaccaaauaucggcccccagcaaagcugcuuaaggagcgcggauuuuucggcgcuauugccggguuucuggaaggagguugggagggcaugaucgcgggguggcauggauacacaagccacggcgcccacgguguugcaguggcugccgacuugaaaaguacccaggaagcuauaaauaagauuacuaaaaaccucaauucucuguccgaguuagaagucaagaaccugcagcgacucagcggggccauggaugagcuucauaaugagauccuggaauuggacgagaaaguggacgaucuaagagcagacacgaucucgucucaaauugaacuggccguacuccuguccaacgagggcaucauuaauucagaagaugagcaccuucuggcuuuggagaggaagcucaagaaaaugcugggaccuagugcgguugaaauaggcaacggguguuucgagacaaagcauaaaugcaaucagaccugcuuagaccggaucgcagccggaacuuuugaugcuggugaguucagccugcccaccuuugacucccuaaacauuacagccgcaucucucaaugaugacggccuggauaaccacaccauccuuuuguauuacagcacugccgcuucaagucuggccgugacacucaugaucgcaauuuucgucguguauauggucucccgugacaaugugagcuguucuauaugccuguga

SEQ ID NO: 156254 - RNA, 1755 nt, Artificial Sequence; identical to SEQ ID NO: 154902
  derived and/or modified CDS sequence (opt3) from hemagglutinin__InfluenzaB__AHM01173

SEQ ID NO: 156255 - RNA, 1758 nt, Artificial Sequence
  derived and/or modified CDS sequence (opt3) from hemagglutinin__InfluenzaB__AHM01184
augaaggccaucauugugcugcucauggucguuaccagcaacgcugacagaauaugcacaggcaucacuuccucuaauucaccccacgugguaaaaacggcaacccagggggaggugaacgucacaggagugauuacucuuaccacaaccccuacuaagagucauuucgccaaucugaaagguacagaaaccaggggcaaguuguguccaaaaugcuuaaacuguacggaucuggacguugcgcuagggcggccgaagugcacuggaaagauccccagcgcucgcguguccauucuccacgagguccgaccugugaccucuggcuguuuuccaaucaugcaugaucguacaaaaauaagacaacugcccaaucuucugagggguuacgaacacauccgguugucgacucauaacguaauuaaugccgaggacgcaccugggggaccauauaagaucggcaccucaggcagcugccccaacguuacaaaugggaacggauucuuugccaccauggcuugggcagugccuaaaaaugauaagaacaaaacggccacuaauccacucacaauugaagucccguacaucuguaccgagggugaggaccagauaacuguguggggcuuccacagugauaacgaaacacagauggcuaagcuguauggggacuccaagccccagaaauuuaccucuagcgccaauggagugacgacccacuacgucucccaaauuggcgguuucccuaaccagacagaggaugggggacugccacagucaggccgcaucguuguggacuauaugguacagaagaguggcaaaacugggaccauuacauaccaaagaggaauccucuuaccccagaagguguggugcgcgagcgguaggucuaaagucaucaagggcucccugccucuuauuggggaagcagauuguuugcaugagaaauauggaggccugaacaagucaaagccauacuacacuggugagcacgccaaagcuauagggaauugccccaucugggugaagaccccgcuaaaacucgccaacggcacaaaguaucggccucccgcaaaacugcuuaaggaacgcggauuuuucggcgcuauugccggguuucuggagggagguugggaaggcaugaucgcgggguggcauggauacaccagccacggcgcccacgguguugcaguggcugccgacuugaagaguacucaggaggcuauaaauaaaauuacgaagaaccucaauucucuguccgaauuagaggucaaaaaccugcagcgacucagcggggccauggaugagcuucauaaugaaauccuggaguuggacgaaaagguggacgaucuaagagcagacacaaucucgucucaaauugagcuggccguacuccuguccaacgaaggcaucauuaauucagaggaugagcaccuucuggcuuuggaaaggaaacucaagaagaugcugggaccaagugcgguugagauaggcaacggguguuucgaaaccaaacauaagugcaaucagacuugcuuagaccggaucgcagccggaaccuuugaugcuggugaguucagccugccuacauuugacucccuaaacauuaccgccgcaucucucaaugaugacggccuggauaaccacacuauccuuuuguauuacagcacagccgcuucaagucuggccgugacgcucaugaucgcaauuuucgucguguauauggucucccgugacaaugugagcuguucuauaugccuguga

SEQ ID NO: 156256 - RNA, 1758 nt, Artificial Sequence; identical to SEQ ID NO: 156251
  derived and/or modified CDS sequence (opt3) from hemagglutinin__InfluenzaB__AHM01195

SEQ ID NO: 156257 - RNA, 1758 nt, Artificial Sequence
  derived and/or modified CDS sequence (opt3) from hemagglutinin__InfluenzaB__AHM01206
augaaggccaucauugugcugcucauggucguuaccagcaacgcugacagaauaugcacaggcaucacuuccucuaauucaccccacgugguaaaaacggcaacccagggggaagugaacgucacaggagugauuccucuuacuaccacaccaaccaagagucauuucgccaaucugaaagguacugaaacaaggggcaaguuguguccgaaaugcuuaaacuguaccgaucuggacguugcgcuagggcggcccaagugcacgggaaagaucccuagcgcucgcguguccauucuccacgagguccgaccagugacuucuggcuguuuucccaucaugcaugaucguaccaaaauaagacaacugccuaaucuucugagggguuacgaacacauccgguugucgacacauaacguaauuaaugccgaggacgcaccagggggacccuauaagaucggcacuucaggcagcugcccuaacguuaccaaugggaacggauucuuugccacaauggcuugggcagugccgaaaaaugauaagaacaaaaccgccacgaauccacucacuauugaaguccccuacaucuguacagagggugaggaccagauaaccguguggggcuuccacagugauaacgaaacucagauggcuaagcuguauggggacuccaagccucagaaauuuacaucuagcgccaauggagugaccacgcacuacgucucccaaauuggcgguuucccaaaccagaccgaggaugggggacugccccagucaggccgcaucguuguggacuauaugguacagaagagugagaaaacaggcacuauuaccuaccaaagagggauccucuuaccucagaagguguggugcgcgagcggaaggucuaaagucaucaaggguucccugccacuuauuggcgaagcagauuguuugcaugagaaauaugggggacugaacaagucaaagcccuacuacacaggcgaacacgccaaagcuauagguaauugcccgaucugggugaagacuccucuaaaacucgccaacgggaccaaguaucggcccccagcaaaacugcuuaaggagcgcggcuuuuucggagcuauugccggcuuucuggaagggggaugggaggguaugaucgcgggcuggcauggguacacaagccacggagcccacggcguugcaguggcugccgacuugaagaguacccaggaagcuauaaauaaaauuacuaagaaccucaauucucuguccgaguuagaggucaaaaaccugcagcgacucagcggugccauggaugaacuucauaaugagauccuggaauuggacgagaagguggacgaucuaagagcagacacgaucucgucucaaauugaacuggccguacuccuguccaacgaggggaucauuaauucagaggaugaacaccuucuggcuuuggagaggaaacucaagaagaugcugggcccuagugcgguugaaauaggaaacggcuguuucgagacaaaacauaagugcaaucagaccugcuuagaccggaucgcagccgggacuuuugaugcuggagaguucagccugcccaccuuugacucccuaaacauuacagccgcaucucucaaugaugacggucugggcaaccacaccauccuuuuguauuacagcacugccgcuucaagucuggccgugacacucaugaucgcaauuuucgucguguauauggucucccgugauaaugugagcuguucuauaugccuguga

SEQ ID NO: 156258 - RNA, 1758 nt, Artificial Sequence; identical to SEQ ID NO: 154920
  derived and/or modified CDS sequence (opt3) from hemagglutinin__InfluenzaB__AHM01217

SEQ ID NO: 156259 - RNA, 1755 nt, Artificial Sequence; identical to SEQ ID NO: 154902
  derived and/or modified CDS sequence (opt3) from hemagglutinin__InfluenzaB__AHM01228

SEQ ID NO: 156260 - RNA, 1758 nt, Artificial Sequence; identical to SEQ ID NO: 154935
  derived and/or modified CDS sequence (opt3) from hemagglutinin__InfluenzaB__AHM01239

SEQ ID NO: 156261 - RNA, 1758 nt, Artificial Sequence; identical to SEQ ID NO: 154935
  derived and/or modified CDS sequence (opt3) from hemagglutinin__InfluenzaB__AHM01250

SEQ ID NO: 156262 - RNA, 1758 nt, Artificial Sequence
  derived and/or modified CDS sequence (opt3) from hemagglutinin__InfluenzaB__AHM01261
augaaggccaucauugugcugcucauggucguuaccagcaacgcugacagaauaugcacaggcaucacuuccucuaauucaccccacgugguaaaaacggcaacccagggggaggugaacgucacaggagugauuccucuuacuaccacaccaaccaagagucauuucgccaaucugaaagguacugaaacaaggggcaaguuguguccgaaaugcuuaaacuguaccgaucuggacguugcgcuagggcggcccaagugcacgggaaagaucccuagcgcucgcguguccauucuccacgagguccgaccagugacuucuggcuguuuucccaucaugcaugaucguaccaaaauaagacaacugccuaaucuucugagggguuacgaacacauccgguugucgacacauaacguaauuaaugccgagaacgcaccagggggacccuauaagaucggcacuucaggcagcugcccuaauguuaccaacgggaauggauucuuugccacaauggcuugggcagugccaaagaacgacaagaauaaaaccgccacgaacccgcucacuauugaaguccccuacaucuguacagagggugaggaucagauaaccauuuggggcuuccacagugacaaugaaacucagauggcuaagcuguauggggauuccaacccucagaaguuuacaucuagcgccaacggagugaccacgcacuacgugucccaaaucggcgguuucccaaaucagaccgaggacgggggacugccccagucaggccgcauugucguugauuauauggugcagaaaaguggcaagacagggacuaucaccuaccaaagaggaauccucuuaccucagaaaguauggugcgcggguggcaggagcaaggugauuaaagggucucugccacuuauaggagaagcagacuguuugcaugagaaguauggcggucugaacaaauccaagcccuacuacacaggggagcacgccaaggcuaucggcaauugcccgauuugggucaaaacuccucuaaagcucgccaacggaaccaaauaucggcccccagcaaagcugcuuaaagaacgcggcuuuuucggggcuaucgccggauuucuggaggguggcugggaagggaugauagcgggauggcauggcuacacaucacacggugcccacgggguggcaguugcugccgauuugaaaagcacccaggaggcuauuaauaagaucacuaaaaaccucaauagucugucugaauuagaggugaagaaccugcagcgacucuccggcgccauggacgagcuucauaaugaaauccuggaguuggaugaaaaagucgacgaccuaagagcagauacgauuagcucgcaaaucgagcuggccgugcuccugucuaacgaaggaauuauaaauuccgaggacgagcaccuucuggcuuuggaaaggaagcucaaaaagaugcugggcccuucagcgguagagaucgggaacggauguuucgaaacaaagcauaaaugcaaucagaccugcuuagaucggauugcagccgguacuuuugacgcuggcgaguucagucugcccaccuuugauagccuaaacaucacagccgcaucccucaaugacgaugggcuggacaaccacaccauccuuuuguauuacucuacugccgcuagcucacuggccguuacacucaugauugcaauauucguggucuauauggugagucgugauaacgucuccuguagcaucugccuguga

SEQ ID NO: 156263 - RNA, 1755 nt, Artificial Sequence; identical to SEQ ID NO: 154902
  derived and/or modified CDS sequence (opt3) from hemagglutinin__InfluenzaB__AHM01272

SEQ ID NO: 156264 - RNA, 1758 nt, Artificial Sequence; identical to SEQ ID NO: 156251
  derived and/or modified CDS sequence (opt3) from hemagglutinin__InfluenzaB__AHM01283

SEQ ID NO: 156265 - RNA, 1758 nt, Artificial Sequence; identical to SEQ ID NO: 156251
  derived and/or modified CDS sequence (opt3) from hemagglutinin__InfluenzaB__AHM01294

SEQ ID NO: 156266 - RNA, 1755 nt, Artificial Sequence; identical to SEQ ID NO: 154902
  derived and/or modified CDS sequence (opt3) from hemagglutinin__InfluenzaB__AHM01305

SEQ ID NO: 156267 - RNA, 1758 nt, Artificial Sequence; identical to SEQ ID NO: 154935
  derived and/or modified CDS sequence (opt3) from hemagglutinin__InfluenzaB__AHM01316

SEQ ID NO: 156268 - RNA, 1758 nt, Artificial Sequence; identical to SEQ ID NO: 156251
  derived and/or modified CDS sequence (opt3) from hemagglutinin__InfluenzaB__AHM01327

SEQ ID NO: 156269 - RNA, 1758 nt, Artificial Sequence; identical to SEQ ID NO: 154935
  derived and/or modified CDS sequence (opt3) from hemagglutinin__InfluenzaB__AHM01338

SEQ ID NO: 156270 - RNA, 1758 nt, Artificial Sequence; identical to SEQ ID NO: 154935
  derived and/or modified CDS sequence (opt3) from hemagglutinin__InfluenzaB__AHM01349

SEQ ID NO: 156271 - RNA, 1758 nt, Artificial Sequence
  derived and/or modified CDS sequence (opt3) from hemagglutinin__InfluenzaB__AHM01360
augaaggccaucauugugcugcucauggucguuaccagcaacgcugacagaauaugcacaggcaucacuuccucuaauucaccccacgugguaaaaacggcaacccagggggaagugaacgucacaggagugauuccucuuacuaccacaccaaccaagagucauuucgccaaucugaaagguacugaaacaaggggcaaguuguguccgaaaugcuuaaacuguaccgaucuggacguugcgcuagggcggcccaagugcacgggaaagaucccuagcgcucgcguguccauucuccacgagguccgaccagugacuucuggcuguuuucccaucaugcaugaucguaccaaaauaagacaacugccuaaucuucugagggguuacgaacacauccgguugucgacacauaacguaauuaaugccgagaacgcaccagggggacccuauaagaucggcacuucaggcagcugcccuaauguuaccaacgggaauggauucuuugccacaauggcuugggcagugccgaaaaacgacaagaauaaaaccgccacgaacccacucacuauugaaguccccuacaucuguacaaagggugaggaucagauaaccguguggggcuuccacagugacaaugagacucagauggcuaagcuguauggggauuccaacccucagaaauuuacaucuagcgccaacggagugaccacgcacuacgucucccaaauuggcgguuucccaaaucagaccgaagacgggggacugccccagucaggccgcaucguuguggauuauaugguacagaagaguggcaaaacagggacuauuaccuaccaaagaggaauccucuuaccucagaagguguggugcgcgagcgguaggucuaaagucaucaagggcucccugccacuuauuggggaggcagacuguuugcaugaaaaauauggaggccugaacaagucaaagcccuacuacacaggugagcacgccaaagcuauagggaauugcccgaucugggugaagacuccucuaaaacucgccaacggcaccaaguaucggcccccagcaaaacugcuuaaggagcgcggauuuuucggcgcuauugccggguuucuggaaggagguugggagggcaugaucgcgggguggcauggauacacaagccacggcgcccacgguguugcaguggcugccgauuugaagaguacccaggaagcuauaaauaaaauuacuaagaaccucaauucucuguccgaguuagaagucaaaaaccugcagcgacucagcggggccauggacgagcuucauaaugagauccuggaauuggaugagaagguggacgaccuaagagcagauacgaucucgucucaaauugaacuggccguacuccuguccaacgagggcaucauuaauucagaagacgagcaccuucuggcuuuggagaggaaacucaagaagaugcugggaccuagugcgguugaaauaggcaacggguguuucgagacaaaacauaagugcaaucagaccugcuuagaucggaucgcagccggaacuuuugacgcuggugaguucagccugcccaccuuugauucccuaaacauuacagccgcaucucucaaugacgauggccuggacaaccacaccauccuuuuguauuacagcacugccgcuucaagucuggccgugacacucaugaucgcaauuuucgucguguauauggucucccgugauaacgugagcuguucuauaugccuguga

SEQ ID NO: 156272 - RNA, 1755 nt, Artificial Sequence
  derived and/or modified CDS sequence (opt3) from hemagglutinin__InfluenzaB__AHM01371
augaaggccaucauugugcugcucauggucguuaccagcaacgcugacagaauaugcacaggcaucacuuccucuaauucaccccacgugguaaaaacggcaacccagggggaggugaacgucacaggagugauuccucuuacuaccacaccaaccaagaguuacuucgccaaucugaaagguacuaagacaaggggcaaauuguguccggauugcuuaaacuguaccgaccuggauguugcgcuagggcggcccaugugcgugggaacgacuccuagcgcuaaggccuccauccuccaugaaguccgcccagugaccucuggcuguuuucccauuaugcacgaccgaacaaagauccgucaacuggcaaaucuucugagagguuaugagaacauaagguugucgacucagaauguaaucgaugccgaaaaagcuccugggggaccauaccggcucggcaccucaggcagcugccccaacgcaacaaguaagaauggguucuuugccaccauggcuugggccguuccuaaagacaacaauaagaacgcgacgaauccacugacuguggaggucccguauauuugugcagaaggagaggaucagaucgccgugugggguuuccauuccgacaacaaaacacagaugaagaaucuguacggcgauucuaacccccaaaaguuuaccagcuccgcuaacggggugacuacacacuaugucucacagauuggaggcuucccugaccagaccgaggauggugggcucccacagaguggacgcaucguuguggacuacaugaugcaaaaacccggcaagacgggcaccauaguauaucagagagggguguuacugccucagaaagucuggugcgccagcggaaggucuaaggugauuaaagguucccuuccauugaucggcgaagcagauugucugcaugagaaguacgggggacuaaauaaaucaaagcccuacuauacaggcgaacacgcuaaggccauugguaacugcccgaucuggguuaaaacuccucucaagcuggcgaaugggaccaaauaccggcccccagccaaacuucugaaggagcgcggcuuuuucggagcaaucgcuggcuuuuuggaagggggaugggaagguaugauugccggcuggcacggguauacaagccauggagcucacggcguggccgucgcagccgaccucaagaguacucaggaggcuauaaacaagaucaccaaaaaucugaacucuuuauccgaacuggaggugaagaaucuccaacgacuuagcggugcgauggacgaacugcauaacgagauuuuggagcuagaugaaaaaguagacgaucugagagcagacacaaucucgucucagauagagcucgccguucugcuuuccaaugaagggauuaucaacucagaggaugaacaccuguuggcucucgagaggaagcugaaaaagauguuaggcccuagugccguggacaucggaaauggcuguuucgagaccaagcacaaaugcaaccagacuugccuggaucggauugcagccgggacguuuaaugcuggagaguucagccuacccacauuugacucccucaacaucaccgccgcaucucugaaugaugacggucuugauaaccauacuauuuugcuguacuauagcaccgcggcuucaagucucgccgucacacugaugcuugcaauauucaucguguacauggucucccgugacaacgugagcuguucuauuugccuguga

SEQ ID NO: 156273 - RNA, 1755 nt, Artificial Sequence; identical to SEQ ID NO: 154902
  derived and/or modified CDS sequence (opt3) from hemagglutinin__InfluenzaB__AHM01382

SEQ ID NO: 156274 - RNA, 1758 nt, Artificial Sequence
  derived and/or modified CDS sequence (opt3) from hemagglutinin__InfluenzaB__AHM01393
augaaggccaucauugugcugcucauggucguuaccagcaacgcugacagaauaugcacaggcaucacuuccucuaauucaccccacauugugaaaacggcaacccagggggagguaaacgugacaggagucaucccucuuacuaccacaccaaccaagagucauuucgccaaucugaaagguacugaaacaaggggcaaguuguguccgaaaugcuuaaacuguaccgaucuggacguggcgcuagggcggcccaagugcacgggaaagauuccuagcgcucgcguuuccauccuccacgaggugcgaccagucacuucuggcuguuuucccauaaugcaugaucguaccaaaaucagacaacugccuaaucuucugagggguuacgaacacauucgguugucgacacauaacgugaucaaugccgagaacgcaccagggggacccuauaagauuggcacuucaggcagcugcccuaauguaaccaacgggaauggauucuuugccacaauggcuugggcaguuccgaaaaacgacaagaauaaaaccgccacgaacccacucacuaucgaagugcccuacauauguacagagggugaggaucagauuaccgucuggggcuuccacagugacaaugaaacucagauggcuaagcuguauggggauuccaagccucagaaauuuacaucuagcgccaacggagugaccacgcacuacgugucccaaaucggcgguuucccaaaccagaccgaggacgggggacugccccagucaggccgcauugucguugauuauauggugcagaagaguggcaaaacagggacuaucaccuaccaaagaggaauccucuuaccucagaagguauggugcgcgagcgguaggucuaaagugauuaagggcucccugccacuuauaggggaagcagacuguuugcaugagaaauauggaggccugaauaagucaaagcccuacuacacaggugagcacgccaaagcuaucgggaacugcccgauuugggucaagacuccucuaaaacucgccaauggcaccaaguaucggcccccagcaaaacugcuuaaggaacgcggauuuuucggcgcuaucgccggguuucuggagggagguugggaaggcaugauagcgggguggcauggauacacaagccacggcgcccacgguguggcaguugcugccgauuugaagaguacccaggaggcuauuaacaaaaucacuaagaaucucaacucucuguccgaauuagaggugaaaaaucugcagcgacucagcggggccauggacgagcuucauaacgaaauccuggaguuggaugaaaaggucgacgaccuaagagcagauacgauuucgucucaaaucgagcuggccgugcuccuguccaaugaaggcauuauaaacucagaggacgagcaccuucuggcuuuggaaaggaaacucaagaagaugcugggaccuagugcgguagagaucggcaauggguguuucgaaacaaaacauaagugcaaccagaccugcuuagaucggauugcagccggaacuuuugacgcuggugaguucagccugcccaccuuugauucccuaaauaucacagccgcaucucucaacgacgauggccuggacaaucacaccauccuuuuguauuacagcacugccgcuucaagucuggccguuacacucaugauugcaauauucguggucuauauggugucccgugauaacgucagcuguucuaucugccuguga

SEQ ID NO: 156275 - RNA, 1758 nt, Artificial Sequence; identical to SEQ ID NO: 154935
  derived and/or modified CDS sequence (opt3) from hemagglutinin__InfluenzaB__AHM01404

SEQ ID NO: 156276 - RNA, 1758 nt, Artificial Sequence
  derived and/or modified CDS sequence (opt3) from hemagglutinin__InfluenzaB__AHM01415
augaaggccaucauugugcugcucauggucguuaccagcaacgcugacagaauaugcacaggcaucacuuccucuaauucaccccacgugguaaaaacggcaacccagggggaggugaacgucacaggagugauuccucuuacuaccacaccaaccaagagucauuucgccaaucugaaagguacugaaacaaggggcaaguuguguccgaaaugcuuaaacuguaccgaucuggacguugcgcuagggcggcccaagugcacgggaaagaucccuagcgcucgcguguccauucuccacgagguccgaccagugacuucuggcuguuuucccaucaugcaugaucguaccaaaauaagacaacugccuaaucuucugagggguuacgaacacauccgguugucgacacauaacguaauuaaugccgaggacgcaccagggggacccuauaagaucggcacuucaggcagcugcccuaacguuaccaaugggaacggauucuuugccacaauggcuugggcagugccgaaaaaugauaagaacaaaaccgccacgaauccacucacuauugaaguccccuacaucuguacagagggugaggaccagauaaccguguggggcuuccacagugauaacgaaacucagauggcuaagcuguauggggacuccaagccucagaaauuuacaucuagcgccaauggagugaccacgcacuacgucucccaaauuggcgguuucccaaaccagaccgaggaugggggacugccccagucaggccgcaucguuauugacuauauggugcagaagaguggcaaaacagggacuaucaccuaccaaagaggaauccucuuaccucagaagguauggugcgcgagcgguaggucuaaagugauuaagggcucccugccacuuauaggggaagcagauuguuugcaugagaaauauggaggccugaacaagucaaagcccuacuacacaggugagcacgccaaagcuaucgggaauugcccgauuugggucaagacuccucuaaaacucgccaacggcaccaaguaucggcccccagcaaaacugcuuaaggaacgcggauuuuucggcgcuaucgccggguuucuggagggagguugggaaggcaugauagcgggguggcauggauacacaagccacggcgcccacgguguggcaguugcugccgacuugaagaguacccaggaggcuauuaauaaaaucacuaagaaccucaauucucuguccgaauuagaggugaaaaaccugcagcgacucagcggggccauggaugagcuucauaaugaaauccuggaguuggacgaaaaggucgacgaucuaagagcagacacgauuucgucucaaaucgagcuggccgugcuccuguccaacgaaggcauuauaaauucagaggaugagcaccuucuggcuuuggaaaggaaacucaagaagaugcugggaccuagugcgguagagaucggcaacggguguuucgaaacaaaacauaagugcaaucagaccugcuuagaccggauugcagccggaacuuuugaugcuggugaguucagccugcccaccuuugacucccuaaacaucacagccgcaucucucaaugaugacggccuggauaaccacaccauccuuuuguauuacagcacugccgcuucaagucuggccguuacacucaugauugcaauauucguggucuauauggugucccgugacaaugucagcuguucuaucugccuguga

SEQ ID NO: 156277 - RNA, 1758 nt, Artificial Sequence
  derived and/or modified CDS sequence (opt3) from hemagglutinin__InfluenzaB__AHM01426
augaaggccaucauugugcugcucauggucguuaccagcaacgcugacagaauaugcacaggcaucacuuccucuaauucaccccacgugguaaaaacggcaacccagggggaggugaacgucacaggagugauuccucuuacuaccacaccaaccaagagucauuucgccaaucugaaagguacugaaacaaggggcaaguuguguccgaaaugcuuaaacuguaccgaucuggacguugcgcuagggcggcccaagugcacgggaaagaucccuagcgcucgcguguccauucuccacgagguccgaccagugacuucuggcuguuuucccaucaugcaugaucguaccaaaauaagacaacugccuaaucuucugagggguuacgaacacauccgguugucgacacauaacguaauuaaugccgagaacgcaccagggggacccuauaagaucggcacuucaggcagcugcccuaauguuaccaacgggaauggauucuuugccacaauggcuugggcagugccgaaaaacgacaagaauaaaaccgccacgaacccacucacuauugaaguccccuacaucuguacagagggugaggaucagauaaccauuuggggcuuccacagugacaaugaaacucagauggcuaagcuguauggggauuccaacccucagaaguuuacaucuagcgccaacggagugaccacgcacuacgugucccaaaucggcgguuucccaaaucagaccgaggacgggggacugccccagucaggccgcauugucguugauuauauggugcagaaaaguggcaagacagggacuaucaccuaccaaagaggaauccucuuaccucagaaaguauggugcgcgagcgguaggucuaaggugauuaaaggcucccugccacuuauaggggaagcagacuguuugcaugagaaguauggaggccugaacaaaucaaagcccuacuacacaggugagcacgccaaggcuaucgggaauugcccgauuugggucaaaacuccucuaaagcucgccaacggcaccaaauaucggcccccagcaaagcugcuuaaagaacgcggauuuuucggcgcuaucgccggguuucuggagggagguugggaaggcaugauagcgggguggcauggauacacaagccacggcgcccacgguguggcaguugcugccgauuugaagaguacccaggaggcuauuaauaagaucacuaaaaaccucaauucucuguccgaauuagaggugaagaaccugcagcgacucagcggggccauggacgagcuucauaaugaaauccuggaguuggaugaaaaagucgacgaccuaagagcagauacgauuucgucucaaaucgagcuggccgugcuccuguccaacgaaggcauuauaaauucagaggacgagcaccuucuggcuuuggaaaggaagcucaaaaagaugcugggaccuagugcgguagagaucggcaacggguguuucgaaacaaagcauaaaugcaaucagaccugcuuagaucggauugcagccggaacuuuugacgcuggugaguucagccugcccaccuuugauucccuaaacaucacagccgcaucucucaaugacgauggccuggacaaccacaccauccuuuuguauuacagcacugccgcuucaagucuggccguuacacucaugauugcaauauucguggucuauauggugucccgugauaacgucagcuguucuaucugccuguga

SEQ ID NO: 156278 - RNA, 1755 nt, Artificial Sequence
  derived and/or modified CDS sequence (opt3) from hemagglutinin__InfluenzaB__AHM01437
augaaggccgugaucguccugcucaugguugugaccagcaacgcugacagaauuugcacaggcauaacuuccucuaauucaccccacguagugaaaacggcaacccagggggaggucaacgugacaggaguuaucccucuuacuaccacaccaaccaagaguuacuucgccaaucugaaagguacuaagacaaggggcaaauuguguccggauugcuuaaacuguaccgaccuggauguggcgcuagggcggcccaugugcgucggaacgacuccuagcgcuaaggccuccauucuccaugaagugcgcccaguaaccucuggcuguuuucccaucaugcacgaccgaacaaagauucgucaacuggcaaaucuucugagagguuaugagaacaucagguugucgacucagaauguuauagaugccgaaaaagcuccugggggaccauaccggcucggcaccucaggcagcugccccaacgcaacaaguaaguccggguucuuugccaccauggcuugggccgugccuaaagacaauaacaagaaugcgacgaacccacugacugucgaggugccguauaucugugcagaagaggaggaucagauuacaguguggggauuccauucugacaauaaaacccagaugaagaaccuguacggugauagcaauccccaaaaguuuacuuccucagccaacggcgucacaacccacuauguuagucagaucgggggauucccugaccagacggaagauggcggucucccacagagcgggcgcauugugguagacuacaugaugcaaaaacccggaaagaccggcacaaucguguaucagagaggcgucuuacugccucagaaaguguggugcgcuucugggagguccaagguuauaaaaggaucacuuccauugauuggugaggccgauugucugcaugaaaaguacggcgggcuaaacaaaagcaagcccuacuauacuggagagcacgcaaaggcuaucggcaauugcccgauuugggugaaaaccccucucaagcuggccaacgguacaaaauaccggcccccagcgaagcugcugaaagagcgcggguuuuucggcgccaucgcaggauuuuuggaaggcgggugggagggaaugaucgcugguuggcacggcuauacaagucauggggcccacggagucgcuguggccgcagaccucaagucuacccaggaagccauuaauaagauaacuaaaaaccuuaauuccuuaagcgagcuggaaguaaagaaccuccaacgacuuucgggcgcuauggacgagcugcauaaugagaucuuggaacuagaugagaaaguugacgaucugagagcggacaccauuucuucccagaucgaacucgcagugcugcuuucaaacgaggguauaauuaauagugaagaugagcaccuguuggcccucgagaggaagcugaaaaagauguuagggccuagcgcugucgacaucggcaacggauguuucgaaacuaagcacaaaugcaaucagacgugccuggaucggaucgccgcaggcacauuuaacgccggggaguucucccuacccaccuuugacucucucaauauuacugcugccagccugaacgaugacggacuugauaaucauaccaucuugcuguacuauucaacagcagcgaguucccucgcugugacccugaugcuugccauuuucauagucuacauggugagccgugacaacguuucuuguucaaucugccuguga

SEQ ID NO: 156279 - RNA, 1755 nt, Artificial Sequence
  derived and/or modified CDS sequence (opt3) from hemagglutinin__InfluenzaB__AHM01448
augaaggccaucauugugcugcucauggucguuaccagcaacgcugacagaauaugcacaggcaucacuuccucuaauucaccccacgugguaaaaacggcaacccagggggaggugaacgucacaggagugauuccucuuacuaccacaccaaccaagaguuacuucgccaaucugaaagguacuaagacaaggggcaaauuguguccggauugcuuaaacuguaccgaccuggauguugcgcuagggcggcccaugugcgugggaacgacuccuagcgcuaaggccuccauccuccaugaaguccgcccagugaccucuggcuguuuucccauuaugcacgaccgaacaaagauccgucaacuggcaaaucuucugagagguuaugagaacauaagguugucgacucagaauguaaucgaugccgaaaaagcuccugggggaccauaccggcucggcaccucaggcagcugccccaacgcaacaaguaaguccggguucuuugccaccauggcuugggccguuccuaaagacaauaacaagaaugcgacgaacccacugacugcagaggugccguauauuugugccgaaggagaggaucagaucacagucugggguuuccauucugacaauaaaacccagaugaagaaccuguacggcgauagcaauccccaaaaguuuacuuccucagcuaacggggugacaacccacuaugugagucagauuggaggcuucccugaccagacggaggauggugggcucccacagagcggacgcaucgucguugacuacaugaugcaaaaacccggcaagaccggcacaauaguguaucagagagggguauuacugccucagaaaguguggugcgccucuggaagguccaaggucauuaaagguucacuuccauugaucggcgaagcagauugucugcaugagaaguacgggggacuaaacaaaagcaagcccuacuauacuggcgaacacgcuaaggccauugguaauugcccgaucugggugaaaaccccucucaagcuggcgaacgggacaaaauaccggcccccagccaagcugcugaaagagcgcggcuuuuucggagcaaucgcuggcuuuuuggaagggggaugggaagguaugauugccggcuggcacggguauacaagucauggagcucacggcguugccguggcagccgaccucaagucuacccaggaggcuauaaauaagaucacuaaaaaccuuaauuccuuaagcgaacuggaggucaagaaccuccaacgacuuucgggugcgauggacgaacugcauaaugagauuuuggagcuagaugaaaaaguggacgaucugagagcagacaccaucucuucccagauagagcucgccguacugcuuucaaacgaagggauuaucaauagugaggaugaacaccuguuggcucucgagaggaagcugaaaaagauguuaggcccuagcgccguugacaucggaaacggcuguuucgagacuaagcacaaaugcaaucagacgugccuggaucggauugcagccgggacauuuaacgcuggagaguucucccuacccaccuuugacucucucaauaucacugccgcaagccugaacgaugacggucuugauaaucauaccauuuugcuguacuauucaacagcggcuaguucccucgccgugacccugaugcuugcaauauucaucgucuacauggugagccgugacaacgucucuuguucaauuugccuguga

SEQ ID NO: 156280 - RNA, 1758 nt, Artificial Sequence; identical to SEQ ID NO: 154693
  derived and/or modified CDS sequence (opt3) from hemagglutinin__InfluenzaB__AHM01459

SEQ ID NO: 156281 - RNA, 1755 nt, Artificial Sequence
  derived and/or modified CDS sequence (opt3) from hemagglutinin__InfluenzaB__AHM01470
augaaggccaucauugugcugcucauggucguuaccagcaacgcugacagaauaugcacaggcaucacuuccucuaauucaccccacgugguaaaaacggcaacccagggggaggugaacgucacaggagugauuccucuuacuaccacaccaaccaagaguuacuucgccaaucugaaagguacuaagacaaggggcaaauuguguccggauugcuuaaacuguaccgaccuggauguugcgcuagggcggcccaugugcgugggaacgacuccuagcgcuaaggccuccauccuccaugaaguccgcccagugaccucuggcuguuuucccauuaugcacgaccgaacaaagauccgucaacuggcaaaucuucugagagguuaugagaacauaagguugucgacucagaauguaaucgaugccgaaaaagcuccugggggaccauaccggcucggcaccucaggcagcugccccaacgcaacaaguaaguccggguucuuugccaccauggcuugggccguuccuaaagacaauaacaagaaugcgacgaacccacugacuguggaggucccguauauuuguacagaaggagaggaucagaucgcagugugggguuuccauucugacaauaaaacccagaugaagaaccuguacggcgauagcaauccccaaaaguuuacuuccucagccaacggggugacaacccacuaugucagucagauuggaggcuucccugaccagacggaggauggugggcucccacagagcggacgcaucguuguggacuacaugaugcaaaaacccggcaagaccggcacaauaguauaucagagagggguguuacugccucagaaagucuggugcgcuucuggaagguccaaggugauuaaagguucacuuccauugaucggcgaagccgauugucugcaugagaaguacgggggacuaaacaaaagcaagcccuacuauacuggcgaacacgcaaaggcuauugguaauugcccgaucuggguuaaaaccccucucaagcuggccaacgggacaaaauaccggcccccagcgaagcugcugaaagagcgcggcuuuuucggagccaucgcaggcuuuuuggaagggggaugggaagguaugauugcuggcuggcacggguauacaagucauggagcccacggcguggcugucgccgcagaccucaagucuacccaggaggccgugaauaagauaacuaaaaaccuuaauuccuuaagcgaacuggagguaaagaaccuccaacgacuuucgggugcuauggacgaacugcauaaugagaucuuggagcuagaugaaaaaguugacgaucugagagcggacaccauuucuucccagaucgagcucgcagugcugcuuucaaacgaagggauaauuaauagugaggaugaacaccuguuggcccucgagaggaagcugaaaaagauguuaggcccuagcgcugucgacaucggaaacggcuguuucgagacuaagcacaaaugcaaucagacgugccuggaucggaucgccgcagggacauuuaacgccggagaguucucccuacccaccuuugacucucucaauauuacugcugccagccugaacgaugacggucuugauaaucauaccaucuugcuguacuauucaacagcagcgaguucccucgcugugacccugaugcuugccauuuucauagucuacauggugagccgugacaacguuucuuguucaaucugccuguga

SEQ ID NO: 156282 - RNA, 1755 nt, Artificial Sequence
  derived and/or modified CDS sequence (opt3) from hemagglutinin__InfluenzaB__AHM01481
augaaggccaucauugugcugcucauggucguuaccagcaacgcugacagaauaugcacaggcaucacuuccucuaauucaccccacgugguaaaaacggcaacccagggggaggugaacgucacaggagugauuccucuuacuaccacaccaaccaagaguuacuucgccaaucugaaagguacuaagacaaggggcaaauuguguccggauugcuuaaacuguaccgaccuggauguugcgcuagggcggcccaugugcgugggaacgacuccuagcgcuaaggccuccauccuccaugaaguccgcccagugaccucuggcuguuuucccauuaugcacgaccgaacaaagauccgucaacuggcaaaucuucugagagguuaugagaacauaagguugucgacucagaauguaaucgaugccgaaaaagcuccugggggaccauaccggcucggcaccucaggcagcugccccaacgcaacaaguaaguccggguucuuugccaccauggcuugggccguuccuaaagacaauaacaagaaugcgacgaacccacugacuguggaggucccguauauuugugcagaaggagaggaucagaucacagugugggguuuccauucugacaauaaaacccagaugaagaaccuguacggcgauagcaauccccaaaaguuuacuuccucagccaacggggugacaacccacuaugucagucagauuggaggcuucccugaccagacggaggauggugggcucccacagagcggacgcaucguuguggacuacaugaugcaaaaacccggcaagaccggcacaauaguauaucagagagggguguuacugccucagagggucuggugcgcuucuggacgguccaaagugauuaaggguucacuuccauugaucggcgaagccgauugucugcaugagaaauacgggggacuaaacaagagcaaacccuacuauacuggcgaacacgcaaaggcuauugguaauugcccgaucuggguuaagaccccucucaaacuggccaacgggacaaaguaccgacccccagcgaaacuucugaaggagcgcggcuuuuucggagccaucgcaggcuuuuuggaagggggaugggaagguaugauugcuggcuggcacggguauacuucccauggagcccacggcguggcugucgccgcagaccucaaaucuacccaggaggccauaaauaagaucacaaagaaccugaauaguuuaagcgaacuggaggugaaaaaccuccaaagacuuucgggugcuauggacgaacugcauaaugagauuuuggagcuagaugaaaagguagacgaucugagggcggacaccaucucuucccagauagagcucgcaguucugcuuucaaacgaagggauuaucaauagugaggaugaacaccuguuggcccucgagcggaaacugaagaaaauguuaggcccuagcgcuguggacaucggaaacggcuguuucgagacuaagcacaagugcaaucagacgugccuggaucguauugccgcagggacauuuaacgccggagaguucucccuacccaccuuugacucucucaauaucacugcugccagccugaacgaugacggucuugauaaucauaccauuuugcuguacuauucaacagcagcgaguucccucgcugucacccugaugcuugccauauucaucguguacauggucagccgcgacaacgugucuuguucaauuugccuguga

SEQ ID NO: 156283 - RNA, 1755 nt, Artificial Sequence; identical to SEQ ID NO: 154947
  derived and/or modified CDS sequence (opt3) from hemagglutinin__InfluenzaB__AHM01492

SEQ ID NO: 156284 - RNA, 1755 nt, Artificial Sequence; identical to SEQ ID NO: 154902
  derived and/or modified CDS sequence (opt3) from hemagglutinin__InfluenzaB__AHM01503

SEQ ID NO: 156285 - RNA, 1755 nt, Artificial Sequence; identical to SEQ ID NO: 154902
  derived and/or modified CDS sequence (opt3) from hemagglutinin__InfluenzaB__AHM01514

SEQ ID NO: 156286 - RNA, 1755 nt, Artificial Sequence
  derived and/or modified CDS sequence (opt3) from hemagglutinin__InfluenzaB__AHM01525
augaaggccaucauugugcugcucauggucguuaccagcaacgcugacagaauaugcacaggcaucacuuccucuaauucaccccacgugguaaaaacggcaacccagggggaggugaacgucacaggagugauuccucuuacuaccacaccaaccaagaguuacuucgccaaucugaaagguacuaagacaaggggcaaauuguguccggauugcuuaaacuguaccgaccuggauguugcgcuagggcggcccaugugcgugggaacgacuccuagcgcuaaggccuccauccuccaugaaguccgcccagugaccucuggcuguuuucccauuaugcacgaccgaacaaagauccgucaacuggcaaaucuucugagagguuaugagaacauaagguugucgacucagaauguaaucgaugccgaaaaagcuccugggggaccauaccggcucggcaccucaggcagcugccccaacgcaacaaguaaguccggguucuuugccaccauggcuugggccguuccuaaagacaauaacaagaaugcgacgaacccacugacuguggaggucccguauauuugugcagaaggagaggaucagaucacagugugggguuuccauucugacaauaaaacccagaugaagaaccuguacggcgauagcaauccccaaaaguuuacuuccucagccaacggggugacaacccacuaugucagucagauuggaggcuucccugaccagacggaggauggugggcucccacagagcggacgcaucguuguggacuacaugauacaaaaacccggcaagaccggcacaauuguauaucagagagggguguuacugccucagaaagucuggugcgcuucuggaagguccaaggugaucaaagguucacuuccauugauuggcgaagccgauugucugcaugagaaguacgggggacuaaacaaaagcaagcccuacuauacuggcgaacacgcaaaggcuaucgguaauugcccgaucuggguuaaaaccccucucaagcuggccaacgggacaaaauaccggcccccagcgaagcugcugaaagagcgcggcuuuuucggagccauugcaggcuuuuuggaagggggaugggaagguaugauagcuggcuggcacggguauacaagucauggagcccacggcguggcugucgccgcagaccucaagucuacccaggaggccaucaauaagauuacuaaaaaccuuaauuccuuaagcgaacuggaggugaagaaccuccaacgacuuucgggugcuauggacgaacugcauaaugagaucuuggagcuagaugaaaaaguagacgaucugagagcggacaccauaucuucccagauugagcucgcaguucugcuuucaaacgaagggaucaucaauagugaggaugaacaccuguuggcccucgagaggaagcugaaaaagauguuaggcccuagcgcuguggacauuggaaacggcuguuucgagacuaagcacaaaugcaaucagacgugccuggaucggaucgccgcagggacauuuaacgccggagaguucucccuacccaccuuugacucucucaauauuacugcugccagccugaacgaugacggucuugauaaucauaccauauugcuguacuauucaacagcagcgaguucccucgcugucacccugaugcuugccaucuucauuguguacauggucagccgugacaacgugucuuguucaaucugccuguga

SEQ ID NO: 156287 - RNA, 1755 nt, Artificial Sequence
  derived and/or modified CDS sequence (opt3) from hemagglutinin__InfluenzaB__AHM01536
augaaggccaucauugugcugcucauggucguuaccagcaacgcugacagaauaugcacaggcaucacuuccucuaauucaccccacgugguaaaaacggcaacccagggggaggugaacgucacaggagugauuccucuuacuaccacaccaaccaagaguuacuucgccaaucugaaagguacuaagacaaggggcaaauuguguccggauugcuuaaacuguaccgaccuggauguugcgcuagggcggcccaugugcgugggaacgacuccuagcgcuaaggccuccauccuccaugaaguccgcccagugaccucuggcuguuuucccauuaugcacgaccgaacaaagauccgucaacuggcaaaucuucugagagguuaugagaacauaagguugucgacucagaauguaaucgaugccgaaaaagcuccugggggaccauaccggcucggcaccucaggcagcugccccaacgcaacaaguaaguccggguucuuugccaccauggcuugggccguuccuaaagacaauaacaagaaugcgacgaacccacugacuguggaggucccguauauuugugcagaaggagaggaucagaucacagugugggguuuccauucugacaauaaaacccagaugaagaaccuguacggcgauagcaauccccaaaaguuuacuuccucagccaacggggugacaacccacuaugucagucagauuggaggcuucccugaccagacggaggauggugggcucccacagagcggacgcaucguuguggacuacaugaugcaaaaacccggcaagaccggcacaauaguauaucagagagggguguuacugccucagaaagucuggugcgcuucuggaagguccaaggugauuaaagguucacuuccauugaucggcgaagccgauugucugcaugagaaguacgggggacuaaacaaaagcaagcccuacuauacuggcgaacacgcaaaggcuauugguaauugcccgaucuggguuaaaaccccucucaagcuggccaacgggacaaaauaccggcccccagcgaagcugcugaaagagcgcggcuuuuucggagccaucgcaggcuuuuuggaagggggaugggaagguaugauugcuggcuggcacggguauacaagucauggagugcacggcgucgccguggcugccgaccucaagucuacccaggaggcaauaaauaagaucacuaaaaaccuuaauuccuuaagcgaacuggagguaaagaaccuccaacgacuuucgggugccauggacgaacugcauaaugagauuuuggagcuagaugaaaaaguugacgaucugagagcugacaccaucucuucccagauagagcucgcggugcugcuuucaaacgaagggauuaucaauagugaggaugaacaccuguuggcacucgagaggaagcugaaaaagauguuaggcccuagcgccgucgacaucggaaacggcuguuucgagacuaagcacaaaugcaaucagacgugccuggaucggauugcugccgggacauuuaacgcaggagaguucucccuacccaccuuugacucucucaauaucacugccgcuagccugaacgaugacggucuugauaaucauaccauuuugcuguacuauucaacagccgcaaguucccucgcggugacccugaugcuugcuauauucaucgucuacauggugagccgugacaacguuucuuguucaauuugccuguga

SEQ ID NO: 156288 - RNA, 1755 nt, Artificial Sequence; identical to SEQ ID NO: 154902
  derived and/or modified CDS sequence (opt3) from hemagglutinin__InfluenzaB__AHM01547

SEQ ID NO: 156289 - RNA, 1755 nt, Artificial Sequence; identical to SEQ ID NO: 154947
  derived and/or modified CDS sequence (opt3) from hemagglutinin__InfluenzaB__AHM01558

SEQ ID NO: 156290 - RNA, 1758 nt, Artificial Sequence; identical to SEQ ID NO: 154788
  derived and/or modified CDS sequence (opt3) from hemagglutinin__InfluenzaB__AHV83951

SEQ ID NO: 156291 - RNA, 1755 nt, Artificial Sequence; identical to SEQ ID NO: 156177
  derived and/or modified CDS sequence (opt3) from hemagglutinin__InfluenzaB__AHV83952

SEQ ID NO: 156292 - RNA, 1758 nt, Artificial Sequence; identical to SEQ ID NO: 154731
  derived and/or modified CDS sequence (opt3) from hemagglutinin__InfluenzaB__AHZ36697

SEQ ID NO: 156293 - RNA, 1758 nt, Artificial Sequence
  derived and/or modified CDS sequence (opt3) from hemagglutinin__InfluenzaB__AHZ36708
augaaggccaucauugugcugcucauggucguuaccagcaacgcugacagaauaugcacaggcaucacuuccucuaauucaccccacgugguaaaaacggcaacccagggggaggugaacgucacaggagugauuccucuuacuaccacaccaaccaagagucauuucgccaaucugaaagguacugaaacaaggggcaaguuguguccgaaaugcuuaaacuguaccgaucuggacguugcgcuagggcggcccaagugcacgggaaagaucccuagcgcucgcguguccauucuccacgagguccgaccagugacuucuggcuguuuucccaucaugcaugaucguaccaaaauaagacaacugccuaaucuucugagggguuacgaacacauccgguugucgacacauaacguaauuaaugccgagaacgcaccagggggacccuauaagaucggcacuucaggcagcugccucaauguuaccaacgggaauggauucuuugccacaauggcuugggcagugccuaaaaacgacaagaauaaaaccgccacgaacccacugacuauugaagucccguacaucuguacagagggugaggaucagauaaccguguggggcuuccacagugacaaugaaacucagauggcuaagcuguauggggauuccaagccccagaaauuuacaucuagcgccaacggagugaccacgcacuacgucucccaaauuggcgguuucccuaaccagaccgaggacgggggacucccacagucaggccgcaucguuguggauuauaugguacagaagaguggcaaaacagggacuauuaccuaccaaagaggaaucuuacugccccagaagguguggugcacaagcgguaggucuaaagucaucaagggcucccuuccuuugauuggggaagcggacugucugcaugagaaauauggaggccuaaauaagucaaagccauacuacacuggugagcacgcaaaagccauagggaacugccccaucugggugaagaccccgcucaaacuggcuaauggcacaaaguaucggccucccgccaaacuucugaaggaacgcggauuuuucggcgcaauugcuggguuuuuggagggagguugggaaggcaugaucgccggguggcauggauacaccagccacggcgcgcacgguguugccguggcagcugaucucaagaguacucaggaggccauaaacaaaauuacgaagaaucugaacucuuuauccgaacuggaggucaaaaaucuccagcgacuuagcggggcuauggacgagcugcauaacgaaaucuuggagcuagaugaaaagguggacgaccugagagccgauacaaucucgucucaaauugagcucgcaguacugcuuuccaaugaaggcaucauuaacucagaggacgagcaccuguuggcccucgaaaggaaacugaagaagauguuaggaccaagugcuguugagauaggcaauggguguuucgaaaccaaacauaagugcaaccagacuugccuggaucggaucgcggcaggaaccuuugacgccggugaguucagccuaccuacauuugauucccucaauauuaccgcugccucucugaacgacgauggccuugacaaucacacuaucuugcuguauuacagcacagcagccucaagucucgcugugacgcugaugaucgccauuuucgucguguauauggucucccgugauaacgugagcuguucuauaugccuuuga

SEQ ID NO: 156294 - RNA, 1758 nt, Artificial Sequence
  derived and/or modified CDS sequence (opt3) from hemagglutinin__InfluenzaB__AHZ36719
augaaggccaucauugugcugcucauggucguuaccagcaacgcugacagaauaugcacaggcaucacuuccucuaauucaccccacgugguaaaaacggcaacccagggggaggugaacgucacaggagugauuccucuuacuaccacaccaaccaagagucauuucgccaaucugaaagguacugaaacaaggggcaaguuguguccgaaaugcuuaaacuguaccgaucuggacguugcgcuagggcggcccaagugcacgggaaagaucccuagcgcucgcguguccauucuccacgagguccgaccagugacuucuggcuguuuucccaucaugcaugaucguaccaaaauaagacaacugccuaaucuucugagggguuacgaacacauccgguugucgacacauaacguaauuaaugccgagaacgcaccagggggacccuauaagaucggcacuucaggcagcugcccuaauguuaccaacgggaauggauucuuugccacaauggcuugggcagugccgaaaaacgacaagaauaaaaccgccacgaacccacucacuauugaaguccccuacguguguacagagggugaggaucagaucaccguguggggcuuccacagugacaaugaaacucagauggcuaagcuguauggggauuccaagccucagaaauuuacaucuagcgccaacggagucaccacgcacuacguuucccaaauaggcgguuucccaaaccagaccgaggacgggggacugccccagucaggccgcauugugguagauuauauggugcagaagaguggcaaaacagggacuaucaccuaccaaagagguauucucuuaccucagaaggucuggugcgcgagcggaaggucuaaagugaucaagggcucccugccacuuaucggggaagcagacuguuugcaugagaaauauggaggccugaauaagucaaagcccuacuacacaggugagcacgccaaagcuauugggaacugcccgauauggguuaagacuccucuaaaacucgccaauggcaccaaguaucggcccccagcaaaacugcuuaaggaacgcggauuuuucggcgcuaucgccggguuucuggagggagguugggaaggcaugauugcgggguggcauggauacacaagccacggcgcccacgguguggcagucgcugccgauuugaagaguacccaggaggcuaucaacaaaauaacuaagaaucucaacucucuguccgaauuagaggugaaaaaucugcagcgacucagcggggccauggacgagcuucauaacgaaauucuggaguuggaugaaaagguagacgaccuaagagcagauacgaucucgucucaaaucgagcuggccguucuccuguccaaugaaggcauuaucaacucagaggacgagcaccuucuggcuuuggaaaggaaacucaagaagaugcugggaccuagugcgguggagauuggcaauggguguuucgaaacaaaacauaagugcaaccagaccugcuuagaucggauagcagccggaacuuuugacgcuggugaguucagccugcccaccuuugauucccuaaauaucacagccgcaucucucaacgacgauggccuggacaaucacaccauucuuuuguauuacagcacugccgcuucaagucuggccgucacacucaugaucgcaaucuucguggucuauauggugucccgugauaacguuagcuguucuauuugccuguga

SEQ ID NO: 156295 - RNA, 1758 nt, Artificial Sequence; identical to SEQ ID NO: 154731
  derived and/or modified CDS sequence (opt3) from hemagglutinin__InfluenzaB__AHZ36730

SEQ ID NO: 156296 - RNA, 1758 nt, Artificial Sequence; identical to SEQ ID NO: 154731
  derived and/or modified CDS sequence (opt3) from hemagglutinin__InfluenzaB__AHZ36752

SEQ ID NO: 156297 - RNA, 1758 nt, Artificial Sequence; identical to SEQ ID NO: 154693
  derived and/or modified CDS sequence (opt3) from hemagglutinin__InfluenzaB__AHZ36763

SEQ ID NO: 156298 - RNA, 1758 nt, Artificial Sequence
  derived and/or modified CDS sequence (opt3) from hemagglutinin__InfluenzaB__AHZ36774
augaaggccaucauugugcugcucauggucguuaccagcaacgcugacagaauaugcacaggcaucacuuccucuaauucaccccacgugguaaaaacggcaacccagggggaagugaacgucacaggagugauuccucuuacuaccacaccaaccaagagucauuucgccaaucugaaagguacugaaacaaggggcaaguuguguccgaaaugccccaacuguaccgauuuagacguugcgcuggggcggccuaagugcacgggaaagaucccaagcgcucgcguguccauucuacacgagguccgacccgugacuucuggcuguuuuccuaucaugcaugaucguaccaaaauaagacaacucccaaaucugcuuagggguuacgaacacauccggcugucgacacauaacguaauuaaugccgagucagcacccgggggaccuuauaagaucggcacuagcggcaguugcccaaacguuaccaaugggaacggauucuuugccacaauggcuugggcagugccgaaaaaugacaagaacaaaaccgccacggaucccuugacuauugaagucccuuacaucuguacagaggaggaagaccagauaaccgugugggguuuccacuccgauaaugagacucagauggcuaagcucuauggcgacucuaagccacagaaauuuacaagcuccgccaacggggugaccacgcacuacgucucacaaauuggaggcuuccccaaucagaccgaagauggugggcugccucagaguggacgcaucguuguggacuauaugguacaaaagagcggcaaaacaggcacuauuaccuaccagagagggauccugcucccacagaagguguggugcgcgucuggaagguccaaagucaucaaggguucauuaccccugauuggcgaggcagauugucuucaugagaaauaugggggauugaacaagagcaagccguacuacacaggcgaacacgccaaagcuauagguaacugcccuaucugggugaagacuccccugaaacuagccaaugggaccaaguaucggccuccagcaaaacuccugaaggagcgcggcuuuuucggagcuauugccggcuuucuugaagggggaugggaggguaugaucgcgggcuggcauggguacacaagucacggagcccacggcguugcaguggcugccgaccugaagucuacccaggaagcuauaaacaaagucacuaagaauuugaacucccucagcgagcuggaggugaaaaauuuacagcgacugucgggugccauggaugaacuccauaacgagauucuugaacuggacgagaagguagacgauuugagagcagacacgaucucuucccaaaucgaacuagccguucugcucucaaaugaggggauuaucaacagugaggaugaacaucugcuugcucuggagaggaaauugaagaagaugcucggccccagcgcgguggaaauuggaaauggcuguuucgagacaaaacacaagugcaaccagaccugccuggaccggauagcagccgggacuuuugaugcuggagaguucuccuuaccaaccuuugacucucugaauaucacagccgcaagccuaaacgaugacggucucgauaaucacaccauucugcuuuauuacucaacugccgcuaguuccuuggccgucacacugaugaucgcaaucuucguggucuauauggugagccgugacaacguuucuuguucaauuugccucuga

SEQ ID NO: 156299 - RNA, 1758 nt, Artificial Sequence; identical to SEQ ID NO: 156207
  derived and/or modified CDS sequence (opt3) from hemagglutinin__InfluenzaB__AHZ36785

SEQ ID NO: 156300 - RNA, 1758 nt, Artificial Sequence; identical to SEQ ID NO: 156207
  derived and/or modified CDS sequence (opt3) from hemagglutinin__InfluenzaB__AHZ36796

SEQ ID NO: 156301 - RNA, 1755 nt, Artificial Sequence
  derived and/or modified CDS sequence (opt3) from hemagglutinin__InfluenzaB__AHZ36807
augaaggccaucauugugcugcucauggucguuaccagcaacgcugacagaauaugcacaggcaucacuuccucuaauucaccccacgugguaaaaacggcaacccagggggaggugaacgucacaggagugauuccucuuacuaccacaccaaccaagaguuacuucgccaaucugaaagguacuaagacaaggggcaaauuguguccggauugcuuaaacuguaccgaccuggauguugcgcuagggcggcccaugugcgugggaacgacuccuagcgcuaaggccuccauccuccaugaaguccgcccagugaccucuggcuguuuucccauuaugcacgaccgaacaaagauccgucaacuggcaaaucuucugagagguuaugagaacauaagguugucgacucagaauguaaucgaugccgaaaaagcuccugggggaccauaccggcucggcaccucaggcagcugccccaacgcaacaaguaaguccggguucuuugccaccauggcuugggccguuccuaaagacaauaacaagaaugcgacgaacccacugacuguggaggucccguauauuugugcagaaggagaggaucagaucacagugugggguuuccauucugacaauaaaacccagaugaagaaccuguacggcgauagcaauccccaaaaguuuacuuccucagccaacggggugacaacccacuaugucagucagauuggaggcuucccugaccagacggaggauggugggcucccacagagcggacgcaucguuguggacuacaugaugcaaaaacccgaaaagaccggcacaauaguauaucagagaggcguguuacugccucagaaagucuggugcgcuucugggagguccaaggugauuaaaggaucacuuccauugaucggugaggccgauugucugcaugaaaaguacggcgggcuaaacaaaagcaagcccuacuauacuggagagcacgcaaaggcuauuggcaauugcccgaucuggguuaaaaccccucucaagcuggccaacgguacaaaauaccggcccccagcgaagcugcugaaagagcgcggguuuuucggcgccaucgcaggauuuuuggaaggcgggugggagggaaugauugcugguuggcacggcuauacaagucauggggcccacggaguggcugucgccgcagaccucaagucuacccaggaagccauaaauaagaucacuaaaaaccuuaauuccuuaagcgagcuggaagugaagaaccuccaacgacuuucgggcgcuauggacgagcugcauaaugagauuuuggaacuagaugagaaaguagacgaucugagagcggacaccaucucuucccagauagaacucgcaguucugcuuucaaacgaggguauuaucaauagugaagaugagcaccuguuggcccucgagaggaagcugaaaaagauguuagggccuagcgcuguggacaucggcaacggauguuucgaaacuaagcacaaaugcaaucagacgugccuggaucggauugccgcaggcacauuuaacgccggggaguucucccuacccaccuuugacucucucaauaucacugcugccagccugaacgaugacggacuugauaaucauaccauuuugcuguacuauucaacagcagcgaguucccucgcugucacccugaugcuugccauauucaucguguacauggucagccgugacaacgugucuuguucaauuugccuguga

SEQ ID NO: 156302 - RNA, 1758 nt, Artificial Sequence; identical to SEQ ID NO: 154731
  derived and/or modified CDS sequence (opt3) from hemagglutinin__InfluenzaB__AHZ36818

SEQ ID NO: 156303 - RNA, 1758 nt, Artificial Sequence; identical to SEQ ID NO: 154693
  derived and/or modified CDS sequence (opt3) from hemagglutinin__InfluenzaB__AHZ36829

SEQ ID NO: 156304 - RNA, 1758 nt, Artificial Sequence; identical to SEQ ID NO: 154693
  derived and/or modified CDS sequence (opt3) from hemagglutinin__InfluenzaB__AHZ36840

SEQ ID NO: 156305 - RNA, 1758 nt, Artificial Sequence; identical to SEQ ID NO: 156207
  derived and/or modified CDS sequence (opt3) from hemagglutinin__InfluenzaB__AHZ36851

SEQ ID NO: 156306 - RNA, 1758 nt, Artificial Sequence; identical to SEQ ID NO: 154731
  derived and/or modified CDS sequence (opt3) from hemagglutinin__InfluenzaB__AHZ36862

SEQ ID NO: 156307 - RNA, 1758 nt, Artificial Sequence; identical to SEQ ID NO: 154693
  derived and/or modified CDS sequence (opt3) from hemagglutinin__InfluenzaB__AHZ36873

SEQ ID NO: 156308 - RNA, 1758 nt, Artificial Sequence
  derived and/or modified CDS sequence (opt3) from hemagglutinin__InfluenzaB__AHZ36884
augaaggccaucauugugcugcucauggucguuaccagcaacgcugacagaauaugcacaggcaucacuuccucuaauucaccccacauugugaaaacggcaacccagggggaaguaaacgugacaggagucaucccucuuacuaccacaccaaccaagagucauuucgccaaucugaaagguacugaaacaaggggcaaguuguguccgaaaugcuuaaacuguaccgaucuggacguggcgcuagggcggcccaagugcacgggaaagauuccuagcgcucgcguuuccauccuccacgaggugcgaccagucacuucuggcuguuuucccauaaugcaugaucguaccaaaaucagacaacugccuaaucuucugagggguuacgaacacauucgguugucgacacauaacgugaucaaugccgagaacgcaccagggggacccuauaagauuggcacuucaggcagcugcccuaauaucaccaacgggaauggauucuuugaaacaauggccugggcuguaccgaaaaacgacaagaauaaaaccgcaacgaacccacucacuauagagguucccuacauuuguacagagggugaagaucagaucaccguguggggcuuccacagugacaaugagacucagauggccaagcuguauggggauuccaagccucagaaauuuacaucuagcgcuaacggagucaccacgcacuacgugucccaaauuggcgguuucccaaaccagaccgaagacgggggacugccccagucaggccgcaucguggucgauuauaugguucagaagaguggcaaaacagggacuaucaccuaccaaagagguauucucuuaccucagaagguguggugcgccagcggaaggucuaaaguaauaaagggcucccugccacuuaucggggaggcggacuguuugcaugagaaauauggaggccugaauaagucaaagcccuacuacacaggugaacacgcaaaagccauugggaacugcccgaucugggugaagacuccucuaaaacucgcuaauggcaccaaguaucggcccccagccaaacugcuuaaggagcgcggauuuuucggcgcaauagcuggguuucuggaaggagguugggagggcaugauugccggguggcauggauacacaagccacggcgcgcacggugucgccguggcagcugauuugaagaguacccaggaagccaucaacaaaaucacuaagaaucucaacucucuguccgaguuagagguuaaaaaucugcagcgacucagcggggcuauggacgaacuucauaacgagauucuggaauuggaugagaagguggacgaccuaagagccgauacgaucucgucucaaauugaacuggcaguccuccuguccaaugagggcauaaucaacucagaggacgaacaccuucuggccuuggagaggaaacucaagaagaugcugggaccuagugcuguggaaauuggcaauggguguuucgagacaaaacauaagugcaaccagaccugcuuagaucggaucgcggcaggaacuuuugacgccggugaguucagccugcccaccuuugauucccuaaauaucacagcugccucucucaacgacgauggccuggacaaucacaccauucuuuuguauuacagcacugcagccucaagucuggcuguaacacucaugauagccaucuucguuguguauauggucucccgugauaacgugagcuguucuauuugccuguga

SEQ ID NO: 156309 - RNA, 1758 nt, Artificial Sequence; identical to SEQ ID NO: 154731
  derived and/or modified CDS sequence (opt3) from hemagglutinin__InfluenzaB__AHZ36895

SEQ ID NO: 156310 - RNA, 1758 nt, Artificial Sequence; identical to SEQ ID NO: 154731
  derived and/or modified CDS sequence (opt3) from hemagglutinin__InfluenzaB__AHZ36906

SEQ ID NO: 156311 - RNA, 1758 nt, Artificial Sequence
  derived and/or modified CDS sequence (opt3) from hemagglutinin__InfluenzaB__AHZ36928
augaaggccaucauugugcugcucauggucguuaccagcaacgcugacagaauaugcacaggcaucacuuccucuaauucaccccacgugguaaaaacggcaacccagggggaagugaacgucacaggagugauuccucuuacuaccacaccaaccaagagucauuucgccaaucugaaagguacuaagacaaggggcaaauuguguccgaagugcuuaaacuguaccgaucuggacguugcgcuagggcggcccaagugcacgggaaaaaucccuagcgcucgcguguccauucuccacgaaguccgaccagugacuucuggcuguuuucccaucaugcaugaucguaccaagauaagacaacugccuaaucuucugagggguuacgagcacauccgguugucgacacauaacguaauuaaugccgaaaacgcaccagggggacccuauaaaaucggcacuucaggcagcugccucaauguuaccaacgggaauggauucuuugccacaauggcuugggcagugccuaagaacgacaaaaauaagaccgccacgaacccacugacuauugaggucccguacaucuguacagaaggugaggaucagauaaccguguggggcuuccacagugacaaugagacucagauggcuaagcuguauggggauuccaaaccccagaaguuuacaucuagcgccaacggagugaccacgcacuacgucucccaaauuggcgguuucccuaaccagaccgaagacgggggacucccacagucaggccgcaucguuguggauuauaugguacagaaaaguggcaagacagggacuauuaccuaccaaagaggaaucuuacugccccagaaaguguggugcgcgagcgguaggucuaaggucaucaaaggcucccuuccuuugauuggggaggcagacugucugcaugaaaaguauggaggccuaaauaagucaaaaccauacuacacaggugagcacgccaaggcuauagggaacugccccaucugggugaaaacuccgcucaagcuggccaauggcaccaaauaucggccucccgcaaaacuucugaaggagcgcggauuuuucggcgcuauugccggguuuuuggaaggagguugggagggcaugaucgcgggguggcauggauacacaagccacggcgcccacgguguugcaguggcugccgaucucaagaguacccaggaagcuauaaacaagauuacuaaaaaucugaacucuuuauccgagcuggaagucaagaaucuccagcgacuuagcggggccauggacgagcugcauaacgagaucuuggaacuagaugagaaaguggacgaccugagagcagauacgaucucgucucaaauugaacucgccguacugcuuuccaaugagggcaucauuaacucagaagacgagcaccuguuggcucucgagaggaagcugaagaaaauguuaggaccaagugcgguugaaauaggcaauggguguuucgagacaaagcauaaaugcaaccagaccugccuggaucggaucgcagccggaacuuuugacgcuggugaguucagccuaccuaccuuugauucccucaauauuacagccgcaucucugaacgacgauggccuugacaaucacaccaucuugcuguauuacagcacugccgcuucaagucucgccgugacacugaugaucgcaauuuucgucguguauauggucucccgugauaacgugagcuguucuauaugccuuuga

SEQ ID NO: 156312 - RNA, 1758 nt, Artificial Sequence; identical to SEQ ID NO: 156207
  derived and/or modified CDS sequence (opt3) from hemagglutinin__InfluenzaB__AHZ36939

SEQ ID NO: 156313 - RNA, 1758 nt, Artificial Sequence
  derived and/or modified CDS sequence (opt3) from hemagglutinin__InfluenzaB__AHZ36950
augaaggccaucauugugcugcucauggucguuaccagcaacgcugacagaauaugcacaggcaucacuuccucuaauucaccccacauugugaaaacggcaacccagggggagguaaacgugacaggagucaucccucuuacuaccacaccaaccaagagucauuucgccaaucugaaagguacugaaacaaggggcaaguuguguccgaaaugcuuaaacuguaccgaucuggacguggcgcuagggcggcccaagugcacgggaaagauuccuagcgcucgcguuuccauccuccacgaggugcgaccaauaacuucuggcuguuuucccaucaugcaugaucguaccaaaauuagacaacugccuaaucuucugagggguuacgaacacauccgguugucgacacauaacgucauuaaugccgagaacgcaccagggggacccuauaagaucggcacuucaggcagcugcccuaauauaaccaacgggaauggauucuuugccacaauggcuugggcagugccgaaaaacgacaagaauaaaaccgccacgaacccacucacuauugaaguacccuacaucuguacagagggugaggaucagauuaccguuuggggcuuccacagugacaaugaaacucagauggcuaagcuguauggggauuccaagccucagaaauuuacaucuagcgccaacggagugaccacgcacuacgucucccaaaucggcgguuucccaaaccagaccgaggacgggggacugccccagucaggccgcaucgugguggauuauaugguccagaagaguggcaaaacagggacuauuaccuaccaaagaggaauacucuuaccucagaagguuuggugcgcgagcgguaggucuaaagugaucaagggcucccugccacuuauuggggaagcagacuguuugcaugagaaauauggaggccugaauaagucaaagcccuacuacacaggugagcacgccaaagcuaucgggaacugcccgauauggguaaagacuccucuaaaacucgccaauggcaccaaguaucggcccccagcaaaacugcuuaaggaacgcggauuuuucggcgcuauugccggguuucuggagggagguugggaaggcaugaucgcgggguggcauggauacacaagccacggcgcccacgguguggcagucgcugccgauuugaagaguacccaggaggcuaucaacaaaauuacuaagaaucucaacucucuguccgaauuagaggugaaaaaucugcagcgacucagcggggccauggacgagcuucauaacgaaauccuggaguuggaugaaaagguugacgaccuaagagcagauacgauuucgucucaaauagagcuggccgugcuccuguccaaugaaggcaucauuaacucagaggacgagcaccuucuggcuuuggaaaggaaacucaagaagaugcugggaccuagugcggucgagaucggcaauggguguuucgaaacaaaacauaagugcaaccagaccugcuuagaucggaucgcagccggaacuuuugacgcuggugaguucagccugcccaccuuugauucccuaaauauuacagccgcaucucucaacgacgauggccuggacaaucacaccauacuuuuguauuacagcacugccgcuucaagucuggccgugacacucaugaucgcaauuuucguaguuuauauggugucccgugauaacgucagcuguucuaucugccuguga

SEQ ID NO: 156314 - RNA, 1758 nt, Artificial Sequence
  derived and/or modified CDS sequence (opt3) from hemagglutinin__InfluenzaB__AHZ36961
augaaggccaucauugugcugcucauggucguuaccagcaacgcugacagaauaugcacaggcaucacuuccucuaauucaccccacgugguaaaaacggcaacccagggggaggugaacgucacaggagugauuccucuuacuaccacaccaaccaagagucauuucgccaaucugaaagguacugaaacaaggggcaaguuguguccgaaaugcuuaaacuguaccgaucuggacguugcgcuagggcggcccaagugcacgggaaagaucccuagcgcucgcguguccauucuccacgagguccgaccagugacuucuggcuguuuucccaucaugcaugaucguaccaaaauaagacaacugccuaaucuucugagggguuacgaacacauccgguugucgacacauaacguaauuaaugccgagaacgcaccagggggacccuauaagaucggcacuucaggcagcugcccuaauguuaccaacgggaauggauucuuugccacaauggcuugggcagugccgaaaaacgacaagaauaaaaccgccacgaacccacucacuauugaaguccccuacaucuguacagagggugaggaucagauaaccguguggggcuuccacagugacaaugaaacucagauggcuaagcuguauggggauuccaagccucagaaauuuacaucuagcgccaacggagugaccacgcacuacgucucccaaauuggcgguuucccaaaccagaccgaggacgggggacugccccagucaggccgcaucguuguggauuauaugguacagaagaguggcaaaacagggacuauuaccuaccaaagaggaauccucuuaccucagaagguguggugcgcgagcgguggcucuaaagucaucaaggggucccugccacuuauuggagaagcagacuguuugcaugagaaauauggcggucugaauaagucaaagcccuacuacacaggggagcacgccaaagcuauaggcaacugcccgaucugggugaagacuccucuaaaacucgccaauggaaccaaguauaggcccccagcaaaacugcuuaaggaacggggcuuuuucggggcuauugccggauuucuggaggguggcugggaagggaugaucgcgggauggcauggcuacacaagccacggugcccacgggguugcaguggcugccgauuugaagaguacccaggaggcuauaaacaaaauuacuaagaaucucaacucucuguccgaauuagaggucaaaaaucugcagcgccucagcggcgccauggacgagcuucauaacgaaauccuggaguuggaugaaaagguggacgaccuacgagcagauacgaucucgucucaaauugagcuggccguacuccuguccaaugaaggaaucauuaacucagaggacgagcaccuucuggcuuuggaaagaaaacucaagaagaugcugggcccuagugcgguugagauagggaauggauguuucgaaacaaaacauaagugcaaccagaccugcuuagauaggaucgcagccgguacuuuugacgcuggcgaguucagccugcccaccuuugauucccuaaauauuacagccgcaucucucaacgacgaugggcuggacaaucacaccauccuuuuguauuacagcacugccgcuucaagucuggccgugacacucaugaucgcaauuuucgucguguauauggucucccgggauaacgugagcuguucuauaugccuguga

SEQ ID NO: 156315 - RNA, 1758 nt, Artificial Sequence; identical to SEQ ID NO: 154731
  derived and/or modified CDS sequence (opt3) from hemagglutinin__InfluenzaB__AHZ36972

SEQ ID NO: 156316 - RNA, 1758 nt, Artificial Sequence
  derived and/or modified CDS sequence (opt3) from hemagglutinin__InfluenzaB__AHZ36983
augaaggccaucauugugcugcucauggucguuaccagcaacgcugacagaauaugcacaggcaucacuuccucuaauucaccccacauugugaaaacggcaacccagggggagguaaacgugacaggagucaucccucuuacuaccacaccaaccaagagucauuucgccaaucugaaagguacugaaacaaggggcaaguuguguccgaaaugcuuaaacuguaccgaucuggacguggcgcuagggcggcccaagugcacgggaaagauuccuagcgcucgcguuuccauccuccacgaggugcgaccagucacuucuggcuguuuucccauaaugcaugaucguaccaaaaucagacaacugccuaaucuucugagggguuacgaacacauucgguugucgacacauaacgugaucaaugccgagaacgcaccagggggacccuauaagauuggcacuucaggcagcugcccuaauaucaccaacgggaauggauucuuugccacaauggcuugggcaguaccgaaaaacgacaagaauaaaaccgccacgaacccacucacuauagaaguucccuacauuuguacagagggugaggaucagaucaccguguggggcuuccacagugacaaugaaacucagauggcuaagcuguauggggauuccaagccucagaaauuuacaucuagcgccaacggagucaccgcgcacuacgugucccaaauuggcgguuucccaaaccagacggaggacgggggacugccccagucaggccgcaucguggucgauuauaugguucagaagaguggcaaaaccgggacaaucacuuaccaaagagguauucucuuaccucagaagguguggugcgcaagcggaaggucuaaaguaauaaagggcucccugccacuuaucggggaagccgacuguuugcaugagaaauauggaggccugaauaagucaaagcccuacuacaccggugagcacgcuaaagccauugggaacugcccgaucugggugaagacaccucuaaaacucgcaaauggcacuaaguaucggcccccagcuaaacugcuuaaggaacgcggauuuuucggcgccauagcgggguuucuggagggagguugggaaggcaugauugccggguggcauggauacaccagccacggcgcacacggugucgcuguggccgcugauuugaagaguacacaggaggccaucaacaaaaucaccaagaaucucaacucucuguccgaauuagagguuaaaaaucugcagcgacucagcggggcaauggacgagcuucauaacgaaauucuggaguuggaugaaaagguggacgaccuaagagccgauacuaucucgucucaaauugagcuggcuguccuccuguccaaugaaggcauaaucaacucagaggacgagcaccuucuggcguuggaaaggaaacucaagaagaugcugggaccuagugcaguggagauuggcaauggguguuucgaaacgaaacauaagugcaaccagacaugcuuagaucggaucgccgcuggaaccuuugacgccggugaguucagccugcccacuuuugauucccuaaauaucaccgcagccucucucaacgacgauggccuggacaaucacacaauucuuuuguauuacagcaccgcugccucaagucuggcaguaacucucaugauagcgaucuucguuguguauauggucucccgugauaacgugagcuguucuauuugccuguga

SEQ ID NO: 156317 - RNA, 1758 nt, Artificial Sequence
  derived and/or modified CDS sequence (opt3) from hemagglutinin__InfluenzaB__AHZ37005
augaaggccaucauugugcugcucauggucguuaccagcaacgcugacagaauaugcacaggcaucacuuccucuaauucaccccacgugguaaaaacggcaacccagggggaagugaacgucacaggagugauuccucuuacuaccacaccaaccaagagucauuucgccaaucugaaagguacugaaacaaggggcaaguuguguccgaaaugccccaacuguaccgauuuagacguugcgcuggggcggccuaagugcacgggaaagaucccaagcgcucgcguguccauucuacacgagguccgacccgugacuucuggcuguuuuccuaucaugcaugaucguaccaaaauaagacaacucccaaaucugcuuagggguuacgaacacauccggcugucgacacauaacguaauuaaugccgagucagcacccgggggaccuuauaagaucggcacuagcggcaguugcccaaacguuaccaaugggaacggauucuuugccacaauggcuugggcagugccgaaaaaugacaagaacaaaaccgccacggaucccuugacuauugaagucccuuacaucuguacagaggaggaagaccagauaaccgugugggguuuccacuccgauaaugagacucagauggcuaagcucuauggcgacucuaagccacagaaauuuacaagcuccgccaacggggugaccacgcacuacgucucacaaauuggaggcuuccccaaucagaccgaagauggugggcugccucagaguggacgcaucguuguggacuauaugguacaaaagagcggcaaaacaggcacuauuaccuaccagagagggauccugcucccacagaagguguggugcgcgucuggaagguccaaagucaucaaggguucauuaccccugauuggcgaggcagauugucuucaugagaaauaugggggauugaacaagagcaagccguacuacacaggcgaacacgccaaagcuauagguaacugcccuaucugggugaagacuccccugaaacuagccaaugggaccaaguaucggccuccagcaaaacuccugaaggagcgcggcuuuuucggagcuauugccggcuuucuugaagggggaugggaggguaugaucgcgggcuggcauggguacacaagucacggagcccacggcguugcaguggcugccgaccugaagucuacccaggaagcuauaaacaaaauuacuaagaauuugaacucccucagcgagcuggaggucaaaaauuuacagcgacugucgggugccauggaugaacuccauaacgagauccuugaacuggacgagaagguggacgauuugagagcagacacgaucucuucccaaauugaacuagccguacugcucucaaaugaggggaucauuaacagugaggaugaacaucugcuugcucuggagaggaaauugaagaagaugcucggccccagcgcgguugaaauaggaaauggcuguuucgagacaaaacacaagugcaaccagaccugccuggaccggaucgcagccgggacuuuugaugcuggagaguucuccuuaccaaccuuugacucucugaauauuacagccgcaagccuaaacgaugacggucucgauaaucacaccauccugcuuuauuacucaacugccgcuaguuccuuggccgugacacugaugaucgcaauuuucgucguguauauggucagccgugacaacgugucuuguucaauaugccucuga

SEQ ID NO: 156318 - RNA, 1758 nt, Artificial Sequence; identical to SEQ ID NO: 154693
  derived and/or modified CDS sequence (opt3) from hemagglutinin__InfluenzaB__AHZ37016

SEQ ID NO: 156319 - RNA, 1758 nt, Artificial Sequence
  derived and/or modified CDS sequence (opt3) from hemagglutinin__InfluenzaB__AHZ37027
augaaggccaucauugugcugcucauggucguuaccagcaacgcugacagaauaugcacaggcaucacuuccucuaauucaccccacgugguaaaaacggcaacccagggggaggugaacgucacaggagugauuccucuuacuaccacaccaaccaagagucauuucgccaaucugaaagguacugaaacaaggggcaaguuguguccgaaaugcuuaaacuguaccgaucuggacguugcgcuagggcggcccaagugcacgggaaagaucccuagcgcucgcguguccauuauccacgagguccgaccagugacuucuggcuguuuucccauaaugcaugaucguaccaaaaucagacaacucccuaaucugcuuagggguuacgaacacauucggcugucgacacauaacguaaucaaugccgagaacgcaccagggggacccuauaagauuggcacuucaggcagcugcuugaauguuaccaacgggaauggauucuuugccacaauggcuugggcagugccuaaaaacgacaagaauaaaaccgccacgaacccacucacuaucgaagucccguacauauguacagagggugaggaucagauuaccguguggggcuuccacagugacaaugaaacucagauggcuaagcuguauggggauuccaagccccagaaauuuacaucuagcgccaacggagugaccacgcacuacgucucccaaaucggcgguuucccuaaccagaccgaggacgggggacugccacagucaggccgcauuguuguggauuauaugguacagaagaguggcaaaacagggacuaucaccuaccaaagaggaauccucuuaccccagaagguguggugcgcgagcgguaggucuaaagucauuaagggcucccugccucuuauaggggaagcagacuguuugcaugagaaauauggaggccugaauaagucaaagccauacuacacaggugagcacgccaaagcuaucgggaacugccccauuugggugaagacuccgcuaaaacucgccaauggcaccaaguaucggccucccgcaaaacugcuuaaggaacgcggauuuuucggcgcuaucgccggguuucuggagggagguugggaaggcaugauagcgggguggcauggauacacaagccacggcgcccacgguguugcaguggcugccgauuugaagaguacccaggaggcuauuaacaaaaucacuaagaaucucaacucucuguccgaauuagaggucaaaaaucugcagcgacucagcggggccauggacgagcuucauaacgaaauccuggaguuggaugaaaagguggacgaccuaagagcagauacgauuucgucucaaaucgagcuggccguacuccuguccaaugaaggcauuauaaacucagaggacgagcaccuucuggcuuuggaaaggaaacucaagaagaugcugggaccaagugcgguugagaucggcaauggguguuucgaaacaaaacauaagugcaaccagaccugcuuagaucggauugcagccggaacuuuugacgcuggugaguucagccugccuaccuuugauucccuaaauaucacagccgcaucucucaacgacgauggccuggacaaucacaccauccuuuuguauuacagcacugccgcuucaagucuggccgugacacucaugauugcaauauucgucguguauauggucucccgugauaacgugagcuguucuaucugccuguga

SEQ ID NO: 156320 - RNA, 1758 nt, Artificial Sequence; identical to SEQ ID NO: 154693
  derived and/or modified CDS sequence (opt3) from hemagglutinin__InfluenzaB__AHZ37038

SEQ ID NO: 156321 - RNA, 1758 nt, Artificial Sequence; identical to SEQ ID NO: 156207
  derived and/or modified CDS sequence (opt3) from hemagglutinin__InfluenzaB__AHZ37049

SEQ ID NO: 156322 - RNA, 1758 nt, Artificial Sequence; identical to SEQ ID NO: 156207
  derived and/or modified CDS sequence (opt3) from hemagglutinin__InfluenzaB__AHZ37060

SEQ ID NO: 156323 - RNA, 1758 nt, Artificial Sequence; identical to SEQ ID NO: 154693
  derived and/or modified CDS sequence (opt3) from hemagglutinin__InfluenzaB__AHZ37071

SEQ ID NO: 156324 - RNA, 1758 nt, Artificial Sequence; identical to SEQ ID NO: 154693
  derived and/or modified CDS sequence (opt3) from hemagglutinin__InfluenzaB__AHZ37082

SEQ ID NO: 156325 - RNA, 1758 nt, Artificial Sequence; identical to SEQ ID NO: 156207
  derived and/or modified CDS sequence (opt3) from hemagglutinin__InfluenzaB__AHZ37093

SEQ ID NO: 156326 - RNA, 1758 nt, Artificial Sequence
  derived and/or modified CDS sequence (opt3) from hemagglutinin__InfluenzaB__AHZ37104
augaaggccaucauugugcugcucauggucguuaccagcaacgcugacagaauaugcacaggcaucacuuccucuaauucaccccacgugguaaaaacggcaacccagggggaggugaacgucacaggagugauuccucuuacuaccacaccaaccaagagucauuucgccaaucugaaagguacugaaacaaggggcaaguuguguccgaaaugcuuaaacuguaccgaucuggacguugcgcuagggcggcccaagugcacgggaaagaucccuagcgcucgcguguccauucuccacgagguccgaccagugacuucuggcuguuuucccaucaugcaugaucguaccaaaauaagacaacugccuaaucuucugagggguuacgaacacauccgguugucgacacauaacguaauuaaugccgagaacgcaccagggggacccuauaagaucggcacuucaggcagcugcccuaauguuaccaacgggaauggauucuuugccacaauggcuugggcagugccgaaaaacgacaagaauaaaaccgccacgaacccacucacuauugaaguccccuacaucuguacagagggugaggaucagauaaccguguggggcuuccacagugacaaugaaacucagauggcuaagcuguauggggauuccaagccucagaaauuuacaucuagcgccaacggagugaccacgcacuacgucucccaaauuggcgguuucccaaaccagaccgaggacgggggacugccccagucaggccgcaucguuguggaucauaugguacagaagaguggcaaaacagggacuauuaccuaucaaagaggaauccucuuaccucagaagguguggugcgcgagcgguaggucuaaagucaucaagggcucccugccacuuauuggggaagcagacuguuugcacgagaaauacggaggccugaauaagucaaagcccuauuacacaggugagcaugccaaagcuauagggaacugcccgaucugggugaagacuccucuaaaacucgccaauggcaccaaguaccggcccccagcaaaacugcuuaaggaacgcggauuuuucggcgcuauugccggguuucuggagggagguugggaaggcaugaucgcgggguggcacggauauacaagccacggcgcccaugguguugcaguggcugccgauuugaagaguacccaggaggcuauaaacaaaauuacuaagaaucucaacucucuguccgaauuagaggucaaaaaucugcagcgacucagcggggccauggacgagcuucacaacgaaauccuggaguuggaugaaaagguggacgaccuaagagcagauacgaucucgucucaaauugagcuggccguacuccuguccaaugaaggcaucauuaacucagaggacgagcaucuucuggcuuuggaaaggaaacucaagaagaugcugggaccuagugcgguugagauaggcaauggguguuucgaaacaaaacacaagugcaaccagaccugcuuagaucggaucgcagccggaacuuuugacgcuggugaguucagccugcccaccuuugauucccuaaauauuacagccgcaucucucaacgacgauggccuggacaaucauaccauccuuuuguacuauagcacugccgcuucaagucuggccgugacacucaugaucgcaauuuucgucguguacauggucucccgugauaacgugagcuguucuauaugccuguga

SEQ ID NO: 156327 - RNA, 1758 nt, Artificial Sequence
  derived and/or modified CDS sequence (opt3) from hemagglutinin__InfluenzaB__AHZ41770
augaaggccaucauugugcugcucauggucguuaccagcaacgcugacagaauaugcacaggcaucacuuccucuaauucaccccacauugugaaaacggcaacccagggggaaguaaacgugacaggagucaucccucuuacuaccacaccaaccaagagucauuucgccaaucugaaagguacugaaacaaggggcaaguuguguccgaaaugcuuaaacuguaccgaucuggacguggcgcuagggcggcccaagugcacgggaaagauuccuagcgcucgcguuuccauccuccacgaggugcgaccagucacuucuggcuguuuucccauaaugcaugaucguaccaaaaucagacaacugccuaaucuucugagggguuacgaacacauucgguugucgacacauaacgugaucaaugccgagaacgcaccagggggacccuauaagauuggcacuucaggcagcugcccuaauaucaccaacgggaauggauucuuugccacaauggcuugggcaguaccgaaaaacgacaagaauaaaaccgccauaaacccacucacgauugaaguucccuacaucuguacugagggugaggaucagauuacaguguggggcuuccacagugacaaugaaacccagauggcuaagcuguauggggauuccgagccucagaaguuuacuucuagcgccaacggagucacaacccacuacgugucccaaaucggcgguuucccaaaccagacggaagacgggggacugccccagucaggccgcaucguggucgauuauaugguucagaaaaguggcaagaccgggacaauuacuuaccaaagaggaauacucuuaccucagaaaguguggugcgcgagcgguaggucuaagguaaucaaaggcucccugccacuuauuggggaggcagacuguuugcaugagaaguauggaggccugaauaaaucaaagcccuacuacaccggugaacacgccaaggcuaucgggaacugcccgauaugggugaaaacaccucuaaagcucgccaauggcacuaaauaucggcccccagcaaagcugcuuaaagagcgcggauuuuucggcgcuauugccggguuucuggaaggagguugggagggcaugaucgcgggguggcauggauacaccagccacggcgcccacggugucgcaguggcugccgauuugaagaguacacaggaagcuaucaacaagauuaccaaaaaucucaacucucuguccgaguuagagguuaagaaucugcagcgacucagcggggccauggacgaacuucauaacgagauccuggaauuggaugagaaaguggacgaccuaagagcagauacuauuucgucucaaauagaacuggccguccuccuguccaaugagggcaucauuaacucagaggacgaacaccuucuggcuuuggagaggaagcucaaaaagaugcugggaccuagugcgguggaaaucggcaauggguguuucgagacgaagcauaaaugcaaccagacaugcuuagaucggaucgcagccggaaccuuugacgcuggugaguucagccugcccacuuuugauucccuaaauauuaccgccgcaucucucaacgacgauggccuggacaaucacacaauacuuuuguauuacagcaccgccgcuucaagucuggccguaacucucaugaucgcaauuuucguuguguauauggucucccgugauaacgugagcuguucuaucugccuguga

SEQ ID NO: 156328 - RNA, 1758 nt, Artificial Sequence; identical to SEQ ID NO: 154731
  derived and/or modified CDS sequence (opt3) from hemagglutinin__InfluenzaB__AHZ41781

SEQ ID NO: 156329 - RNA, 1758 nt, Artificial Sequence; identical to SEQ ID NO: 154731
  derived and/or modified CDS sequence (opt3) from hemagglutinin__InfluenzaB__AHZ41792

SEQ ID NO: 156330 - RNA, 1758 nt, Artificial Sequence; identical to SEQ ID NO: 154731
  derived and/or modified CDS sequence (opt3) from hemagglutinin__InfluenzaB__AHZ41803

SEQ ID NO: 156331 - RNA, 1758 nt, Artificial Sequence
  derived and/or modified CDS sequence (opt3) from hemagglutinin__InfluenzaB__AHZ41814
augaaggccaucauugugcugcucauggucguuaccagcaacgcugacagaauaugcacaggcaucacuuccucuaauucaccccacgugguaaaaacggcaacccagggggaggugaacgucacaggagugauuccucuuacuaccacaccaaccaagagucauuucgccaaucugaaagguacugaaacaaggggcaaguuguguccgaaaugccccaacuguaccgauuuagacguugcgcuggggcggccuaagugcacgggaaagaucccaagcgcucgcguguccauucuacacgagguccgacccgugacuucuggcuguuuuccuaucaugcaugaucguaccaaaauaagacaacucccaaaucugcuuagggguuacgaacacauccggcugucgacacauaacguaauuaaugccgagaacgcacccgggggaccuuauaagaucggcacuucaggcagcugcccaaauguuaccaacgggaauggauucuuugccacaauggcuugggcagugccgaaaaacgacaagaauaaaaccgccacgaaccccuugacuauugaagucccuuacaucuguacagagggugaggaucagauaaccguguggggcuuccacagugacaaugaaacucagauggcuaagcucuauggggauuccaagccacagaaauuuacaucuagcgccaacggagugaccacgcacuacgucucccaaauuggcgguuuccccaaccagaccgaggacgggggacugccucagucaggccgcaucguuguggauuauaugguacagaagaguggcaaaacagggacugugaccuaccaaagagguauucugcucccacagaaggucuggugcgcgagcggaaggucuaaagugaucaagggcuccuuaccccugaucggggaagcagacugucuucaugagaaauauggaggcuugaauaagucaaagccguacuacacaggugagcacgccaaagcuauugggaacugcccuauauggguuaagacuccccugaaacuagccaauggcaccaaguaucggccuccagcaaaacuccugaaggaacgcggauuuuucggcgcuaucgccggguuucuugagggagguugggaaggcaugauugcgggguggcauggauacacaagccacggcgcccacgguguggcagucgcugccgaucugaagaguacccaggaggcuaucaacaaaauaacuaagaauuugaacucucucuccgaacuggaggugaaaaauuuacagcgacugagcggggccauggacgagcuccauaacgaaauucuugagcuggaugaaaagguagacgacuugagagcagauacgaucucgucucaaaucgagcuagccguucugcucuccaaugaaggcauuaucaacucagaggacgagcaucugcuugcucuggaaaggaaauugaagaagaugcucggacccagugcgguggagauuggcaauggguguuucgaaacaaaacacaagugcaaccagaccugccuggaucggauagcagccggaacuuuugacgcuggugaguucagcuuaccaaccuuugauucccugaauaucacagccgcaucucuaaacgacgauggccucgacaaucacaccauucugcuuuauuacagcacugccgcuucaaguuuggccgucacacugaugaucgcaaucuucguggucuauauggugucccgugauaacguuagcuguucuauuugccucuga

SEQ ID NO: 156332 - RNA, 1758 nt, Artificial Sequence; identical to SEQ ID NO: 154731
  derived and/or modified CDS sequence (opt3) from hemagglutinin__InfluenzaB__AHZ41825

SEQ ID NO: 156333 - RNA, 1758 nt, Artificial Sequence; identical to SEQ ID NO: 154731
  derived and/or modified CDS sequence (opt3) from hemagglutinin__InfluenzaB__AHZ41836

SEQ ID NO: 156334 - RNA, 1758 nt, Artificial Sequence; identical to SEQ ID NO: 154731
  derived and/or modified CDS sequence (opt3) from hemagglutinin__InfluenzaB__AHZ41847

SEQ ID NO: 156335 - RNA, 1755 nt, Artificial Sequence; identical to SEQ ID NO: 156179
  derived and/or modified CDS sequence (opt3) from hemagglutinin__InfluenzaB__AHZ41858

SEQ ID NO: 156336 - RNA, 1758 nt, Artificial Sequence; identical to SEQ ID NO: 156204
  derived and/or modified CDS sequence (opt3) from hemagglutinin__InfluenzaB__AHZ41869

SEQ ID NO: 156337 - RNA, 1755 nt, Artificial Sequence
  derived and/or modified CDS sequence (opt3) from hemagglutinin__InfluenzaB__AIC73844
augaaggccaucauugugcugcucauggucguuaccagcaacgcugacagaauaugcacaggcaucacuuccucuaauucaccccacgugguaaaaacggcaacccagggggaagugaacgucacaggagugauuccucuuacuaccacaccaaccaagaguuacuucgccaaucugaaagguacuaggacacggggcaaguuguguccggauugcuuaaacuguaccgaccuggauguugcgcuagggcgccccaugugcgugggaacgacuccuagcgcuaaagccuccauccuccaugaaguccgaccagugaccucuggcuguuuucccauuaugcacgaccguacaaagaucagacaacugccuaaucuucugagggguuaugagaagauacgguugucgacucagaacguaaucgaugcagaaaaagccccagggggacccuaccgccucggcaccucaggcagcugcccuaaugcuacaaguaagauuggguucuuugcaaccauggccugggcuguuccaaaagacaacuauaagaaugccacgaacccgcagacuguggagguccccuacaucuguacagaaggagaggaucagauuaccgugugggguuuccauuccgacaauaaaacucaaaugaagucucuguauggcgauagcaacccucagaaguuuacauccucagcgaauggggugaccacgcacuacgucagucagaucggagacuucccagaucagaccgaggacggcggucugccccaaagcgggagaauaguuguggauuauaugaugcagaaaccuggaaagacaggcacuauuguauaccagaggggcgugcucuuaccacagaaagucuggugcgcaucugggcgguccaaggugaucaaaggaucacugccccuuauuggugaagccgacuguuugcaugaggaauacggcgggcugaacaagagcaaaccguauuacaccggaaagcacgcuaaggccaucggcaauugcccuaucuggguuaaaacaccccuaaagcucgcaaacgguacuaaauaucgcccuccagcuaagcugcuuaaagagcgaggguuuuucggcgccauugcgggauuucuggagggcgggugggaaggaaugauagccgguuggcacggcuacaccagucauggggcacacggaguggcugucgccgcugacuugaagucuacacaagaggccaucaacaagauuaccaaaaaucucaacucccugagcgaauuagaggugaagaaucugcagagacucucgggcgcaauggaugaacuucauaacgagauccuggaguuggacgaaaaaguagaugaccuaagggccgauacuauaucuucccagauugagcuggcuguucuccugucaaaugaagguaucaucaacagugaggacgaacaccuucuggcguuggagcggaagcucaaaaagaugcuggggcccagcgcaguggauauuggcaauggauguuucgagacgaagcacaaaugcaaccaaacaugcuuagaccguaucgccgcuggcaccuuuaaugccggggaguucucccugccaacuuuugauucucuaaacauuaccgcagccagccucaaugacgauggacuggacaaccauacaauacuuuuguauuacucaaccgcugccaguucccuggcagucacucucaugcuggcgaucuucauuguguauauggucagccgcgacaaugugucuuguucaaucugccuuuga

SEQ ID NO: 156338 - RNA, 1758 nt, Artificial Sequence; identical to SEQ ID NO: 155913
  derived and/or modified CDS sequence (opt3) from hemagglutinin__InfluenzaB__AIC73845

SEQ ID NO: 156339 - RNA, 1758 nt, Artificial Sequence; identical to SEQ ID NO: 155913
  derived and/or modified CDS sequence (opt3) from hemagglutinin__InfluenzaB__AIC73846

SEQ ID NO: 156340 - RNA, 1758 nt, Artificial Sequence
  derived and/or modified CDS sequence (opt3) from hemagglutinin__InfluenzaB__AIC73847
augaaggccaucauugugcugcucauggucguuaccagcaacgcugacagaauaugcacaggcaucacuuccucuaauucaccccacgugguaaaaacggcaacccagggggaggugaacgucacaggagugauuccucuuacuaccacaccaaccaagagucauuucgccaaucugaaagguacugaaacaaggggcaaguuguguccgaaaugcuuagauuguaccgaccuggauguugcgcuagggcggcccaagugcacgggaaagaucccuagcgcucgcguguccauucuccacgagguccgaccagugacuucuggcuguuuucccaucaugcaugaccguaccaaaauaagacaacugccuaaccuucugagggguuacgaacacauccgguugucgacacauaauguaauuaacgccgaggaugcaccagggggacccuauaagaucggcacuucaggcagcugcccuaauguuaccaacgggaauggauucuuugccacaauggcuugggcagugccgaaaaacgacaagaauaaaaccgccacgaacccacucacuauugaaguccccuacaucuguacagagggugaggaucagauaaccguguggggcuuccacagugacaaugaaacucagauggcuaagcuguauggggauuccaagccucagaaauuuacaucuagcgccaacggagugaccacgcacuacgucucccaaauuggcgguuucccaaaucagaccgaggacgggggacugccccagucaggccgcaucguuguggauuauaugguacagaagaguggcaaaacagggacuauuaccuaccaaagaggaauccucuuaccucagaagguguggugcgcgagcgguaggucuaaagucaucaagggcucccugccacuuauuggggaagcagacuguuugcaugagaaauauggaggccugaacaagucaaagcccuacuacacaggugagcacgccaaagcuauagggaacugcccgaucugggugaagacuccucuaaaacucgccaauggcaccaaguaucggcccccagcaaaacugcuuaaggaacgcggauuuuucggcgcuauugccggguuucuggagggagguugggaaggcaugaucgcgggguggcauggauacacaagccacggcgcccacgguguugcaguggcugccgauuugaagaguacccaggaggcuauaaacaaaauuacuaagaaucucaacucucuguccgaauuagaggucaaaaaucugcagcgacucagcggggccauggacgagcuucauaacgaaauccuggaguuggacgaaaagguggaugaccuaagagcagauacgaucucgucucaaauugagcuggccguacuccuguccaaugaaggcaucauuaacucagaggacgagcaccuucuggcuuuggaaaggaaacucaagaagaugcugggaccuagugcgguugagauaggcaauggguguuucgaaacaaaacauaagugcaaccagaccugcuuagaucggaucgcagccggaacuuuugacgcuggugaguucagccugcccaccuuugauucccuaaauauuacagccgcaucucucaacgacgauggccuggacaaucacaccauccuuuuguauuacagcacugccgcuucaagucuggccgugacacucaugaucgcaauuuucgucguguauauggucucccgugauaacgugagcuguucuauaugccuguga

SEQ ID NO: 156341 - RNA, 1758 nt, Artificial Sequence; identical to SEQ ID NO: 155913
  derived and/or modified CDS sequence (opt3) from hemagglutinin__InfluenzaB__AIC73848

SEQ ID NO: 156342 - RNA, 1755 nt, Artificial Sequence; identical to SEQ ID NO: 156177
  derived and/or modified CDS sequence (opt3) from hemagglutinin__InfluenzaB__AIC73849

SEQ ID NO: 156343 - RNA, 1758 nt, Artificial Sequence
  derived and/or modified CDS sequence (opt3) from hemagglutinin__InfluenzaB__AIC73850
augaaggccaucauugugcugcucauggucgcuaccagcaacgcagacagaauaugcacaggcaucacuuccucuaauucaccccacguugugaaaacggccacccagggggagguaaacgugacaggagucauuccucuuacuaccacaccaaccaagagucauuucgcgaaucugaaagguacugaaacaaggggcaaguuguguccgaaaugcuuaaacuguaccgaucuggacguggcucuagggcggcccaagugcacgggaaagaucccuagcgcccgcguuuccauucuccacgaggugcgaccagucacuucuggcuguuuucccaucaugcaugaucguaccaaaauaagacaacugccuaaucuucugagggguuacgaacacauccgguugucgacacauaacgugauuaaugcagaggacgccccagggggacccuauaagaucggcacuucaggcagcugcccuaacguaaccaaugggaacggauucuuugcuacaauggcaugggccguuccgaaaaaugauaagaacaaaaccgcuacgaauccacucacuauugaagugcccuacaucuguacagagggugaggaccagauaaccgucuggggcuuccacagugauaacgaaacucagauggccaagcuguauggggacuccaagccucagaaauuuacaucuagcgcgaauggagugaccacgcacuacgugucccaaauuggcgguuucccaaaccagaccgaggaugggggacugccccagucaggccgcaucgucguugacuauauggugcagaagaguggcaaaacagggacuauuaccuaccaaagaggaauccucuuaccucagaagguauggugcgcaagcgguaggucuaaagugaucaagggcucccugccacuuauuggggaagccgauuguuugcaugagaaauauggaggccugaacaagucaaagcccuacuacacaggugagcacgcuaaagccauagggaauugcccgaucugggucaagacuccucuaaaacucgcaaacggcaccaaguaucggcccccagcuaaacugcuuaaggaacgcggauuuuucggcgccauugcgggguuucuggagggagguugggaaggcaugaucgccggguggcauggauacacaagccacggcgcacacgguguggcuguugccgcugacuugaagaguacccaggaggccauaaauaaaauuacuaagaaccucaauucucuguccgaauuagaggugaaaaaccugcagcgacucagcggggcaauggaugagcuucauaaugaaauccuggaguuggacgaaaaggucgacgaucuaagagccgacacgaucucgucucaaauugagcuggcugugcuccuguccaacgaaggcaucauuaauucagaggaugagcaccuucuggcguuggaaaggaaacucaagaagaugcugggaccuagugcaguagagauaggcaacggguguuucgaaacaaaacauaagugcaaucagaccugcuuagaccggaucgccgcuggaacuuuugaugccggugaguucagccugcccaccuuugacucccuaaacauuacagcagccucucucaaugaugacggccuggauaaccacaccauccuuuuguauuacagcacugcugccucaagucuggcaguuacacucaugaucgcgauuuucguggucuauauggugucccgugacaaugucagcuguucuauaugccuguga

SEQ ID NO: 156344 - RNA, 1758 nt, Artificial Sequence; identical to SEQ ID NO: 154935
  derived and/or modified CDS sequence (opt3) from hemagglutinin__InfluenzaB__AIC73851

SEQ ID NO: 156345 - RNA, 1755 nt, Artificial Sequence; identical to SEQ ID NO: 156337
  derived and/or modified CDS sequence (opt3) from hemagglutinin__InfluenzaB__AIC73852

SEQ ID NO: 156346 - RNA, 1755 nt, Artificial Sequence; identical to SEQ ID NO: 156337
  derived and/or modified CDS sequence (opt3) from hemagglutinin__InfluenzaB__AIC73853

SEQ ID NO: 156347 - RNA, 1758 nt, Artificial Sequence
  derived and/or modified CDS sequence (opt3) from hemagglutinin__InfluenzaB__AIC73855
augaaggccaucauugugcugcucauggucguuaccagcaacgcugacagaauaugcacaggcaucacuuccucuaauucaccccacgugguaaaaacggcaacccagggggaggugaacgucacaggagugauuccucuuacuaccacaccaaccaagagucauuucgccaaucugaaagguacugaaacaaggggcaaguuguguccgaaaugcuuaaacuguaccgaucuggacguugcgcuagggcggcccaagugcacgggaaagaucccuagcgcucgcguguccauucuccacgagguccgaccagugacuucuggcuguuuucccaucaugcaugaucguaccaaaauaagacaacugccuaaucuucugagggguuacgaacacauccgguugucgacacauaacguaauuaaugccgagaacgcaccagggggacccuauaucauuggcacuucaggcagcugcccuaauguuaccaacgggaauggauucuuugccacaauggcuugggcagugccaaagaacgacaaaaauaagaccgccacgaacccgcucacuaucgaaguccccuacauauguacagagggugaggaucagauuaccguguggggcuuccacagugacaaugaaacucagauggcuaaacuguauggggauuccaacccucagaaguuuacaucuagcgccaacggagugaccacgcacuacgucucccaaaucggcgguuucccaaaucagaccgaggacgggggacugccccagucaggccgcauuguuguggauuauaugguacagaagaguggcaaaacagggacuaucaccuaccaaagaggaauccucuuaccucagaagguguggugcgcgagcgguaggucuaaagucauuaagggcucccugccacuuauaggggaagcagacuguuugcaugagaaauauggaggccugaacaagucaaaacccuacuacacaggugagcacgccaaggcuaucgggaauugcccgauuugggugaagacuccucuaaaacucgccaacggcaccaaguaucggcccccagcaaaacugcuuaaggaacgcggauuuuucggcgcuaucgccggguuucuggagggagguugggaaggcaugauagcgggguggcauggauacacaagccacggcgcccacgguguugcaguggcugccgauuugaaaaguacccaggaggcuauuaauaagaucacuaagaaccucaauucucuguccgaauuagaggucaaaaaccugcagcgacucagcggggccauggacgagcuucauaaugaaauccuggaguuggaugaaaagguggacgaccuaagagcagauacgauuucgucucaaaucgagcuggccguacuccuguccaacgaaggcauuauaaauucagaggacgagcaccuucuggcuuuggaaaggaaacucaagaaaaugcugggaccuagugcgguugagaucggcaacggguguuucgaaacaaagcauaagugcaaucagaccugcuuagaucggauugcagccggaacuuuugacgcuggugaguucagccugcccaccuuugauucccuaaacaucacagccgcaucucucaaugacgauggccuggacaaccacaccauccuuuuguauuacagcacugccgcuucaagucuggccgugacacucaugauugcaauauucgucguguauauggucucccgugauaacgugagcuguucuaucugccuguga

SEQ ID NO: 156348 - RNA, 1758 nt, Artificial Sequence; identical to SEQ ID NO: 155913
  derived and/or modified CDS sequence (opt3) from hemagglutinin__InfluenzaB__AIC73856

SEQ ID NO: 156349 - RNA, 1758 nt, Artificial Sequence; identical to SEQ ID NO: 155913
  derived and/or modified CDS sequence (opt3) from hemagglutinin__InfluenzaB__AIC73857

SEQ ID NO: 156350 - RNA, 1758 nt, Artificial Sequence; identical to SEQ ID NO: 155913
  derived and/or modified CDS sequence (opt3) from hemagglutinin__InfluenzaB__AIC73859

SEQ ID NO: 156351 - RNA, 1758 nt, Artificial Sequence
  derived and/or modified CDS sequence (opt3) from hemagglutinin__InfluenzaB__AIC73860
augaaggccaucauugugcugcucauggucguuaccagcaacgcugacagaauaugcacaggcaucacuuccucuaauucaccccacgugguaaaaacggcaacccagggggaggugaacgucacaggagugauuccucuuacuaccacaccaaccaagagucauuucgccaaucugaaagguacugaaacaaggggcaaguuguguccgaaaugcuuaaacuguaccgaucuggacguugcgcuagggcggcccaagugcacgggaaagaucccuagcgcucgcguguccauucuccacgagguccgaccagugacuucuggcuguuuucccaucaugcaugaucguaccaaaauaagacaacugccuaaucuucugagggguuacgaacacauccgguugucgacacauaacguaauuaaugccgagaacgcaccagggggacccuauaagaucggcacuucaggcagcugcccuaauguuaccaacgggaauggauucuuugccacaauggcuugggcagugccgaaaaacgacaagaauaaaaccgccacgaacccacucacuauugaaguccccuacaucuguacagagggugaggaucagauaaccguguggggcuuccacagugacaaugaaacucagauggcuaagcuguauggggauuccaacccucagaaguuuacaucuagcgccaacggagugaccacgcacuacgucucccaaauuggcgguuucccaaaucagaccgaggacgggggacugccccagucaggccgcaucguuguggauuauaugguacagaaaaguggcaagacagggacuauuaccuaccaaagaggaauccucuuaccucagaaaguguggugcgcgagcgguaggucuaaggucaucaaaggcucccugccacuuauuggggaagcagacuguuugcaugagaaguauggaggccugaacaaaucaaagcccuacuacacaggugagcacgccaaggcuauagggaauugcccgaucugggugaaaacuccucuaaagcucgccaacggcaccaaauaucggcccccagcaaagcugcuuaaagaacgcggauuuuucggcgcuauugccggguuucuggagggagguugggaaggcaugaucgcgggguggcauggauacacaagccacggcgcccacgguguugcaguggcugccgauuugaagaguacccaggaggcuauaaauaagauuacuaaaaaccucaauucucuguccgaauuagaggucaagaaccugcagcgacucagcggggccauggacgagcuucauaaugaaauccuggaguuggaugaaaaaguggacgaccuaagagcagauacgaugucgucucaaaucgagcuggccguacuccuguccaacgaaggcauuaucaauucagaggacgagcaccuucuggcuuuggaaaggaagcucaaaaagaugcugggaccuagugcgguugagauuggcaacggguguuucgaaacaaagcauaaaugcaaucagaccugcuuagaucggauagcagccggaacuuuugacgcuggugaguucagccugcccaccuuugauucccuaaacaucacagccgcaucucucaaugacgauggccuggacaaccacaccauucuuuuguauuacagcacugccgcuucaagucuggccgugacacucaugaucgcaaucuucgucguguauauggucucccgugauaacgugagcuguucuauuugccuguga

SEQ ID NO: 156352 - RNA, 1758 nt, Artificial Sequence
  derived and/or modified CDS sequence (opt3) from hemagglutinin__InfluenzaB__AIC73861
augaaggccaucauugugcugcucauggucguuaccagcaacgcugacagaauaugcacaggcaucacuuccucuaauucaccccacgugguaaaaacggcaacccagggggaggugaacgucacaggagugauuccucuuacuaccacaccaaccaagagucauuucgccaaucugaaagguacugaaacaaggggcaaguuguguccgaaaugcuuaaacuguaccgaucuggacguugcgcuagggcggcccaagugcacgggaaagaucccuagcgcucgcguguccauucuccacgagguccgaccagugacuucuggcuguuuucccaucaugcaugaucguaccaaaauaagacaacugccuaaucuucugagggguuacgaacacauccgguugucgacacauaacguaauuaauacugagaacgccccagggggacccuauaagaucggcaccucaggcagcugcccuaauguuacaaacgggaauggauucuuugcaaccauggccugggcugugccgaaaaacgacaagaauaaaacggcaacuaacccacucacaauugaaguccccuacaucuguaccgagggugaggaucagauaacuguguggggcuuccacagugacaaugaaacacagauggccaagcuguauggggauuccaacccucagaaguuuaccucuagcgcuaacggagugacgauucacuacgucucccaaaucggcgguuucccaaaucagaccgaggacgggggacugccccagucaggccgcauuguuguggauuauaugguacagaaaaguggcaagacagggacuaucaccuaccaaagaggaauccucuuaccucagaaaguguggugcgccagcgguaggucuaaggucauuaaaggcucccugccacuuauaggggaagcggacuguuugcaugagaaguauggaggccugaacaaaucaaagcccuacuacacaggugagcacgcaaaggccaucgggaauugcccgauuugggugaaaacuccucuaaagcucgcuaacggcaccaaauaucggcccccagccaagcugcuuaaagaacgcggauuuuucggcgcaaucgcuggguuucuggagggagguugggaaggcaugauagccggguggcauggauacacaagccacggcgcgcacgguguugccguggcagcugauuugaagaguacccaggaggccauuaauaagaucacuaaaaaccucaauucucuguccgaauuagaggucaagaaccugcagcgacucagcggggcuauggacgagcuucauaaugaaauccuggaguuggaugaaaaaguggacgaccuaagagccgauacgauuucgucucaaaucgagcuggcaguacuccuguccaacgaaggcauuauaaauucagaggacgagcaccuucuggccuuggaaaggaagcucaaaaagaugcugggaccuagugcuguugagaucggcaacggguguuucgaaacaaagcauaaaugcaaucagaccugcuuagaucggauugcggcaggaacuuuugacgccggugaguucagccugcccaccuuugauucccuaaacaucacagcugccucucucaaugacgauggccuggacaaccacaccauccuuuuguauuacagcacugcagccucaagucuggcugugacacucaugauugccauauucgucguguauauggucucccgugauaacgugagcuguucuaucugccuguga

SEQ ID NO: 156353 - RNA, 1758 nt, Artificial Sequence; identical to SEQ ID NO: 156351
  derived and/or modified CDS sequence (opt3) from hemagglutinin__InfluenzaB__AIC73862

SEQ ID NO: 156354 - RNA, 1758 nt, Artificial Sequence; identical to SEQ ID NO: 156351
  derived and/or modified CDS sequence (opt3) from hemagglutinin__InfluenzaB__AIC73863

SEQ ID NO: 156355 - RNA, 1758 nt, Artificial Sequence; identical to SEQ ID NO: 156351
  derived and/or modified CDS sequence (opt3) from hemagglutinin__InfluenzaB__AIC73864

SEQ ID NO: 156356 - RNA, 1755 nt, Artificial Sequence
  derived and/or modified CDS sequence (opt3) from hemagglutinin__InfluenzaB__AIC73865
augaaggccaucauugugcugcucauggucguuaccagcaacgcugacagaauaugcacaggcaucacuuccucuaauucaccccacgugguaaaaacggcaacccagggggaggugaacgucacaggagugauuccucuuacuaccacaccaaccaagaguuacuucgccaaucugaaagguacuaagacaaggggcaaauuguguccggauugcuuaaacuguaccgaccuggauguugcgcuagggcggcccaugugcgugggaacgacuccuagcgcuaaggccuccauccuccaugaaguccgcccagugaccucuggcuguuuucccauuaugcacgaccgaacaaagauccgucaacuggcaaaucuucugagagguuaugagaacauaagguugucgacucagaauguaaucgaugccgaaaaagcuccugggggaccauaccggcucggcaccucaggcagcugccccaacgcaacaaguaaguccggguucuuugccaccauggcuugggccguuccuaaagacaauaacaagaaugcgacgaacccacugacuguggaggucccguauauuugugcagaaggagaggaucagaucacagugugggguuuccauucugacaauaaaacccagaugaagaaccuguacggcgauagcaauccccaaaaguuuacuuccucagccaacggggugacaacccacuaugucagucagauuggaggcuucccugaccagcgcgaggauggugggcucccacagagcggaagaaucguuguggacuacaugaugcaaaaacccggcaagacgggcaccauaguauaucagcgcgggguguuacugccucagaaagucuggugcgcuucuggacgguccaaggugauuaaagguucacuuccauugaucggcgaagccgauugucugcaugagaaguacgggggacuaaacaaaagcaagcccuacuauacaggcgaacacgcaaaggcuauugguaauugcccgaucuggguuaaaacuccucucaagcuggccaacgggaccaaauacaggcccccagcgaagcugcugaaagagcgaggcuuuuucggagccaucgcaggcuuuuuggaagggggaugggaagguaugauugcuggcuggcacggguauacaagucauggagcccacggcguggcugucgccgcagaccucaagucuacucaggaggccauaaauaagaucaccaaaaaccuuaauuccuuaagcgaacuggaggugaagaaccuccaaagacuuucgggugcuauggacgaacugcauaaugagauuuuggagcuagaugaaaaaguagacgaucugagggcggacacaaucucuucccagauagagcucgcaguucugcuuucaaacgaagggauuaucaauagugaggaugaacaccuguuggcccucgagcggaagcugaaaaagauguuaggcccuagcgcuguggacaucggaaacggcuguuucgagaccaagcacaaaugcaaucagacuugccuggaucguauugccgcagggacguuuaacgccggagaguucucccuacccacauuugacucucucaauaucaccgcugccagccugaacgaugacggucuugauaaucauacuauuuugcuguacuauucaaccgcagcgaguucccucgcugucacacugaugcuugccauauucaucguguacauggucagccgcgacaacgugucuuguucaauuugccuguga

SEQ ID NO: 156357 - RNA, 1758 nt, Artificial Sequence
  derived and/or modified CDS sequence (opt3) from hemagglutinin__InfluenzaB__AIC73867
augaaggccaucauugugcugcucauggucguuaccagcaacgcugacagaauaugcacaggcaucacuuccucuaauucaccccacgugguaaaaacggcaacccagggggaggugaacgucacaggagugauuccucuuacuaccacaccaaccaagagucauuucgccaaucugaaagguacugaaacaaggggcaaguuguguccgaaaugcuuaaacuguaccgaucuggacguugcgcuagggcggcccaagugcacgggaaagaucccuagcgcucgcguguccauucuccacgagguccgaccagugacuucuggcuguuuucccaucaugcaugaucguaccaaaauaagacaacugccuaaucuucugagggguuacgaacacauccgguugucgacacauaacguaauugacgccgagaaugcaccagggggacccuauaagaucggcacuucaggcagcugcccuaacguuaccaaugggaacggauucuuugccacaauggcuugggcagugccgaaaaaugauaagaacaaaaccgccacgaauccacucacuauugaaguccccuacaucuguacagagggugaggaccagauaaccguguggggcuuccacagugauaacgaaacucagauggcuaagcuguauggggacuccaauccucagaaguuuacaucuagcgccaacggagugaccacgcacuacgucucccaaauuggcgguuucccaaaccagaccgaggaugggggacugccccagucaggccgcaucguuguggacuauaugguacagaaaaguggcaagacagggacuauuaccuaccaaagaggaauccucuuaccucagaaaguguggugcgcgagcgguaggucuaaggucaucaaaggcucccugccacuuauuggggaagcagauuguuugcaugagaaguauggaggccugaauaaaucaaagcccuacuacacaggugagcacgccaaggcuauagggaacugcccgaucugggugaaaacuccucuaaagcucgccaauggcaccaaauaucggcccccagcaaagcugcuuaaagaacgcggauuuuucggcgcuauugccggguuucuggagggagguugggaaggcaugaucgcgggguggcauggauacacaagccacggcgcccacgguguugcaguggcugccgacuugaagaguacccaggaggcuauaaacaagauuacuaaaaaucucaacucucuguccgaauuagaggucaagaaucugcagcgacucagcggggccauggaugagcuucauaacgaaauccuggaguuggacgaaaaaguggacgaucuaagagcagacacgaucucgucucaaauugagcuggccguacuccuguccaaugaaggcaucauuaacucagaggaugagcaccuucuggcuuuggaaaggaagcucaaaaagaugcugggaccuagugcgguugagauaggcaauggguguuucgaaacaaagcauaaaugcaaccagaccugcuuagaccggaucgcagccggaacuuuugaugcuggugaguucagccugcccaccuuugacucccuaaauauuacagccgcaucucucaacgaugacggccuggauaaucacaccauccuuuuguauuacagcacugccgcuucaagucuggccgugacacucaugaucgcaauuuucgucguguauauggucucccgugacaacgugagcuguucuauaugccuguga

SEQ ID NO: 156358 - RNA, 1758 nt, Artificial Sequence; identical to SEQ ID NO: 154935
  derived and/or modified CDS sequence (opt3) from hemagglutinin__InfluenzaB__AIC73868

SEQ ID NO: 156359 - RNA, 1758 nt, Artificial Sequence; identical to SEQ ID NO: 156351
  derived and/or modified CDS sequence (opt3) from hemagglutinin__InfluenzaB__AIC73869

SEQ ID NO: 156360 - RNA, 1758 nt, Artificial Sequence; identical to SEQ ID NO: 156351
  derived and/or modified CDS sequence (opt3) from hemagglutinin__InfluenzaB__AIC73870

SEQ ID NO: 156361 - RNA, 1758 nt, Artificial Sequence; identical to SEQ ID NO: 155913
  derived and/or modified CDS sequence (opt3) from hemagglutinin__InfluenzaB__AIC73871

SEQ ID NO: 156362 - RNA, 1755 nt, Artificial Sequence; identical to SEQ ID NO: 156337
  derived and/or modified CDS sequence (opt3) from hemagglutinin__InfluenzaB__AIC73872

SEQ ID NO: 156363 - RNA, 1755 nt, Artificial Sequence; identical to SEQ ID NO: 156177
  derived and/or modified CDS sequence (opt3) from hemagglutinin__InfluenzaB__AIC73873

SEQ ID NO: 156364 - RNA, 1755 nt, Artificial Sequence; identical to SEQ ID NO: 156337
  derived and/or modified CDS sequence (opt3) from hemagglutinin__InfluenzaB__AIC73874

SEQ ID NO: 156365 - RNA, 1755 nt, Artificial Sequence; identical to SEQ ID NO: 156356
  derived and/or modified CDS sequence (opt3) from hemagglutinin__InfluenzaB__AIC73875

SEQ ID NO: 156366 - RNA, 1755 nt, Artificial Sequence
  derived and/or modified CDS sequence (opt3) from hemagglutinin__InfluenzaB__AIC73876
augaaggccaucauugugcugcucauggucguuaccagcaacgcugacagaauaugcacaggcaucacuuccucuaauucaccccacgugguaaaaacggcaacccagggggaggugaacgucacaggagugauuccucuuacuaccacaccaaccaagaguuacuucgccaaucugaaagguacuaagacaaggggcaaauuguguccggauugcuuaaacuguaccgaccuggauguugcgcuagggcggcccaugugcgugggaacgacuccuagcgcuaaggccuccauccuccaugaaguccgcccagugaccucuggcuguuuucccauuaugcacgaccgaacaaagauccgucaacuggcaaaucuucugagagguuaugagaacauaagguugucgacucagaauguaaucgaugccgaaaaagcuccugggggaccauaccggcucggcaccucaggcagcugccccaacgcaacaaguaaguccggguucuuugccaccauggcuugggccguuccuaaagacaauaacaagaaugcgacgaacccacugacuguggaggucccguauauuugugcagaaggagaggaucagaucacagugugggguuuccauucugacaauaaaacccagaugaagaaccuguacggcgauagcaauccccaaaaguuuacuuccucagccaacggggugacaacccacuaugucagucagauuggaggcuucccugaccagcgcgaggauggugggcucccacagagcggaagaaucguuguggacuacaugaugcaaaaacccggcaagacgggcaccauaguauaucagcgcgggguguuacugccucagaaagucuggugcgcuucuggacgguccaaggugauuaaagguucacuuccauugaucggcgaagccgauugucugcaugagaaguacgggggacuaaacaaaagcaagcccuacuauacaggcgaacacgcaaaggcuauugguaauugcccgaucuggguuaaaacuccucucaagcuggccaacgggaccaaauacaggcccccagcgaagcugcugaaagagcgaggcuuuuucggagccaucgcaggcuuuuuggaagggggaugggaagguaugauugcuggcuggcacggguauacaagucauggagcccacggcguggcugucgccgcagaccucaagucuacucaggaggccauaaauaagaucaccaaaaaccuuaauuccuuaagcgaacuggaggugaagaaccuccaaagacuuucgggugcuauggacgaacugcauaaugagauuuuggagcuagaugaaaaaguagacgaucugagggcggacacaaucucuucccagauagagcucgcaguucugcuuucaaacgaagggauuaucaauagugaggaugaacaccuguuggcccucgagcggaagcugaaaaagauguuaggcccuagcgcuguggacaucggaaacggcuguuucgagaccaagcacaaaugcaaucagacuugccugaaccguauugccgcagggacguuuaaugccggagaguucucccuacccacauuugauucucucaacaucaccgcugccagccugaaugacgauggucuugacaaccauacuauuuugcuguacuauucaaccgcagcgaguucccucgcugucacacugaugcuugccauauucaucguguacauggucagccgcgauaacgugucuuguucaauuugccuguga

SEQ ID NO: 156367 - RNA, 1755 nt, Artificial Sequence; identical to SEQ ID NO: 156356
  derived and/or modified CDS sequence (opt3) from hemagglutinin__InfluenzaB__AIC73877

SEQ ID NO: 156368 - RNA, 1755 nt, Artificial Sequence; identical to SEQ ID NO: 156356
  derived and/or modified CDS sequence (opt3) from hemagglutinin__InfluenzaB__AIC73878

SEQ ID NO: 156369 - RNA, 1755 nt, Artificial Sequence; identical to SEQ ID NO: 156356
  derived and/or modified CDS sequence (opt3) from hemagglutinin__InfluenzaB__AIC73879

SEQ ID NO: 156370 - RNA, 1755 nt, Artificial Sequence; identical to SEQ ID NO: 156356
  derived and/or modified CDS sequence (opt3) from hemagglutinin__InfluenzaB__AIC73880

SEQ ID NO: 156371 - RNA, 1755 nt, Artificial Sequence; identical to SEQ ID NO: 156356
  derived and/or modified CDS sequence (opt3) from hemagglutinin__InfluenzaB__AIC73881

SEQ ID NO: 156372 - RNA, 1755 nt, Artificial Sequence; identical to SEQ ID NO: 156356
  derived and/or modified CDS sequence (opt3) from hemagglutinin__InfluenzaB__AIC73882

SEQ ID NO: 156373 - RNA, 1755 nt, Artificial Sequence; identical to SEQ ID NO: 156177
  derived and/or modified CDS sequence (opt3) from hemagglutinin__InfluenzaB__AIC73883

SEQ ID NO: 156374 - RNA, 1755 nt, Artificial Sequence; identical to SEQ ID NO: 156356
  derived and/or modified CDS sequence (opt3) from hemagglutinin__InfluenzaB__AIC73884

SEQ ID NO: 156375 - RNA, 1758 nt, Artificial Sequence
  derived and/or modified CDS sequence (opt3) from hemagglutinin__InfluenzaB__AIC73885
auggaagccaucauugugcugcucauggucguuaccagcaacgcugacagaauaugcacaggcaucacuuccucuaauucaccccacgugguaaagacggcaacccagggggaagugaacgucacaggagugauuccucuuacuaccacaccaaccaaaagucauuucgccaaucugaaggguacugagacaaggggcaaauuguguccgaagugcuuaaacuguaccgaucuggacguugcgcuagggcggcccaaaugcacgggaaagaucccuagcgcucgcguguccauucuccacgaaguccgaccagugacuucuggcuguuuucccaucaugcaugaucguaccaagauaagacaacugccuaaucuucugagggguuacgagcacauccgguugucgacacauaacguaauuaaugccgaagacgcaccagggggacccuauaaaaucggcacuucaggcagcugcccuaacguuaccaaugggaacggauucuuugccacaauggcuugggcagugccaaagaaugauaaaaacaagaccgccacgaauccgcucacuauugagguccccuacaucuguacagagggugaagaccagauaaccguguggggcuuccacagugauaacgagacucagauggcuaaacuguauggggacuccaagccucagaaguuuacaucuagcgccaauggagugaccacgcacuacgucucccaaauuggcgguuucccaaaccagaccgaagaugggggacugccccagucaggccgcaucguuguggacuauaugguacagaaaaguggcaagacagggacuauuaccuaccaaagaggaauccucuuaccucagaaaguguggugcgcgagcgguaggucuaaggucaucaaaggcucccugccacuuauuggggaggcagauuguuugcaugagaaguauggaggccugaacaaaucaaagcccuacuacacaggugaacacgccaaggcuauagggaauugcccgaucugggugaaaacuccucuaaagcucgccaacggcaccaaauaucggcccccagcaaagcugcuuaaagagcgcggauuuuucggcgcuauugccggguuucuggaaggagguugggagggcaugaucgcgggguggcauggauacacaagccacggcgcccacgguguugcaguggcugccgacuugaagaguacccaggaagcuauaaauaagauuacuaaaaaccucaauucucuguccgaguuagaggucaagaaccugcagcgacucagcggggccauggaugaacuucauaaugagauccuggaauuggacgagaaaguggacgaucuaagagcagacacgaucucgucucaaauugaacuggccguacuccuguccaacgagggcaucauuaauucagaggaugaacaccuucuggcuuuggagaggaagcucaaaaagaugcugggaccuagugcgguugaaauaggcaacggguguuucgagacaaagcauaaaugcaaucagaccugcuuagaccggaucgcagccggaacuuuugaugcuggugaguucagccugcccaccuuugacucccuaaacauuacagccgcaucucucaaugaugacggccuggauaaccacaccauccuuuuguauuacagcacugccgcuucaagucuggccgugacacucaugaucgcaauuuucgucguguauauggucucccgugacaaugugagcuguucuauaugccuguga

SEQ ID NO: 156376 - RNA, 1758 nt, Artificial Sequence; identical to SEQ ID NO: 155913
  derived and/or modified CDS sequence (opt3) from hemagglutinin__InfluenzaB__AIC73886

SEQ ID NO: 156377 - RNA, 1758 nt, Artificial Sequence; identical to SEQ ID NO: 156357
  derived and/or modified CDS sequence (opt3) from hemagglutinin__InfluenzaB__AIC73887

SEQ ID NO: 156378 - RNA, 1755 nt, Artificial Sequence; identical to SEQ ID NO: 156177
  derived and/or modified CDS sequence (opt3) from hemagglutinin__InfluenzaB__AIC73888

SEQ ID NO: 156379 - RNA, 1755 nt, Artificial Sequence; identical to SEQ ID NO: 156337
  derived and/or modified CDS sequence (opt3) from hemagglutinin__InfluenzaB__AIC73889

SEQ ID NO: 156380 - RNA, 1755 nt, Artificial Sequence; identical to SEQ ID NO: 156337
  derived and/or modified CDS sequence (opt3) from hemagglutinin__InfluenzaB__AIC73890

SEQ ID NO: 156381 - RNA, 1758 nt, Artificial Sequence
  derived and/or modified CDS sequence (opt3) from hemagglutinin__InfluenzaB__AIC73892
augaaggccaucauugugcugcucauggucguuaccagcaacgcugacagaauaugcacaggcaucacuuccucuaauucaccccacgugguaaaaacggcaacccagggggaggugaacgucacaggagugauuccucuuacuaccacaccaaccaagagucauuucgccaaucugaaagguacugaaacaaggggcaaguuguguccgaaaugcuuaaacuguaccgaucuggacguugcgcuagggcggcccaagugcacgggaaagaucccuagcgcucgcguguccauucuccacgagguccgaccagugacuucuggcuguuuucccaucaugcaugaucguaccaaaauaagacaacugccuaaucuucugagggguuacgaacacauccgguugucgacacauaacguaauuaaugccgaggacgcaccagggggacccuauaagaucggcacuucaggcagcugcccuaacguuaccaaugggaacggauucuuugccacaauggcuugggcagugccgaaaaaugauaagaacaaaaccgccacgaauccacucacuauugaaguccccuacaucuguacagagggugaggaccagauaaccguguggggcuuccacagugauaacgaaacucagauggcuaagcuguauggggacuccaagccucagaaauuuacaucuagcgccaauggagugaccacgcacuacgucucccaaauuggcgguuucccaaaccagaccgaggaugggggacugccccagucaggccgcaucguuguggacuauaugguacagaagaguggcaaaacagggacuauuaccuaccaaagaggaauccucuuaccucagaagguguggugcgcgagcgguaggucuaaagucaucaagggcucccugccacuuauuggggaagcagauuguuugcaugagaaauauggaggccugaacaagucaaagcccuacuacacaggugagcacgccaaagcuauagggaauugcccgaucugggugaagacuagccuaaaacucgccaacggcaccaaguaucggccucccgcaaaacugcuuaaggaacgcggauuuuucggcgcuauugccggguuucuggagggagguugggaaggcaugaucgcgggguggcauggauacacaagucacggcgcccacgguguugcaguggcugccgacuugaagucuacccaggaggcuauaaauaaaauuacuaagaaccucaauucccugagcgaauuagaggucaaaaaccugcagcgacucucgggggccauggaugagcuucauaaugaaauccuggaguuggacgaaaagguggacgaucuaagagcagacacgaucucuucccaaauugagcuggccguacuccugucaaacgaaggcaucauuaauagugaggaugagcaccuucuggcuuuggaaaggaaacucaagaagaugcugggaccaagcgcgguugagauaggcaacggguguuucgaaacaaaacauaagugcaaucagaccugcuuagaccggaucgcagccggaacuuuugaugcuggugaguucucccugccuaccuuugacucucuaaacauuacagccgcaagccucaaugaugacggccuggauaaccacaccauccuuuuguauuacucaacugccgcuaguucccuggccgugacacucaugaucgcaauuuucgucguguauauggucagccgugacaaugugucuuguucaauaugccuguga

SEQ ID NO: 156382 - RNA, 1755 nt, Artificial Sequence; identical to SEQ ID NO: 156177
  derived and/or modified CDS sequence (opt3) from hemagglutinin__InfluenzaB__AIC73893

SEQ ID NO: 156383 - RNA, 1755 nt, Artificial Sequence; identical to SEQ ID NO: 156337
  derived and/or modified CDS sequence (opt3) from hemagglutinin__InfluenzaB__AIC73894

SEQ ID NO: 156384 - RNA, 1755 nt, Artificial Sequence; identical to SEQ ID NO: 156337
  derived and/or modified CDS sequence (opt3) from hemagglutinin__InfluenzaB__AIC73895

SEQ ID NO: 156385 - RNA, 1755 nt, Artificial Sequence; identical to SEQ ID NO: 156337
  derived and/or modified CDS sequence (opt3) from hemagglutinin__InfluenzaB__AIC73896

SEQ ID NO: 156386 - RNA, 1755 nt, Artificial Sequence; identical to SEQ ID NO: 156337
  derived and/or modified CDS sequence (opt3) from hemagglutinin__InfluenzaB__AIC73897

SEQ ID NO: 156387 - RNA, 1755 nt, Artificial Sequence; identical to SEQ ID NO: 156337
  derived and/or modified CDS sequence (opt3) from hemagglutinin__InfluenzaB__AIC73898

SEQ ID NO: 156388 - RNA, 1755 nt, Artificial Sequence; identical to SEQ ID NO: 156337
  derived and/or modified CDS sequence (opt3) from hemagglutinin__InfluenzaB__AIC73899

SEQ ID NO: 156389 - RNA, 1755 nt, Artificial Sequence; identical to SEQ ID NO: 156337
  derived and/or modified CDS sequence (opt3) from hemagglutinin__InfluenzaB__AIC73900

SEQ ID NO: 156390 - RNA, 1755 nt, Artificial Sequence; identical to SEQ ID NO: 156337
  derived and/or modified CDS sequence (opt3) from hemagglutinin__InfluenzaB__AIC73902

SEQ ID NO: 156391 - RNA, 1755 nt, Artificial Sequence
  derived and/or modified CDS sequence (opt3) from hemagglutinin__InfluenzaB__AIC73903
augaaggccaucauugugcugcucauggucguuaccagcaacgcugacagaauaugcacaggcaucacuuccucuaauucaccccacgugguaaaaacggcaacccagggggaagugaacgucacaggagugauuccucuuacuaccacaccaaccaagaguuacuucgccaaucugaaagguacuaggacacggggcaaguuguguccggauugcuuaaacuguaccgaccuggauguugcgcuagggcgccccaugugcgugggaacgacuccuagcgcuaaagccuccauccuccaugaaguccgaccagugaccucuggcuguuuucccauuaugcacgaccguacaaagaucagacaacugccuaaucuucugagggguuaugagaagauacgguugucgacucagaacguaaucgaugcagaaaaagccccagggggacccuaccgccucggcaccucaggcagcugcccuaaugcuacaaguaagauuggguucuuugcaaccauggccugggcuguuccaaaagacaacuauaagaaugccacgaacccgcagacuguggagguccccuacaucuguacagaaggagaggaucagauuaccgugugggguuuccauuccgacaauaaaacucaaaugaagucucuguauggcgauagcaacccucagaaguuuacauccucagcgaaugggaucaccacgcacuacgugagucagauaggagacuucccagaucagaccgaggacggcggucugccccaaagcgggagaauugucguugauuauaugaugcagaaaccuggaaagacaggcacuaucguguaccagaggggcguacucuuaccacagaaaguguggugcgcaucugggcgguccaaggucauuaaaggaucacugccccuuaucggugaagccgacuguuugcaugaggaauacggcgggcugaacaagagcaaaccguauuacaccggaaagcacgcuaaggccaucggcaauugcccuauuugggugaaaacaccccuaaagcucgcaaacgguacuaaauaucgcccuccagcuaagcugcuuaaagagcgaggguuuuucggcgccauagcgggauuucuggagggcgggugggaaggaaugaucgccgguuggcacggcuacaccagucauggggcacacggaguugcuguggccgcugacuugaagucuacacaagaggccauuaacaagaucaccaaaaaucucaacucccugagcgaauuagaggucaagaaucugcagagacucucgggcgcaauggaugaacuucauaacgagauacuggaguuggacgaaaaaguggaugaccuaagggccgauacuauuucuucccagaucgagcuggcuguacuccugucaaaugaagguaucauuaacagugaggacgaacaccuucuggcguuggagcggaagcucaaaaagaugcuggggcccagcgcaguugauaucggcaauggauguuucgagacgaagcacaaaugcaaccaaacaugcuuagaccguauugccgcuggcaccuuuaaugccggggaguucucccugccaacuuuugauucucuaaacauaaccgcagccagccucaaugacgauggacuggacaaccauacaauccuuuuguauuacucaaccgcugccaguucccuggcagugacucucaugcuggcgauuuucaucgucuauauggugagccgcgacaaugucucuuguucaaucugccuuuga

SEQ ID NO: 156392 - RNA, 1755 nt, Artificial Sequence
  derived and/or modified CDS sequence (opt3) from hemagglutinin__InfluenzaB__AIC73904
augaaggccaucauugugcugcucauggucguuaccagcaacgcugacagaauaugcacaggcaucacuuccucuaauucaccccacgugguaaaaacggcaacccagggggaagugaacgucacaggagugauuccucuuacuaccacaccaaccaagaguuacuucgccaaucugaaagguacuaggacacggggcaaguuguguccggauugcuuaaacuguaccgaccuggauguugcgcuagggcgccccaugugcgugggaaucacgccuagcgcuaaagccuccauucuccaugaaguccgaccagugacuucuggcuguuuucccaucaugcacgaccguaccaagauaagacaacugccuaaucuucugagggguuaugagaagauccgguugucgacacagaacguaauugaugcagaaaaagccccagggggacccuaccgccucggcacuucaggcagcugcccuaaugcuaccaguaagaucggguucuuugcaacaauggccugggcuguuccaaaagacaacuauaagaaugccaccaacccgcagacgguggagguccccuacauuuguacugaaggagaggaucagaucacagugugggguuuccauuccgacaauaaaacccaaaugaagucucuguauggcgauagcaacccucagaaguuuacuuccucagcgaauggggugacaacccacuacgucagucagauaggagacuucccagaucagacggaggacggcggucugccccaaagcgggagaauuguuguggauuauaugaugcagaaaccuggaaagaccggcacaaucguauaccagaggggcgugcucuuaccacagaaagucuggugcgcaucugggcgguccaaggugauuaaaggaucacugccccuuaucggugaagccgacuguuugcaugaggaauacggcgggcugaacaagagcaaaccguauuacacuggaaagcacgcuaaggccaucggcaauugcccuauuuggguuaaaaccccucuaaagcucgcaaacgguacaaaauaucgcccacccgcuaagcugcuuaaagagcgaggguuuuucggcgccauagcgggauuucuggagggcgggugggaaggaaugaucgccgguuggcacggcuacacaagucauggggcacacggaguggcugucgccgcugacuugaagucuacccaagaggccauuaacaagaucacuaaaaaucucaacucccugagcgaauuagaggugaagaaucugcagagacucucgggcgcaauggaugaacuucauaacgagauacuggaguuggacgaaaaaguagaugaccuaagggccgauaccauuucuucccagaucgagcuggcuguucuccugucaaaugaagguaucauuaacagugaggacgaacaccuucuggcguuggagcggaagcucaaaaagaugcuggggcccagcgcaguggauaucggcaauggauguuucgagacuaagcacaaaugcaaccaaacgugcuuagaccguauugccgcuggcacauuuaaugccggggaguucucccugccaaccuuugauucucuaaacauaacugcagccagccucaaugacgauggacuggacaaccauaccauccuuuuguauuacucaacagcugccaguucccuggcagucacccucaugcuggcgauuuucaucguguauauggucagccgcgacaaugugucuuguucaaucugccuuuga

SEQ ID NO: 156393 - RNA, 1755 nt, Artificial Sequence; identical to SEQ ID NO: 156337
  derived and/or modified CDS sequence (opt3) from hemagglutinin__InfluenzaB__AIC73905

SEQ ID NO: 156394 - RNA, 1755 nt, Artificial Sequence; identical to SEQ ID NO: 156337
  derived and/or modified CDS sequence (opt3) from hemagglutinin__InfluenzaB__AIC73906

SEQ ID NO: 156395 - RNA, 1755 nt, Artificial Sequence; identical to SEQ ID NO: 156337
  derived and/or modified CDS sequence (opt3) from hemagglutinin__InfluenzaB__AIC73907

SEQ ID NO: 156396 - RNA, 1755 nt, Artificial Sequence; identical to SEQ ID NO: 156337
  derived and/or modified CDS sequence (opt3) from hemagglutinin__InfluenzaB__AIC73908

SEQ ID NO: 156397 - RNA, 1755 nt, Artificial Sequence; identical to SEQ ID NO: 156337
  derived and/or modified CDS sequence (opt3) from hemagglutinin__InfluenzaB__AIC73909

SEQ ID NO: 156398 - RNA, 1755 nt, Artificial Sequence; identical to SEQ ID NO: 156337
  derived and/or modified CDS sequence (opt3) from hemagglutinin__InfluenzaB__AIC73910

SEQ ID NO: 156399 - RNA, 1755 nt, Artificial Sequence; identical to SEQ ID NO: 156337
  derived and/or modified CDS sequence (opt3) from hemagglutinin__InfluenzaB__AIC73911

SEQ ID NO: 156400 - RNA, 1755 nt, Artificial Sequence; identical to SEQ ID NO: 156337
  derived and/or modified CDS sequence (opt3) from hemagglutinin__InfluenzaB__AIC73912

SEQ ID NO: 156401 - RNA, 1755 nt, Artificial Sequence; identical to SEQ ID NO: 156337
  derived and/or modified CDS sequence (opt3) from hemagglutinin__InfluenzaB__AIC73913

SEQ ID NO: 156402 - RNA, 1755 nt, Artificial Sequence; identical to SEQ ID NO: 156337
  derived and/or modified CDS sequence (opt3) from hemagglutinin__InfluenzaB__AIC73914

SEQ ID NO: 156403 - RNA, 1755 nt, Artificial Sequence; identical to SEQ ID NO: 156337
  derived and/or modified CDS sequence (opt3) from hemagglutinin__InfluenzaB__AIC73915

SEQ ID NO: 156404 - RNA, 1755 nt, Artificial Sequence; identical to SEQ ID NO: 156337
  derived and/or modified CDS sequence (opt3) from hemagglutinin__InfluenzaB__AIC73916

SEQ ID NO: 156405 - RNA, 1755 nt, Artificial Sequence; identical to SEQ ID NO: 156337
  derived and/or modified CDS sequence (opt3) from hemagglutinin__InfluenzaB__AIC73917

SEQ ID NO: 156406 - RNA, 1755 nt, Artificial Sequence; identical to SEQ ID NO: 156337
  derived and/or modified CDS sequence (opt3) from hemagglutinin__InfluenzaB__AIC73918

SEQ ID NO: 156407 - RNA, 1755 nt, Artificial Sequence; identical to SEQ ID NO: 156177
  derived and/or modified CDS sequence (opt3) from hemagglutinin__InfluenzaB__AIC73919

SEQ ID NO: 156408 - RNA, 1755 nt, Artificial Sequence; identical to SEQ ID NO: 156337
  derived and/or modified CDS sequence (opt3) from hemagglutinin__InfluenzaB__AIC73920

SEQ ID NO: 156409 - RNA, 1758 nt, Artificial Sequence; identical to SEQ ID NO: 155913
  derived and/or modified CDS sequence (opt3) from hemagglutinin__InfluenzaB__AIC73921

SEQ ID NO: 156410 - RNA, 1755 nt, Artificial Sequence; identical to SEQ ID NO: 156337
  derived and/or modified CDS sequence (opt3) from hemagglutinin__InfluenzaB__AIC73922

SEQ ID NO: 156411 - RNA, 1758 nt, Artificial Sequence; identical to SEQ ID NO: 154935
  derived and/or modified CDS sequence (opt3) from hemagglutinin__InfluenzaB__AIC73924

SEQ ID NO: 156412 - RNA, 1758 nt, Artificial Sequence
  derived and/or modified CDS sequence (opt3) from hemagglutinin__InfluenzaB__AIC73925
augaaggccaccaucgugcugcucauggucguuacaagcaacgcugacagaauuugcacuggcauaacguccucuaauucaccccacgugguaaaaaccgcaacacagggggaggugaacgucacuggagugaucccucuuaccacaaccccaacuaagagucauuucgccaaucugaaagguacagaaaccaggggcaaguuguguccgaaaugcuuaaacuguacggaucuggacguugcgcuagggcggcccaagugcacuggaaagauuccuagcgcucgcguguccauccuccacgagguccgaccagugaccucuggcuguuuucccauuaugcaugaucguacaaaaaucagacaacugccuaaucuucugagggguuacgaacacauacgguugucgacucauaacguaaucaaugccgaggacgcaccagggggacccuauaagauuggcaccucaggcagcugcccuaacguuacaaaugggaacggauucuuugccaccauggcuugggcagugccgaaaaaugauaagaacaaaacggccacuaauccacucacaaucgaaguccccuacauuuguaccgagggugaggaccagaucacuguguggggcuuccacagugauaacgaaacacagauggcuaagcuguauggggacuccaagccucagaaauuuaccucuagcgccaauggagugacgacccacuacgucucccaaauaggcgguuucccaaaccagacagaggaugggggacugccccagucaggccgcauuguuguggacuauaugguacagaagaguggcaaaacugggaccaucacauaccaaagagguauucucuuaccucagaagguguggugcgcgagcggaaggucuaaagucaucaagggcucccugccacuuaucggggaagcagauuguuugcaugagaaauauggaggccugaacaagucaaagcccuacuacacuggugagcacgccaaagcuauugggaauugcccgauaugggugaagaccccucuaaaacucgccaacggcacaaaguaucggcccccagcaaaacugcuuaaggaacgcggauuuuucggcgcuaucgccggguuucuggagggagguugggaaggcaugauugcgggguggcauggauacaccagccacggcgcccacgguguugcaguggcugccgacuugaagaguacucaggaggcuaucaauaaaauaacgaagaaccucaauucucuguccgaauuagaggucaaaaaccugcagcgacucagcggggccauggaugagcuucauaaugaaauucuggaguuggacgaaaagguggacgaucuaagagcagacacaaucucgucucaaaucgagcuggccguacuccuguccaacgaaggcauuaucaauucagaggaugagcaccuucuggcuuuggaaaggaaacucaagaagaugcugggaccuagugcgguugagauuggcaacggguguuucgaaaccaaacauaagugcaaucagacuugcuuagaccggauagcagccggaaccuuugaugcuggugaguucagccugcccacauuugacucccuaaacaucaccgccgcaucucucaaugaugacggccuggauaaccacacuauucuuuuguauuacagcacagccgcuucaagucuggccgugacgcucaugaucgcaaucuucgucguguauauggucucccgugacaaugugagcuguucuauuugccuguga

SEQ ID NO: 156413 - RNA, 1755 nt, Artificial Sequence; identical to SEQ ID NO: 156337
  derived and/or modified CDS sequence (opt3) from hemagglutinin__InfluenzaB__AIC73926

SEQ ID NO: 156414 - RNA, 1755 nt, Artificial Sequence; identical to SEQ ID NO: 154615
  derived and/or modified CDS sequence (opt3) from hemagglutinin__InfluenzaB__AIL94977

SEQ ID NO: 156415 - RNA, 1755 nt, Artificial Sequence; identical to SEQ ID NO: 154615
  derived and/or modified CDS sequence (opt3) from hemagglutinin__InfluenzaB__AIL94988

SEQ ID NO: 156416 - RNA, 1755 nt, Artificial Sequence
  derived and/or modified CDS sequence (opt3) from hemagglutinin__InfluenzaB__AIL94999
augaaggccaucauugugcugcucauggucguuaccagcaacgcugacagaauaugcacaggcaucacuuccucuaauucaccccacgugguaaaaacggcaacccagggggaagugaacgucacaggagugauuccucuuacuaccacaccaaccaagaguuacuucgccaaucugaaagguacuaggacacggggcaaguuguguccggauugcuuaaacuguaccgaccuggauguugcgcuagggcgccccaugugcgugggaacgacuccuagcgcuaaagccuccauccuccaugaaguccgaccagugaccucuggcuguuuucccauuaugcacgaccguacaaagaucagacaacugccuaaucuucugagggguuaugagaacauacgguugucgacucagaauguaaucgaugcagaaaaggccccagggggacccuaccgccucggcaccucaggcagcugcccuaacgcuacaaguaaaaccggguucuuugcaacgauggccugggcuguuccaaaggacaauuauaaaaacgccacuaauccgcugacaguggagguccccuacauuuguaccgaaggagaggaucagaucacugugugggguuuccauuccgacaacaagacacagaugaaaaaucuguauggcgauucuaacccucaaaaguuuaccagcuccgcgaauggggugacgacccacuacgucucacagauuggagacuucccagaucagacagaggacggcggucucccccagagugggagaaucguuguggauuauaugaugcaaaagccuggaaaaacuggcaccauaguauaccagaggggcguguuacugccacagaaggucuggugcgcaagcgggcggucuaaagugauuaagggaucccuucccuugaucggugaagccgacugucugcaugagaaauacggcgggcuaaacaagucaaaaccguauuacacaggagaacacgcuaaggccauuggcaacugcccuaucuggguuaagacuccccucaaacuggcaaaugguaccaaguaucgcccuccagcuaaacuucugaaggagcgaggguuuuucggcgccaucgcgggauuuuuggagggcgggugggaaggaaugauugccgguuggcacggcuacacaagccauggggcacacggaguggcugucgccgcugaccucaaaaguacccaggaggccauaaacaagaucacuaagaaucugaacucuuuauccgaacuggaggugaaaaaucuccaaagacuuagcggcgcaauggaugaacugcauaacgagauuuuggagcuagacgaaaagguagaugaccugagggccgauacgaucucgucucagauagagcucgcuguucugcuuuccaaugaagguauuaucaacucagaggacgaacaccuguuggcgcucgagcggaaacugaagaaaauguuagggcccagugcaguggauaucggcaauggauguuucgagacaaagcacaagugcaaccagaccugccuggaccguauugccgcuggcacuuuuaaugccggggaguucagccuaccaaccuuugauucccucaacaucacagcagccucucugaaugacgauggacuugacaaccauaccauuuugcuguauuacagcacugcugccucaagucucgcagucacacugaugcuugcgauauucaucguguauauggucucccgcgacaaugugagcuguucuauuugccuguga

SEQ ID NO: 156417 - RNA, 1755 nt, Artificial Sequence; identical to SEQ ID NO: 154615
  derived and/or modified CDS sequence (opt3) from hemagglutinin__InfluenzaB__AIL95010

SEQ ID NO: 156418 - RNA, 1755 nt, Artificial Sequence; identical to SEQ ID NO: 154868
  derived and/or modified CDS sequence (opt3) from hemagglutinin__InfluenzaB__AIL95021

SEQ ID NO: 156419 - RNA, 1758 nt, Artificial Sequence; identical to SEQ ID NO: 154696
  derived and/or modified CDS sequence (opt3) from hemagglutinin__InfluenzaB__AIL95032

SEQ ID NO: 156420 - RNA, 1755 nt, Artificial Sequence; identical to SEQ ID NO: 154868
  derived and/or modified CDS sequence (opt3) from hemagglutinin__InfluenzaB__AIL95043

SEQ ID NO: 156421 - RNA, 1758 nt, Artificial Sequence; identical to SEQ ID NO: 154742
  derived and/or modified CDS sequence (opt3) from hemagglutinin__InfluenzaB__AIL95054

SEQ ID NO: 156422 - RNA, 1758 nt, Artificial Sequence; identical to SEQ ID NO: 154696
  derived and/or modified CDS sequence (opt3) from hemagglutinin__InfluenzaB__AIL95065

SEQ ID NO: 156423 - RNA, 1758 nt, Artificial Sequence; identical to SEQ ID NO: 154693
  derived and/or modified CDS sequence (opt3) from hemagglutinin__InfluenzaB__AIL95076

SEQ ID NO: 156424 - RNA, 1758 nt, Artificial Sequence; identical to SEQ ID NO: 154696
  derived and/or modified CDS sequence (opt3) from hemagglutinin__InfluenzaB__AIL95087

SEQ ID NO: 156425 - RNA, 1755 nt, Artificial Sequence; identical to SEQ ID NO: 154868
  derived and/or modified CDS sequence (opt3) from hemagglutinin__InfluenzaB__AIL95098

SEQ ID NO: 156426 - RNA, 1758 nt, Artificial Sequence; identical to SEQ ID NO: 156207
  derived and/or modified CDS sequence (opt3) from hemagglutinin__InfluenzaB__AIL95109

SEQ ID NO: 156427 - RNA, 1758 nt, Artificial Sequence
  derived and/or modified CDS sequence (opt3) from hemagglutinin__InfluenzaB__AIL95120
augaaggccaucauugugcugcucauggucguuaccagcaacgcugacagaauaugcacaggcaucacuuccucuaauucaccccacgugguaaaaacggcaacccagggggaggugaacgucacaggagugauuccucuuacuaccacaccaaccaagagucauuucgccaaucugaaagguacugaaacaaggggcaaguuguguccgaaaugcuuaaacuguaccgaucuggacguugcgcuagggcggcccaagugcacgggaaagaucccuagcgcucgcguguccauucuccacgagguccgaccagugacuucuggcuguuuucccaucaugcaugaucguaccaaaauaagacaacugccuaaucuucugagggguuacgaacacauccgguugucgacacauaacguaauuaaugccgagaacgcaccagggggacccuauaagaucggcacuucaggcagcugcccuaauguuaccaacgggaauggauucuuugccacaauggcuugggcagugccgaaaaacgacaagaauaaaaccgccacgaacccacucacuauugaaguccccuacaucuguacagagggugaggaucagauaaccguguggggcuuccacagugacaaugaaacucagauggcuaagcuguauggggauuccaagccucagaaauuuacaucuagcgccaacggagugaccacgcacuacgucucccaaauuggcgguuucccaaaccagaccgaggacgggggacugccccagucaggccgcaucguuguggauuauaugguacagaagaguggcaaaacagggacuauuaccuaccaaagaggaauccucuuaccucagaagguguggugcgcgagcgguaggucuaaagucaucaagggcucccugccacuuauuggggaagcagacuguuugcaugagaaauauggaggccugaauaagucaaagcccuacuacacaggugagcacgccaaagcuauagggaacugcccgaucugggugaagacuccucuaaaacucgccaauggcaccaaguaucggcccccagcaaaacugcuuaaggaacgcggauuuuucggcgcuauugccggguuucuggagggagguugggaaggcaugaucgcgggguggcauggauacacaagccacggcgcccacgguguugcaguggcugccgauuugaagaguacccaggaggcuauaaacaaaauuacuaagaaucucaacucucuguccgaauuagaggucaaaaaucugcagcgacucagcggggccauggacgagcuucauaacgaaauccuggaguuggaugaaaagguggacgaccuaagagcagauacgaucucgucucaaauugagcuggccguacuccuguccaaugaaggcaucauuaacucagaggacgagcaccuucuggcuuuggaaaggaaacucaagaagaugcugggaccuagugcgguugagauaggcaauggguguuucgaaacaaaacauaagugcaaccagaccugcuuagauaaaaucgcagccggaacuuuugacgcuggugaguucagccugcccaccuuugauucccuaaauauuacagccgcaucucucaacgacgauggccuggacaaucacaccauccuuuuguauuacagcacugccgcuucaagucuggccgugacacucaugaucgcaauuuucgucguguauauggucucccgggauaacgugagcuguucuauaugccuguga

SEQ ID NO: 156428 - RNA, 1755 nt, Artificial Sequence; identical to SEQ ID NO: 156337
  derived and/or modified CDS sequence (opt3) from hemagglutinin__InfluenzaB__AKA54644

SEQ ID NO: 156429 - RNA, 1755 nt, Artificial Sequence
  derived and/or modified CDS sequence (opt3) from hemagglutinin__InfluenzaB__AKA54645
augaaggccaucaccgugcugcucauggucguuacaagcaacgcugacagaauuugcacuggcauaacguccucuaauucaccccacgugguaaaaaccgcaacacagggggaagugaacgucacuggagugaucccucuuaccacaaccccaacuaagaguuacuucgccaaucugaaagguacaaggacccggggcaaguuguguccggauugcuuaaacuguacggaccuggauguugcgcuagggcgccccaugugcgugggaacuaccccuagcgcuaaagccuccauucuccaugaaguccgaccagugacaucuggcuguuuucccaucaugcacgaccguacuaagauuagacaacugccuaaucuucugagggguuaugagaagauccgguugucgacccagaacguaauagaugcagaaaaagccccagggggacccuaccgccucggcacaucaggcagcugcccuaaugcuaccaguaagaucggguucuuugcaacgauggccugggcuguuccaaaagacaacuauaagaaugccacuaacccgcugacaguggagguccccuacauuuguaccgaaggagaggaucagaucacugugugggguuuccauuccgacaauaaaacacagaugaagucucuguauggcgauagcaacccucaaaaguuuaccuccucagcggacggggugacgacccacuacgucagucagauuggagauuucccagaccagacagaggauggcggucucccccagagcgggagaaucguuguggacuauaugaugcaaaaaccuggaaagacuggcaccauaguauaccagaggggcguguuacugccacagaaagucuggugcgcaucugggcgguccaaggugauuaaaggaucacuucccuugaucggugaagccgacugucugcaugaggaauacggcgggcuaaauaagagcaaaccguauuacacaggaaagcacgcuaaggccauuggcaacugcccuaucuggguuaaaacuccccucaagcuggcaaaugguaccaaauaucgcccuccagcuaagcugcugaaagagcgaggguuuuucggcgccaucgcgggauuuuuggagggcgggugggaaggaaugauugccgguuggcacggcuacacaagucauggggcacacggaguggcugucgccgcugaucucaagucuacccaggaggccauaaacaagaucacuaaaaaccuuaauuccuuaagcgaacuggaggugaagaaccuccaaagacuuucgggcgcaauggacgaacugcauaaugagauuuuggagcuagaugaaaaaguagacgaucugagggccgacacgaucucuucccagauagagcucgcuguucugcuuucaaacgaagguauuaucaauagugaggaugaacaccuguuggcgcucgagcggaagcugaaaaagauguuagggcccagcgcaguggacaucggcaacggauguuucgagacaaagcacaaaugcaaucagaccugccuggaucguauugccgcuggcacuuuuaacgccggggaguucucccuaccaaccuuugacucucucaauaucacagcagccagccugaacgaugacggacuugacaaucauaccauuuugcuguauuacucaacugcugccaguucccucgcagucacacugaugcuugcgauauucaucguguauauggucagccgcgauaacgugucuuguucaauuugccuguga

SEQ ID NO: 156430 - RNA, 1755 nt, Artificial Sequence; identical to SEQ ID NO: 156337
  derived and/or modified CDS sequence (opt3) from hemagglutinin__InfluenzaB__AKA54646

SEQ ID NO: 156431 - RNA, 1755 nt, Artificial Sequence; identical to SEQ ID NO: 156337
  derived and/or modified CDS sequence (opt3) from hemagglutinin__InfluenzaB__AKA54647

SEQ ID NO: 156432 - RNA, 1758 nt, Artificial Sequence; identical to SEQ ID NO: 154935
  derived and/or modified CDS sequence (opt3) from hemagglutinin__InfluenzaB__AKA54648

SEQ ID NO: 156433 - RNA, 1755 nt, Artificial Sequence
  derived and/or modified CDS sequence (opt3) from hemagglutinin__InfluenzaB__AKA54649
augaaggccaucauugugcugcucauggucguuaccagcaacgcugacagaauaugcacaggcaucacuuccucuaauucaccccacgugguaaaaacggcaacccagggggaagugaacgucacaggagugauuccucuuacuaccacaccaaccaagaguuacuucgccaaucugaaagguacuaggacacggggcaaguuguguccggauugcuuaaacuguaccgaccuggauguugcgcuagggcgccccaugugcgugggaacgacuccuagcgcuaaagccuccauccuccaugaaguccgaccagugaccucuggcuguuuucccauuaugcacgaccguacaaagaucagacaacugccuaaucuucugagggguuaugagaagauacgguugucgacucagaacguaaucgaugcagaaaaagccccagggggacccuaccgccucggcaccucaggcagcugcccuaauacaaccaguaagauuggguucuuugcuacgauggcaugggccguuccaaaagacaacuauaagaaugcuacuaacccgcugacaguggagguccccuacaucuguaccgaaggagaggaucagauuacugugugggguuuccauuccgacaauaaaacacagaugaagucucuguauggcgauagcaacccucaaaaguuuaccuccucagccaauggggugacgacccacuacgucagucagaucggagacuucccagaucagacagaggacggcggucucccccagagcgggagaauaguuguggauuauaugaugcaaaaaccuggaaagacuggcaccauuguauaccagaggggcguguuacugccacagaaagucuggugcgcgucugggcgguccaaggugaucaaaggaucacuucccuugauuggugaagcagacugucugcaugaggaauacggcgggcuaaacaagagcaaaccguauuacacaggaaagcacgccaaggcuaucggcaauugcccuaucuggguuaaaacuccccucaagcuggccaacgguaccaaauaucgcccuccagcaaaacuucugaaggagcgaggguuuuucggcgcuauugccggauuuuuggagggcgggugggaaggaaugauagcggguuggcacggcuacacaagucauggggcccacggaguggcagucgcugccgaccucaagucuacccaggaggcuaucaacaagauuacuaaaaaucugaacuccuuaagcgaacuggaggugaagaaucuccaaagacuuucgggcgccauggaugaacugcauaacgagaucuuggagcuagacgaaaaaguagaugaccugagggcagauacgauaucuucccagauugagcucgccguucugcuuucaaaugaagguaucaucaacagugaggacgaacaccuguuggcucucgagcggaagcugaaaaagauguuagggcccagcgcgguggauauuggcaauggauguuucgagacaaagcacaaaugcaaccagaccugccuggaccguaucgcagccggcacuuuuaaugcuggggaguucucccuaccaaccuuugauucucucaacauuacagccgcaagccugaaugacgauggacuugacaaccauaccauauugcuguauuacucaacugccgcuaguucccucgccgucacacugaugcuugcaaucuucauuguguauauggucagccgcgacaaugugucuuguucaaucugccuguga

SEQ ID NO: 156434 - RNA, 1755 nt, Artificial Sequence; identical to SEQ ID NO: 156337
  derived and/or modified CDS sequence (opt3) from hemagglutinin__InfluenzaB__AKU40581

SEQ ID NO: 156435 - RNA, 1755 nt, Artificial Sequence; identical to SEQ ID NO: 156337
  derived and/or modified CDS sequence (opt3) from hemagglutinin__InfluenzaB__AKU40592

SEQ ID NO: 156436 - RNA, 1755 nt, Artificial Sequence; identical to SEQ ID NO: 156177
  derived and/or modified CDS sequence (opt3) from hemagglutinin__InfluenzaB__AKU40603

SEQ ID NO: 156437 - RNA, 1755 nt, Artificial Sequence; identical to SEQ ID NO: 156337
  derived and/or modified CDS sequence (opt3) from hemagglutinin__InfluenzaB__AKU40614

SEQ ID NO: 156438 - RNA, 1755 nt, Artificial Sequence; identical to SEQ ID NO: 156177
  derived and/or modified CDS sequence (opt3) from hemagglutinin__InfluenzaB__AKU40625

SEQ ID NO: 156439 - RNA, 1755 nt, Artificial Sequence
  derived and/or modified CDS sequence (opt3) from hemagglutinin__InfluenzaB__AKU40636
augaaggccaucauugugcugcucauggucguuaccagcaacgcugacagaauaugcacaggcaucacuuccucuaauucaccccacgugguaaaaacggcaacccagggggaagugaacgucacaggagugauuccucuuacuaccacaccagccaagaguuacuucgcgaaucugaaagguaccaggacucggggcaaguuguguccggauugcuuaaacuguacagaccuggauguugcucuagggcgccccaugugcgugggaaccacgccuagcgccaaagcauccauccuccaugaaguccgaccagugacuucuggcuguuuucccauuaugcacgaccguaccaagaucagacaacugccuaaucuucugagggguuaugagaacauacgguugucgacaaagaauguaaucgaugccgaaaaagcuccagggggacccuaccgccucggcacuucaggcagcugcccuaacgcaaccaguaagauuggguucuuugccacaauggcuugggccguuccaaaagacaauuauaagaacgcgaccaauccgcugacgguggagguccccuacaucuguaaagaaggagaggaucagauuacugugugggguuuccauuccgacaacaagacacagaugaagaaucuguauggcgauucuaacccucagaaauuuaccagcuccgcaaauggggugacuacacacuacgucucacaaaucggagacuucccagaucagaccgaggacggcggucucccccagagugggagaauaguuguggauuauaugaugcagaagccuggaaaaacgggcaccauuguauaccaaaggggcguguuacugccacagaaggucuggugcgccagcgggcggucuaaagugaucaagggaucccuucccuugauuggugaagcugacugucugcaugaggaauacggcgggcuaaacaaaucaaagccguauuacacaggaaagcacgccaaagcaaucggcaacugcccuaucuggguuaagacuccccucaaacuggcuaaugguaccaaguaucgcccuccagccaaacuucugaaggagcgaggguuuuucggcgcgauugccggauuuuuggagggcgggugggaaggaaugauagcagguuggcacggcuacacaagccauggggcucacggaguggccgucgcugccgaccucaagaguacucaggaggcaaucaacaaaauuaccaagaaucugaacucuuuauccgaacuggaggugaaaaaucuccagagacuuagcggcgccauggaugaacugcauaacgagaucuuggagcuagacgaaaagguagaugaccugagggcugauacaauaucgucucaaauugagcucgcgguucugcuuuccaaugaagguaucaucaacucagaggacgaacaccuguuggcacucgagcggaaacugaagaagauguuagggcccagugccguggauauuggcaauggauguuucgagaccaaacacaagugcaaccagacuugccuggaccguaucgcugccggcacguuuaaugcaggggaguucagccuaccaacauuugauucccucaacauuaccgccgcuucucugaaugacgauggacuugacaaccauacuauauugcuguauuacagcaccgccgcaucaagucucgcggucacacugaugcuugcuaucuucauuguguauauggucucccgcgacaaugugagcuguucuaucugccuguga

SEQ ID NO: 156440 - RNA, 1755 nt, Artificial Sequence
  derived and/or modified CDS sequence (opt3) from hemagglutinin__InfluenzaB__AKU40647
augaaggccaucauugugcugcucauggucguuaccagcaacgcugacagaauaugcacaggcaucacuuccucuaauucaccccacgugguaaaaacggcaacccagggggaagugaacgucacaggagugauuccucuuacuaccacaccaaccaagaguuacuucgccaaucugaaagguacuaggacacggggcaaguuguguccggauugcuuaaacuguaccgaccuggauguugcgcuagggcgccccaugugcgugggaacgacuccuagcgcuaaagccuccauccuccaugaaguccgaccagugaccucuggcuguuuucccauuaugcacgaccguacaaagaucagacaacugccuaaucuucugagggguuaugagaagauacgguugucgacucagaacguaaucgaugcagaaaaagccccagggggacccuaccgccucggcaccucaggcagcugcccuaaugcuacaaguaagauuggguucuuugcaaccauggccugggcuguuccaaaagacaacuauaagaaugccacgaacccgcagacuguggagauccccuacauuuguacagaaggagaggaucagaucaccgucugggguuuccauuccgacaauaaaacucaaaugaagucucuguauggcgauagcaacccucagaaguuuacauccucagcgaauggggugaccacgcacuacgugagucagauaggagacuucccagaucagaccgaggacggcggucugccccaaagcgggagaauugucguugauuauaugaugcagaaaccuggaaagacaggcacuaucguguaccagaggggcguacucuuaccacagaaaguguggugcgcaucugggcgguccaaggucauuaaaggaucacugccccuuaucggugaagccgacuguuugcaugaggaauacggcgggcugaacaagagcaaaccguauuacaccggaaagcacgcuaaggccaucggcaauugcccuauuugggugaaaacaccccuaaagcucgcaaacgguacuaaauaucgcccuccagcuaagcugcuuaaagagcgaggguuuuucggcgccauagcgggauuucuggagggcgggugggaaggaaugaucgccgguuggcacggcuacaccagucauggggcacacggaguugcuguggccgcugacuugaagucuacacaagaggccauuaacaagaucaccaaaaaucucaacucccugagcgaauuagaggucaagaaucugcagagacucucgggcgcaauggaugaacuucauaacgagauacuggaguuggacgaaaaaguggaugaccuaagggccgauacuauuucuucccagaucgagcuggcuguacuccugucaaaugaagguaucauuaacagugaggacgaacaccuucuggcguuggagcggaagcucaaaaagaugcuggggcccagcgcaguugauaucggcaauggauguuucgagacgaagcacaaaugcaaccaaacaugcuuagaccguauugccgcuggcaccuuuaaugccggggaguucucccugccaacuuuugauucucuaaacauaaccgcagccagccucaaugacgauggacuggacaaccauacaauccuuuuguauuacucaaccgcugccaguucccuggcagugacucucaugcuggcgauuuucaucgucuauauggugagccgcgacaaugucucuuguucaaucugccuuuga

SEQ ID NO: 156441 - RNA, 1755 nt, Artificial Sequence; identical to SEQ ID NO: 156337
  derived and/or modified CDS sequence (opt3) from hemagglutinin__InfluenzaB__AKU40658

SEQ ID NO: 156442 - RNA, 1755 nt, Artificial Sequence; identical to SEQ ID NO: 156337
  derived and/or modified CDS sequence (opt3) from hemagglutinin__InfluenzaB__AKU40669

SEQ ID NO: 156443 - RNA, 1755 nt, Artificial Sequence; identical to SEQ ID NO: 156337
  derived and/or modified CDS sequence (opt3) from hemagglutinin__InfluenzaB__AKU40680

SEQ ID NO: 156444 - RNA, 1755 nt, Artificial Sequence
  derived and/or modified CDS sequence (opt3) from hemagglutinin__InfluenzaB__AKU40691
augaaggccaucauugugcugcucauggucguuaccagcaacgcugacagaauaugcacaggcaucacuuccucuaauucaccccacgugguaaaaacggcaacccagggggaggugaacgucacaggagugauuccucuuacuaccacaccaaccaagaguuacuucgccaaucugaaagguacuaggacacggggcaaguuguguccggauugcuuaaacuguaccgaccuggauguugcgcuagggcgccccaugugcgugggaacgacuccuagcgcuaaagccuccauccuccaugaaguccgaccagugaccucuggcuguuuucccauuaugcacgaccguacaaagaucagacaacugccuaaucuucugagggguuaugagaagauacgguugucgacucagaacguaaucgaugcagaaaaagccccagggggacccuaccgccucggcaccucaggcagcugcccuaaugcuacaaguaagauuggguucuuugcaaccauggccugggcuguuccaaaagacaacuauaagaaugccacgaacccgcagacuguggagguccccuacaucuguacagaaggagaggaucagauuaccgugugggguuuccauuccgacaauaaaacucaaaugaagucucuguauggcgauagcaacccucagaaguuuacauccucagcgaauggggugaccacgcacuacgucagucagaucggagacuucccagaucagaccgaggacggcggucugccccaaagcgggagaauaguuguggauuauaugaugcagaaaccuggaaagacaggcacuauuguauaccagaggggcgugcucuuaccacagaaagucuggugcgcaucugggcgguccaaggugaucaaaggaucacugccccuuauuggugaagccgacuguuugcaugaggaauacggcgggcugaacaagagcaaaccguauuacaccggaaagcacgcuaaggccaucggcaauugcccuaucuggguuaaaacaccccuaaagcucgcaaacgguacuaaauaucgcccuccagcuaagcugcuuaaagagcgaggguuuuucggcgccauugcgggauuucuggagggcgggugggaaggaaugauagccgguuggcacggcuacaccagucauggggcacacggaguggcugucgccgcugacuugaagucuacacaagaggccaucaacaagauuaccaaaaaucucaacucccugagcgaauuagaggugaagaaucugcagagacucucgggcgcaauggaugaguuccauaacgaaauccuugagcuggacgaaaaaguagaugacuugagggccgauacuauaucuucccagauugagcuagcuguucugcucucaaaugaagguaucaucaacagugaggacgaacaucugcuugcgcuggagcggaaguugaaaaagaugcucgggcccagcgcaguggauauuggcaauggauguuuugagacgaagcacaaaugcaaccaaacaugccuggaccguaucgccgcuggcaccuucaaugccggggaauuuuccuuaccaacuuucgauucucugaacauuaccgcagccagccuaaaugacgauggacucgacaaccacacaauacugcuuuauuacucaaccgcugccaguuccuuggcagucacucugaugcucgcgaucuucauuguguauauggucagccgcgacaaugugucuuguucaaucugccuguga

SEQ ID NO: 156445 - RNA, 1755 nt, Artificial Sequence; identical to SEQ ID NO: 156337
  derived and/or modified CDS sequence (opt3) from hemagglutinin__InfluenzaB__AKU40702

SEQ ID NO: 156446 - RNA, 1755 nt, Artificial Sequence; identical to SEQ ID NO: 156337
  derived and/or modified CDS sequence (opt3) from hemagglutinin__InfluenzaB__AKU40713

SEQ ID NO: 156447 - RNA, 1755 nt, Artificial Sequence; identical to SEQ ID NO: 156177
  derived and/or modified CDS sequence (opt3) from hemagglutinin__InfluenzaB__AKU40724

SEQ ID NO: 156448 - RNA, 1755 nt, Artificial Sequence; identical to SEQ ID NO: 156440
  derived and/or modified CDS sequence (opt3) from hemagglutinin__InfluenzaB__AKU40735

SEQ ID NO: 156449 - RNA, 1755 nt, Artificial Sequence; identical to SEQ ID NO: 156337
  derived and/or modified CDS sequence (opt3) from hemagglutinin__InfluenzaB__AKU40746

SEQ ID NO: 156450 - RNA, 1755 nt, Artificial Sequence; identical to SEQ ID NO: 156337
  derived and/or modified CDS sequence (opt3) from hemagglutinin__InfluenzaB__AKU40757

SEQ ID NO: 156451 - RNA, 1755 nt, Artificial Sequence; identical to SEQ ID NO: 156337
  derived and/or modified CDS sequence (opt3) from hemagglutinin__InfluenzaB__AKU40768

SEQ ID NO: 156452 - RNA, 1755 nt, Artificial Sequence; identical to SEQ ID NO: 156337
  derived and/or modified CDS sequence (opt3) from hemagglutinin__InfluenzaB__AKU40779

SEQ ID NO: 156453 - RNA, 1755 nt, Artificial Sequence; identical to SEQ ID NO: 156177
  derived and/or modified CDS sequence (opt3) from hemagglutinin__InfluenzaB__AKU40790

SEQ ID NO: 156454 - RNA, 1755 nt, Artificial Sequence; identical to SEQ ID NO: 156337
  derived and/or modified CDS sequence (opt3) from hemagglutinin__InfluenzaB__AKU40801

SEQ ID NO: 156455 - RNA, 1755 nt, Artificial Sequence
  derived and/or modified CDS sequence (opt3) from hemagglutinin__InfluenzaB__AKU40812
augaaggccaucauugugcugcucauggucguuaccagcaacgcugacagaauaugcacaggcaucacuuccucuaauucaccccacgugguaaaaacggcaacccagggggaagugaacgucacaggagugauuccucuuacuaccacaccaaccaagaguuacuucgccaaucugaaagguacuaggacacggggcaaguuguguccggauugcuuaaacuguaccgaccuggauguugcgcuagggcgccccaugugcgugggaacgacuccuagcgcuaaagccuccauccuccaugaaguccgaccagugaccucuggcuguuuucccauuaugcacgaccguacaaagaucagacaacugccuaaucuucugagggguuaugagaagauacgguugucgacucagaacguaaucgaugcagaaaaagccccagggggacccuaccgccucggcaccucaggcagcugcccuaaugcuacaaguaagauuggguucuuugcaaccauggccugggcuguuccaaaagacaacuauaagaaugccacgaacccgcagacuguggagguccccuacaucuguacagaaggagaggaucagauuaccgugugggguuuccauuccgacaauaaaacucaaaugaagucucuguauggcgauagcaacccucagaaguuuacauccucagcgaauggggugaccacgcacuacgucagucagaucggagacuucccagaucagaccgaggacggcggucugccccaaagcgggagaauaguuguggauuauaugaugcagaaaccuggaaagacaggcacuauuguauaccagaggggcgugcucuuaccacagaaagucuggugcgcaucugggcgguccaaggugaucaaaggaucacugccccuuauuggugaagccgacuguuugcaugaggaauacggcgggcugaacaagagcaaaccguauuacaccggaaagcacgcuaaggccaucggcaauugcccuaucuggguuaaaacaccccuaaagcucgcaaacgguacuaaauaucgcccuccagcuaagcugcuuaaagagcgaggguuuuucggcgccauugcgggauuucuggagggcgggugggaaggaaugauagccgguuggcacggcuacaccagucauggggcacacggaguggcugucgccgcugacuugaagucuacacaagaggccaucaacaagauuaccaaaaaucucaacucccugagcgaauuagaggugaagaaucugcagagacucucgggcgcaauggaugaacuucauaacgagauccuggaguuggacgaaaaaguagaugaccuaagggccgauacuauaucuucccagauugagcuggcuguucuccugucaaaugaagguaucaucaacagugaggacgaacaccuucuggcguuggagcggaagcucaaaaagaugcuggggcccagcgcaguggauauuggcaauggauguuucgagacgaagcacaaaugcaaccaaacaugcuuagaccguaucgccgcuggcaccuuuaaugccggggaguucucccugccaacuuuugauucucuaaacauuaccgcagccagccucaaugacgauggacuggacucacauacaauacuuuuguauuacaguaccgcugccuccagccuggcagucacucucaugcuggcgaucuucauuguguauauggucucucgcgacaacgugucauguaguaucugccuuuga

SEQ ID NO: 156456 - RNA, 1755 nt, Artificial Sequence; identical to SEQ ID NO: 156337
  derived and/or modified CDS sequence (opt3) from hemagglutinin__InfluenzaB__AKU40823

SEQ ID NO: 156457 - RNA, 1755 nt, Artificial Sequence; identical to SEQ ID NO: 156337
  derived and/or modified CDS sequence (opt3) from hemagglutinin__InfluenzaB__AKU40834

SEQ ID NO: 156458 - RNA, 1755 nt, Artificial Sequence; identical to SEQ ID NO: 156337
  derived and/or modified CDS sequence (opt3) from hemagglutinin__InfluenzaB__AKU40845

SEQ ID NO: 156459 - RNA, 1755 nt, Artificial Sequence; identical to SEQ ID NO: 156337
  derived and/or modified CDS sequence (opt3) from hemagglutinin__InfluenzaB__AKU40856

SEQ ID NO: 156460 - RNA, 1755 nt, Artificial Sequence; identical to SEQ ID NO: 156337
  derived and/or modified CDS sequence (opt3) from hemagglutinin__InfluenzaB__AKU40867

SEQ ID NO: 156461 - RNA, 1755 nt, Artificial Sequence; identical to SEQ ID NO: 156337
  derived and/or modified CDS sequence (opt3) from hemagglutinin__InfluenzaB__AKU40878

SEQ ID NO: 156462 - RNA, 1758 nt, Artificial Sequence
  derived and/or modified CDS sequence (opt3) from hemagglutinin__InfluenzaB__AKU40889
augaaggccaucauugugcugcucauggucguuaccagcaacgcugacagaauaugcacaggcaucacuuccucuaauucaccccacgugguaaaaacggcaacccagggggaggugaacgucacaggagugauuccucuuacuaccacaccaaccaagagucauuucgccaaucugaaagguacugaaacaaggggcaaguuguguccgaaaugcuuaaacuguaccgaucuggacguugcgcuagggcggcccaagugcacgggaaagaucccuagcgcucgcguguccauucuccacgagguccgaccagugacuucuggcuguuuucccaucaugcaugaucguaccaaaauaagacaacugccuaaucuucugagggguuacgaacacauccgguugucgacacauaacguaauuaaugccgaggacgcaccagggggacccuauaagaucggcacuucaggcagcugcccuaacguuaccaaugggaacggauucuuugccacaauggcuugggcagugccgaaaaaugauaagaacaaaaccgccacgaauccacucacuacagaaguccccuacauuuguaccgagggugaggaccagaucacuguguggggcuuccacagugauaacgaaacacagauggcuaagcuguauggggacuccaagccucagaaauuuaccucuagcgccaauggagugacgacccacuacgucucccaaauaggcgguuucccaaaccagacagaggaugggggacugccccagucaggccgcauuguuguggacuauaugguacagaagaguggcaaaacugggaccaucacauaccaaagagguauucucuuaccucagaagguguggugcgcgagcggaaggucuaaagucaucaagggcucccugccacuuaucggggaagcagauuguuugcaugagaaauauggaggccugaacaagucaaagcccuacuacacuggugagcacgccaaagcuauugggaauugcccgauaugggugaagaccccucuaaaacucgccaacggcacaaaguaucggcccccagcaaaacugcuuaaggaacgcggauuuuucggcgcuaucgccggguuucuggagggagguugggaaggcaugauugcgggguggcauggauacaccagccacggcgcccacgguguugcaguggcugccgacuugaagaguacucaggaggcuaucaauaaaauaacgaagaaccucaauucucuguccgaauuagaggucaaaaaccugcagcgacucagcggggccauggaugagcuucauaaugaaauucuggaguuggacgaaaagguggacgaucuaagagcagacacaaucucgucucaaaucgagcuggccguacuccuguccaacgaaggcauuaucaauucagaggaugagcaccuucuggcuuuggaaaggaaacucaagaagaugcugggaccuagugcgguugagauuggcaacggguguuucgaaaccaaacauaagugcaaucagacuugcuuagaccggauagcagccggaaccuuugaugcuggugaguucagccugcccacauuugacucccuaaacaucaccgccgcaucucucaaugaugacggccuggauaaccacacuauucuuuuguauuacagcacagccgcuucaagucuggccgugacgcucaugaucgcaaucuucgucguguauauggucucccgugacaaugugagcuguucuauuugccuguga

SEQ ID NO: 156463 - RNA, 1755 nt, Artificial Sequence; identical to SEQ ID NO: 156337
  derived and/or modified CDS sequence (opt3) from hemagglutinin__InfluenzaB__AKU40900

SEQ ID NO: 156464 - RNA, 1755 nt, Artificial Sequence; identical to SEQ ID NO: 156177
  derived and/or modified CDS sequence (opt3) from hemagglutinin__InfluenzaB__AKU40911

SEQ ID NO: 156465 - RNA, 1755 nt, Artificial Sequence
  derived and/or modified CDS sequence (opt3) from hemagglutinin__InfluenzaB__AKU40922
augaaggccaucauugugcugcucauggucguuaccagcaacgcugacagaauaugcacaggcaucacuuccucuaauucaccccacgugguaaaaacggugacccagggggaagucaacgugacaggaguuauuccucuuacuaccacaccaaccaagaguuacuucgcaaaucugaaagguacuaggacacggggcaaguuguguccggauugcuuaaacuguaccgaccuggauguggcccuagggcgccccaugugcgucggaacgacuccuagcgcgaaggcuuccauccuccaugaagugcgaccaguaaccucuggcuguuuucccauuaugcacgaccguacaaaaaucagacaacugccuaaucuucugagggguuaugagaagauacgguugucgacucagaacguuaucgaugccgaaaaagcaccagggggacccuaccgccucggcaccucaggcagcugcccuaaugccacaaguaagauuggguucuuugcuaccauggcaugggccgugccaaaagacaacuauaagaaugcuacgaacccgcagacugucgaggugcccuacaucuguacagaaggagaggaucagauuaccgugugggguuuccauuccgacaauaaaacucaaaugaagucucuguauggcgauagcaacccucagaaguuuacauccucagccaauggggucaccacgcacuacguuagucagaucggagacuucccagaucagaccgaggacggcggucugccccaaagcgggagaauagugguagauuauaugaugcagaaaccuggaaagacaggcacuauuguguaccagaggggcguccucuuaccacagaaaguguggugcgcgucugggcgguccaagguuaucaaaggaucacugccccuuauuggugaagcagacuguuugcaugaggaauacggcgggcugaacaagagcaaaccguauuacaccggaaagcacgccaaggcuaucggcaauugcccuaucugggugaaaacaccccuaaagcucgccaacgguacuaaauaucgcccuccagcaaagcugcuuaaagagcgaggguuuuucggcgcuauugccggauuucuggagggcgggugggaaggaaugauagcggguuggcacggcuacaccagucauggggcccacggagucgcaguggcugccgacuugaagucuacacaagaggcuaucaacaagauuaccaaaaaucucaacucccugagcgaauuagagguaaagaaucugcagagacucucgggcgccauggaugaacuucauaacgagauccuggaguuggacgaaaaaguugaugaccuaagggcagauacuauaucuucccagauugagcuggccgugcuccugucaaaugaagguaucaucaacagugaggacgaacaccuucuggcuuuggagcggaagcucaaaaagaugcuggggcccagcgcggucgauauuggcaauggauguuucgagacgaagcacaaaugcaaccaaacaugcuuagaccguaucgcagccggcaccuuuaaugcuggggaguucucccugccaacuuuugauucucuaaacauuaccgccgcaagccucaaugacgauggacuggacaaccauacaauacuuuuguauuacucaaccgccgcuaguucccuggccgugacucucaugcuggcaaucuucauugucuauauggugagccgcgacaauguuucuuguucaaucugccuuuga

SEQ ID NO: 156466 - RNA, 1755 nt, Artificial Sequence; identical to SEQ ID NO: 156440
  derived and/or modified CDS sequence (opt3) from hemagglutinin__InfluenzaB__AKU40933

SEQ ID NO: 156467 - RNA, 1755 nt, Artificial Sequence; identical to SEQ ID NO: 156337
  derived and/or modified CDS sequence (opt3) from hemagglutinin__InfluenzaB__AKU40944

SEQ ID NO: 156468 - RNA, 1755 nt, Artificial Sequence; identical to SEQ ID NO: 156337
  derived and/or modified CDS sequence (opt3) from hemagglutinin__InfluenzaB__AKU40955

SEQ ID NO: 156469 - RNA, 1755 nt, Artificial Sequence; identical to SEQ ID NO: 156337
  derived and/or modified CDS sequence (opt3) from hemagglutinin__InfluenzaB__AKU40966

SEQ ID NO: 156470 - RNA, 1755 nt, Artificial Sequence; identical to SEQ ID NO: 156337
  derived and/or modified CDS sequence (opt3) from hemagglutinin__InfluenzaB__AKU40977

SEQ ID NO: 156471 - RNA, 1755 nt, Artificial Sequence; identical to SEQ ID NO: 156337
  derived and/or modified CDS sequence (opt3) from hemagglutinin__InfluenzaB__AKU40987

SEQ ID NO: 156472 - RNA, 1755 nt, Artificial Sequence; identical to SEQ ID NO: 156337
  derived and/or modified CDS sequence (opt3) from hemagglutinin__InfluenzaB__AKU40998

SEQ ID NO: 156473 - RNA, 1755 nt, Artificial Sequence; identical to SEQ ID NO: 156337
  derived and/or modified CDS sequence (opt3) from hemagglutinin__InfluenzaB__AKU41009

SEQ ID NO: 156474 - RNA, 1755 nt, Artificial Sequence; identical to SEQ ID NO: 156337
  derived and/or modified CDS sequence (opt3) from hemagglutinin__InfluenzaB__AKU41020

SEQ ID NO: 156475 - RNA, 1755 nt, Artificial Sequence; identical to SEQ ID NO: 156337
  derived and/or modified CDS sequence (opt3) from hemagglutinin__InfluenzaB__ALA08485

SEQ ID NO: 156476 - RNA, 1755 nt, Artificial Sequence; identical to SEQ ID NO: 156337
  derived and/or modified CDS sequence (opt3) from hemagglutinin__InfluenzaB__ALA08486

SEQ ID NO: 156477 - RNA, 1755 nt, Artificial Sequence; identical to SEQ ID NO: 156337
  derived and/or modified CDS sequence (opt3) from hemagglutinin__InfluenzaB__ALA08487

SEQ ID NO: 156478 - RNA, 1755 nt, Artificial Sequence; identical to SEQ ID NO: 156337
  derived and/or modified CDS sequence (opt3) from hemagglutinin__InfluenzaB__ALA08564

SEQ ID NO: 156479 - RNA, 1755 nt, Artificial Sequence; identical to SEQ ID NO: 156337
  derived and/or modified CDS sequence (opt3) from hemagglutinin__InfluenzaB__ALA08565

SEQ ID NO: 156480 - RNA, 1755 nt, Artificial Sequence; identical to SEQ ID NO: 156337
  derived and/or modified CDS sequence (opt3) from hemagglutinin__InfluenzaB__ALA08566

SEQ ID NO: 156481 - RNA, 1755 nt, Artificial Sequence; identical to SEQ ID NO: 156337
  derived and/or modified CDS sequence (opt3) from hemagglutinin__InfluenzaB__ALA08567

SEQ ID NO: 156482 - RNA, 1755 nt, Artificial Sequence; identical to SEQ ID NO: 156337
  derived and/or modified CDS sequence (opt3) from hemagglutinin__InfluenzaB__ALA08568

SEQ ID NO: 156483 - RNA, 1755 nt, Artificial Sequence; identical to SEQ ID NO: 156337
  derived and/or modified CDS sequence (opt3) from hemagglutinin__InfluenzaB__ALA08569

SEQ ID NO: 156484 - RNA, 1758 nt, Artificial Sequence
  derived and/or modified CDS sequence (opt3) from hemagglutinin__InfluenzaB__ALA08689
augaaggccaucauugugcugcucauggucguuaccagcaacgcugacagaauaugcacaggcaucacuuccucuaauucaccccacgugguaaaaacggcaacccagggggaggugaacgucacaggagugauuccucuuacuaccacaccaaccaagagucauuucgccaaucugaaagguacugaaacaaggggcaaguuguguccgaaaugccccaacuguaccgauuuagacguugcgcuggggcggccuaagugcacgggaaagaucccaagcgcucgcguguccauucuacacgagguccgacccgugacuucuggcuguuuuccuaucaugcaugaucguaccaaaauaagacaacucccaaaucugcuuagggguuacgaacacauccggcugucgacacauaacguaauuaaugccgagaacgcacccgggggaccuuauaagaucggcacuucaggcagcugcccaaauguuaccaacgggaauggauucuuugccacaauggcuugggcagugccgaaaaacgacaagaauaaaaccgccacgaaccccuugacuauugaagucccuuacaucuguacagagggugaggaucagauaaccguguggggcuuccacagugacaaugaaacucagauggcuaagcucuauggggauuccaacccacagaaguuuacaucuagcgccaacggagugaccacgcacuacgucucccaaauuggcgguuuccccaaucagaccgaggacgggggacugccucagucaggccgcaucguuguggauuauaugguacagaaaaguggcaagacagggacuauuaccuaccaaagaggaauccugcucccacagaaaguguggugcgcgagcgguaggucuaaggucaucaaaggcuccuuaccccugauuggggaagcagacugucuucaugagaaguauggaggcuugaacaaaucaaagccguacuacacaggugagcacgccaaggcuauagggaauugcccuaucugggugaaaacuccccugaagcuagccaacggcaccaaauaucggccuccagcaaagcuccugaaagaacgcggauuuuucggcgcuauugccggguuucuugagggagguugggaaggcaugaucgcgggguggcauggauacacaagccacggcgcccacgguguugcaguggcugccgaucugaagaguacccaggaggcuauaaauaagauuacuaaaaaccuuaauucucucuccgaacuggaggucaagaacuuacagcgacugagcggggccauggacgagcuccauaaugaaauccuugagcuggaugaaaaaguggacgacuugagagcagauacgaucucgucucaaauugagcuagccguacugcucuccaacgaaggcaucauuaauucagaggacgagcaccuguuggcucuggaaaggaaguugaaaaagaugcucggacccagugcgguugagauaggcaacggguguuucgaaacaaagcauaaaugcaaucagaccugccuggaucggaucgcagccggaacuuuugacgcuggugaguucagcuuaccaaccuuugauucccugaacauuacagccgcaucucuaaaugacgauggccucgacaaccacaccauccugcuuuauuacagcacugccgcuucaaguuuggccgugacacugaugaucgcaauuuucgucguguauauggucucccgugauaacgugagcuguucuauaugccucuga

SEQ ID NO: 156485 - RNA, 1758 nt, Artificial Sequence
  derived and/or modified CDS sequence (opt3) from hemagglutinin__InfluenzaB__ALA08690
augaaggccaucauugugcugcucauggucguuaccagcaacgcugacagaauaugcacaggcaucacuuccucuaauucaccccacgugguaaaaacggcaacccagggggaggugaacgucacaggagugauuccucuuacuaccacaccaaccaagagucauuucgccaaucugaaagguacugaaacaaggggcaaguuguguccgaaaugcuuaaacuguaccgaucuggacguugcgcuagggcggcccaagugcacgggaaagaucccuagcgcucgcguguccauucuccacgagguccgaccagugacuucuggcuguuuucccaucaugcaugaucguaccaaaauaagacaacugccuaaucuucugagggguuacgaacacauccgguugucgacacauaacguaauuaaugccgaggacgcaccagggggacccuauaagaucggcacuucaggcagcugcccuaacauuaccaaugggaacggauucuuugccacaauggcuugggcaguucagaaaaaugauaagaacaaaaccgccacgaauccacucacuaucgaagugccguacauauguacagagggugaggaccagauuaccgucuggggcuuccacagugauaacgaaacucagauggcuaagcuguauggggacuccaagccccaaaaauuuacaucuagcgccaauggagugaccacgcacuacgugucccagaucggcgguuucccuaaccagaccgaggaugggggacugccacagucaggccgcauugucguugacuauauggugcaaaagaguggcaaaacagggacuaucaccuaccagagaggaauccucuuaccccagaagguauggugcgcgagcgguaggucuaaagugauuaagggcucccugccucuuauaggggaagcagauuguuugcaugagaaauauggaggccugaacaagucaaagccauacuacacaggugagcacgccaaagcuaucgggaauugccccauuugggucaagacuccgcuaaaacucgccaacggcaccaaguaucggccucccgcaaaacugcuuaaggaacgcggauuuuucggcgcuaucgccggguuucuggagggagguugggaaggcaugauagcgggguggcauggauacacaagccacggcgcccacgguguggcaguugcugccgacuugaagaguacccaggaggcuauuaauaaaaucacuaagaaccucaauucucuguccgaauuagaggugaaaaaccugcaacgacucagcggggccauggaugagcuucauaaugaaauccuggaguuggacgaaaaggucgacgaucuaagagcagacacgauuucgucucagaucgagcuggccgugcuccuguccaacgaaggcauuauaaauucagaggaugagcaccuucuggcuuuggaaaggaaacucaagaagaugcugggaccaagugcgguagagaucggcaacggguguuucgaaacaaaacauaagugcaaucagaccugcuuagaccggauugcagccggaacuuuugaugcuggugaguucagccugccuaccuuugacucccuaaacaucacagccgcaucucucaaugaugacggccuggaugaccacaccauccuuuuguauuacagcacugccgcuucaagucuggccguuacacucaugauugcaauauucguggucuauauggugucccgugauaacgucagcuguucuaucugccuguga

SEQ ID NO: 156486 - RNA, 1755 nt, Artificial Sequence; identical to SEQ ID NO: 156337
  derived and/or modified CDS sequence (opt3) from hemagglutinin__InfluenzaB__ALE31766

SEQ ID NO: 156487 - RNA, 1758 nt, Artificial Sequence
  derived and/or modified CDS sequence (opt3) from hemagglutinin__InfluenzaB__ALE31768
augaaggccaucauugugcugcucauggucguuaccagcaacgcugacagaauaugcacaggcaucacuuccucuaauucaccccacgugguaaaaacggcaacccagggggaggugaacgucacaggagugauuccucuuacuaccacaccaaccaagagucauuucgccaaucugaaagguacugaaacaaggggcaaguuguguccgaaaugcuuaaacuguaccgaucuggacguugcgcuagggcggcccaagugcacgggaaagaucccuagcgcucgcguguccauucuccacgagguccgaccagugacuucuggcuguuuucccaucaugcaugaucguaccaaaauaagacaacugccuaaucuucugagggguuacgaacacauccgguugucgacacauaacguaauuaaugccgaggacgcaccagggggacccuauaagaucggcacuucaggcagcugcccuaacauuaccaaugggaacggauucuuugccacaauggcuugggcaguuccgaaaaaugauaagaacaaaaccgccacgaauccacucacuaucgaagugcccuacauauguacagagggugaggaccagauuaccgucuggggcuuccacagugauaacgaaacucagauggcuaagcuguauggggacuccaagccucagaaauuuacaucuagcgccaauggagugaccacgcacuacgugucccaaaucggcgguuucccaaaccagaccgaggaugggggacugccccagucaggccgcauugucguugacuauauggugcagaagaguggcaaaacagggacuaucaccuaccaaagaggaauccucuuaccucagaagguauggugcgcgagcgguaggucuaaagugauuaagggcucccugccacuuauaggggaagcagauuguuugcaugagaaauauggaggccugaacaagucaaagcccuacuacacaggugagcacgccaaagcuaucgggaauugcccgauuugggucaagacuccucuaaaacucgccaacggcaccaaguaucggcccccagcaaaacugcuuaaggaacgcggauuuuucggcgcuaucgccggguuucuggagggagguugggaaggcaugauagcgggguggcauggauacacaagccacggcgcccacgguguggcaguugcugccgacuugaagaguacccaggaggcuauuaauaaaaucacuaagaaccucaauucucuguccgaauuagaggugaaaaaccugcagcgacucagcggggccauggaugagcuucauaaugaaauccuggaguuggacgaaaaggucgacgaucuaagagcagacacgauuucgucucaaaucgagcuggccgugcuccuguccaacgaaggcauuauaaauucagaggaugagcaccuucuggcuuuggaaaggaaacucaagaagaugcugggaccuagugcgguagagaucggcaacggguguuucgaaacaaaacauaagugcaaucagaccugcuuagaccggauugcagccggaacuuuugaugcuggugaguucagccugcccaccuuugacucccuaaacaucacagccgcaucucucaaugaugacggccuggauaaccacaccauccuuuuguauuacagcacugccgcuucaagucuggccguuacacucaugauugcaauauucguggucuauauggugucccgugacaaugucagcuguucuaucugccuguga

SEQ ID NO: 156488 - RNA, 1758 nt, Artificial Sequence
  derived and/or modified CDS sequence (opt3) from hemagglutinin__InfluenzaB__ALE31770
augaaggccaucauugugcugcucauggucguuaccagcaacgcugacagaauaugcacaggcaucacuuccucuaauucaccccacgugguaaaaacggcaacccagggggaggugaacgucacaggagugauuccucuuacuaccacaccaaccaagagucauuucgccaaucugaaagguacugaaacaaggggcaaguuguguccgaaaugcuuaaacuguaccgaucuggacguugcgcuagggcggcccaagugcacgggaaagaucccuagcgcucgcguguccauucuccacgagguccgaccagugacuucuggcuguuuucccaucaugcaugaucguaccaaaauaagacaacugccuaaucuucugagggguuacgaacacaucucguugucaacacauaacguaauuaaugccgaggacgcaccagggggacccuauaagaucggcacuagcggcaguugcccuaacguuaccaaugggaacggauucuuugccacaauggcuugggcagugccaaagaaugauaagaacaaaaccgccacgaauccgcucacuauugaaguccccuacaucuguacagagggugaggaccagauaaccguguggggcuuccacuccgauaacgaaacucagauggcuaagcuguauggggacucuaagccucagaaauuuacaagcuccgccaauggagugaccacgcacuacgucucacaaauuggcgguuucccaaaccagaccgaggaugggggacugccccagaguggccggaucguuguggacuauaugguacagaaaagcggcaaaacagggacuauuaccuaccaacgcggaauccucuuaccucagaagguguggugcgcgucugguagauccaaagucaucaagggcucacugccacuuauuggggaagcagauuguuugcaugagaaauauggaggccugaacaagagcaagcccuacuacacaggugagcacgccaaagcuauagggaauugcccgaucugggugaagacuccucuaaaacucgccaacggcaccaaguauaggcccccagcaaaacugcuuaaggaacggggauuuuucggcgcuauugccggguuucuggagggagguugggaaggcaugaucgcgggguggcauggauacacaagucacggcgcccacgguguugcaguggcugccgacuugaagucuacccaggaggcuauaaauaaaauuacuaagaaccucaauucccugagcgaauuagaggucaaaaaccugcagcgccucucgggggccauggaugagcuucauaaugaaauccuggaguuggacgaaaagguggacgaucuacgagcagacacgaucucuucccaaauugagcuggccguacuccugucaaacgaaggcaucauuaauagugaggaugagcaccuucuggcuuuggaaagaaaacucaagaagaugcugggaccuagcgcgguugagauaggcaacggguguuucgaaacaaaacauaagugcaaucagaccugcuuagacaggaucgcagccggaacuuuugaugcuggugaguucucccugcccaccuuugacucucuaaacauuacagccgcaagccucaaugaugacggccuggauaaccacaccauccuuuuguauuacucaacugccgcuaguucccuggccgugacacucaugaucgcaauuuucgucguguauauggucagccgggacaaugugucuuguucaauaugccuguga

SEQ ID NO: 156489 - RNA, 1755 nt, Artificial Sequence; identical to SEQ ID NO: 156337
  derived and/or modified CDS sequence (opt3) from hemagglutinin__InfluenzaB__ALE31772

SEQ ID NO: 156490 - RNA, 1755 nt, Artificial Sequence; identical to SEQ ID NO: 156337
  derived and/or modified CDS sequence (opt3) from hemagglutinin__InfluenzaB__ALE31773

SEQ ID NO: 156491 - RNA, 1755 nt, Artificial Sequence
  derived and/or modified CDS sequence (opt3) from hemagglutinin__InfluenzaB__ALE31884
augaaggccaucauugugcugcucauggucguuaccagcaacgcugacagaauaugcacaggcaucacuuccucuaauucaccccacgugguaaaaacggcaacccagggggaagugaacgucacaggagugauuccucuuacuaccacaccaaccaagaguuacuucgccaaucugaaagguacuaggacacggggcaaguuguguccggauugcuuaaacuguaccgaccuggauguugcgcuagggcgccccaugugcgugggaacgacuccuagcgcuaaagccuccauccuccaugaaguccgaccagugaccucuggcuguuuucccauuaugcacgaccguacaaagaucagacaacugccuaaucuucugagggguuaugagaagauacgguugucgacucagaacguaaucgaugcagaaaaagccccagggggacccuaccgccucggcaccucaggcagcugcccuaaugcuacaaguaagauuggguucuuugcaaccauggccugggcuguuccaaaagacaacuauaagaaugccacgaacccgcagacuguggagguccccuacaucuguacagaaggagaggaucagauuaccgugugggguuuccauuccgacaauaaaacucaaaugaagucucuguauggcgauagcaacccucagaaguuuacauccucagcgaauggggugaccacgcacuacgucagucagaucggagacuucccagaucagaccgaggacggcggucugccccaaagcgggagaauaguuguggauuauaugaugcagaaaccuggaaagacaggcacuauuguauaccagaggggcgugcucuuaccacagaaagucuggugcgcaucugggcgguccaaggugaucaaaggaucacugccccuuauuggugaagccgacuguuugcaugaggaauacggcgggcugaacaagagcaaaccguauuacaccggaaagcacgcuaaggccaucggcaauugcccuaucuggguuaaaacaccccuaaagcucgcaaacgguacuaaauaucgcccuccagcuaagcugcuuaaagagcgaggguuuuucggcgccauugcgggauuucuggagggcgggugggaaggaaugauagccgguuggcacggcuacaccagucauggggcacacggaguggcugucgccgcugacuugaagucuacacaagaggccaucaacaagauuaccaaaaaucucaacucccugagcgaauuagaggugaagaaucugcagagacucucgggcgcaauggaugaacuucauaacgagauccuggaguuggacgaaaaaguagaugaccuaagggccgauacuauaucuucccagauugagcuggcuguucuccugucaaaugaagguaucaucaacagugaggacgaacaccuucuggcguuggagcggaagcucaaaaagaugcuggggcccagcgcaguggauauuggcaauggauguuucgagacgaagcacaaaugcaaccaaacaugcuuagaccguaucgccgcuggcaccuuuaaugccggggaguucucccugccaacuuuugauucucuaaacauuaccgcagccagccucaaugacgauggacuggacaaccauacaauacuuuuguauuacucaaccgcugccaguucccuggcagucacucucaugcuggcgaucuucauuguguauauggucagccgcgacaaugugucuuguucaguuugccuuuga

SEQ ID NO: 156492 - RNA, 1755 nt, Artificial Sequence
  derived and/or modified CDS sequence (opt3) from hemagglutinin__InfluenzaB__ALE31885
augaaggccaucauugugcugcucauggucguuaccagcaacgcugacagaauaugcacaggcaucacuuccucuaauucaccccacgugguaaaaacggcaacccagggggaagugaacgucacaggagugauuccucuuacuaccacaccaaccaagaguuacuucgccaaucugaaagguacuaggacacggggcaaguuguguccggauugcuuaaacuguaccgaccuggauguugcgcuagggcgccccaugugcgugggaacgacuccuagcgcuaaagccuccauccuccaugaaguccgaccagugaccucuggcuguuuucccauuaugcacgaccguacaaagaucagacaacugccuaaucuucugagggguuaugagaagauacgguugucgacucagaacguaaucgaugcagaaaaagccccagggggacccuaccgccucggcaccucaggcagcugcccuaaugcuacaaguaagauuggguucuuugcaaccauggccugggcuguuccaaaagacaacuauaagaaugccacgaacccgcagacuguggagguccccuacaucuguacagaaggagaggaucagauuaccgugugggguuuccauuccgacaauaaaacucaaaugaagucucuguauggcgauagcaacccucagaaguuuacauccucagcgaauggggugaccacgcacuacgucagucagaucggagacuucccagaucagaccgaggacggcggucugccccaaagcgggagaauaguuguggauuauaugaugcagaaaccuggaaagacaggcacuauuguauaccagaggggcgugcucuuaccacagaaagucuggugcgcaucugggcgguccaaggugaucaaaggaucacugccccuuauuggugaagccgacuguuugcaugaggaauacggcgggcugaacaagagcaaaccguauuacaccggaaagcacgcuaaggccaucggcaauugcccuaucuggguuaaaacaccccuaaagcucgcaaacgguacuaaauaucgcccuccagcuaagcugcuuaaagagcgaggguuuuucggcgccauugcgggauuucuggagggcgggugggaaggaaugauagccgguuggcacggcuacaccagucauggggcacacggaguggcugucgccgcugacuugaagucuacacaagaggccaucaacaagauuaccaaaaaucucaacucccugagcgaauuagaggugaagaaucugcagagacucucgggcgcaauggaugaacuucauaacgagauccuggaguuggacgaaaaaguagaugaccuaagggccgauacuauaucuucccagauugagcuggcuguucuccugucaaaugaagguaucaucaacagugaggacgaacaccuucuggcguuggagcggaagcucaaaaagaugcuggggcccagcgcaguggauauuggcaauggauguuucgagacgaagcacaaaugcaaccaaacaugcuuagaccguaucgccgcuggcaccuuuaaugccggggaguucucccugccaacuuuugauucucuaaacauuaccgcagccagccucaaugacgauggacuggacaaccauacaauacuuuuguauuacucaaccgcugccaguucccuggcagucacucucaugcuggcgaucuucguggucuauauggugagccgcgacaauguuucuuguucaauuugccuuuga

SEQ ID NO: 156493 - RNA, 1755 nt, Artificial Sequence; identical to SEQ ID NO: 156337
  derived and/or modified CDS sequence (opt3) from hemagglutinin__InfluenzaB__ALE31886

SEQ ID NO: 156494 - RNA, 1755 nt, Artificial Sequence
  derived and/or modified CDS sequence (opt3) from hemagglutinin__InfluenzaB__ALE31887
augaaggccaucauugugcugcucauggucguuaccagcaacgcugacagaauaugcacaggcaucacuuccucuaauucaccccacgugguaaaaacggcaacccagggggaaauuaacgugacaggagucaucccucuuacuaccacaccaaccaagaguuacuucgccaaucugaaagguacuaggacacggggcaaguuguguccggauugcuuaaacuguaccgaccuggauguggcgcuagggcgccccaugugcguuggaacgacuccuagcgcuaaagccuccauucuccaugaagugcgaccagucaccucuggcuguuuucccaucaugcacgaccguacaaagauaagacaacugccuaaucuucugagggguuaugagaagauccgguugucgacucagaacgugauugaugcagaaaaagccccagggggacccuaccgccucggcaccucaggcagcugcccuaaugcuacaaguaagaucggguucuuugcaaccauggccugggcuguaccaaaagacaacuauaagaaugccacgaacccgcagacuguugaggugcccuacauuuguacagaaggagaggaucagaucaccgucugggguuuccauuccgacaauaaaacucaaaugaagucucuguauggcgauagcaacccucagaaguuuacauccucagcgaauggggugaccacgcacuacgugagucagauaggagacuucccagaucagaccgaggacggcggucugccccaaagcgggagaauugucguugauuauaugaugcagaaaccuggaaagacaggcacuaucguguaccagaggggcguacucuuaccacagaaaguguggugcgcaucugggcgguccaaggucauuaaaggaucacugccccuuaucggugaagccgacuguuugcaugaggaauacggcgggcugaacaagagcaaaccguauuacaccggaaagcacgcuaaggccaucggcaauugcccuauuugggugaaaacaccccuaaagcucgcaaacgguacuaaauaucgcccuccagcuaagcugcuuaaagagcgaggguuuuucggcgccauagcgggauuucuggagggcgggugggaaggaaugaucgccgguuggcacggcuacaccagucauggggcacacggaguugcuguggccgcugacuugaagucuacacaagaggccauuaacaagaucaccaaaaaucucaacucccugagcgaauuagaggucaagaaucugcagagacucucgggcgcaauggaugaacuucauaacgagauacuggaguuggacgaaaaaguggaugaccuaagggccgauacuauuucuucccagaucgagcuggcuguacuccugucaaaugaagguaucauuaacagugaggacgaacaccuucuggcguuggagcggaagcucaaaaagaugcuggggcccagcgcaguugauaucggcaauggauguuucgagacgaagcacaaaugcaaccaaacaugcuuagaccguauugccgcuggcaccuuuaaugccggggaguucucccugccaacuuuugauucucuaaacauaaccgcagccagccucaaugacgauggacuggacaaccauacaauccuuuuguauuacucaaccgcugccaguucccuggcagugacucucaugcuggcgauuuucaucgucuauauggugagccgcgacaaugucucuuguucaaucugccuuuga

SEQ ID NO: 156495 - RNA, 1755 nt, Artificial Sequence; identical to SEQ ID NO: 156337
  derived and/or modified CDS sequence (opt3) from hemagglutinin__InfluenzaB__ALE31982

SEQ ID NO: 156496 - RNA, 1755 nt, Artificial Sequence
  derived and/or modified CDS sequence (opt3) from hemagglutinin__InfluenzaB__ALE31983
augaaggccaucauugugcugcucauggucguuaccagcaacgcugacagaauaugcacaggcaucacuuccucuaauucaccccacgugguaaaaacggcaacccagggggaagugaacgucacaggagugauuccucuuacuaccacaccaaccaagaguuacuucgccaaucugaaagguacuaggacacggggcaaguuguguccggauugcuuaaacuguaccgaccuggauguugcgcuagggcgccccaugugcgugggaacgacuccuagcgcuaaagccuccauccuccaugaaguccgaccagugaccucuggcuguuuucccauuaugcacgaccguacaaagaucagacaacugccuaaucuucugagggguuaugagaagauacgguugucgacucagaacguaaucgaugcagaaaaagccccagggggacccuaccgccucggcaccucaggcagcugcccuaaugcuacaaguaagauuggguucuuugcaaccauggccugggcuguuccaaaagacaacuauaagaaugccacgaacccgcagacuguggagguccccuacaucuguacagaaggagaggaucagauuaccgugugggguuuccauuccgacaauaaaacucaaaugaagucucuguauggcgauagcaacccucagaaguuuacauccucagcgaauggggugaccacgcacuacgucagucagaucggagacuucccagaucagaccgaggacggcggucugccccaaagcgggagaauaguuguggauuauaugaugcagaaaccuggaaagacaggcacuauuguauaccagaggggcgugcucuuaccacagaaagucuggugcgcaucugggcgguccaaggugaucaaaggaucacugccccuuauuggugaagccgacuguuugcaugaggaauacggcgggcugaacaagagcaaaccguauuacaccggaaagcacgcuaaggccaucggcaauugcccuaucuggguuaaaacaccccuaaagcucgcaaacgguacuaaauaucgcccuccagcuaagcugcuuaaagagcgaggguuuuucggcgccauugcgggauuucuggagggcgggugggaaggaaugauagccgguuggcacggcuacaccagucauggggcacacggaguggcugucgccgcugacuugaagucuacacaagaggccaucaacaagauuaccaaaaaucucaacucccugagcgaauuagaggugaagaaucugcagagacucucgggcgcaauggaugaacuucauaacgagauccuggaguuggacgaaaaaguagaugaccuaagggccgauacuauaucuucccagauugagcuggcuguucuccugucaaaugaagguaucaucaacagugaggacgaacaccuucuggcguuggagcggaagcucaaaaagaugcuggggcccagcgcaguggauauuggcaauggauguuucgagacgaagcacaaaugcaaccaaacaugcuuagaccguaucgccgcuggcaccuuuaaugccggggaguucucccugccaacuuuugauucucuaaacauuaccgcagccagccucaaugacgauggacuggacaaccauacaauacuuuuguauuacucaaccgcugccaguucccuggcagucacucucaugcuggcgcuuuucaucguguauauggucagccgcgacaaugugucuuguucaauuugccuguga

SEQ ID NO: 156497 - RNA, 1755 nt, Artificial Sequence
  derived and/or modified CDS sequence (opt3) from hemagglutinin__InfluenzaB__ALE31984
augaaggccaucauugugcugcucauggucguuaccagcaacgcugacagaauaugcacaggcaucacuuccucuaauucaccccacgugguaaaaacggcaacccagggggaggugaacgucacaggagugauuccucuuacuaccacaccaaccaagaguuacuucgccaaucugaaagguacuaggacacggggcaaguuguguccggauugcuuaaacuguaccgaccuggauguugcgcuagggcgccccaugugcgugggaacgacuccuagcgcuaaagccuccauccuccaugaaguccgaccagugaccucuggcuguuuucccauuaugcacgaccguacaaagaucagacaacugccuaaucuucugagggguuaugagaagauacgguugucgacucagaacguaaucgaugcagaaaaagccccagggggacccuaccgccucggcaccucaggcagcugcccuaaugcuacaaguaagauuggguucuuugcaaccauggccugggcuguuccaaaagacaacuauaagaaugccacgaacccgcagacuguggagguccccuacaucuguacagaagaggaggaucagauuaccguguggggauuccauuccgacaauaaaacucaaaugaagucucuguauggugauagcaacccucagaaguuuacauccucagcgaauggcgugaccacgcacuacgucagucagaucggggacuucccagaucagaccgaagacggaggccugccccaaagcgguagaauaguuguggauuauaugguacagaaaccugggaagacaggaacuauuguguaccagaggggcguccucuuaccacagaaaguguggugcgcaucuggccgguccaagguuaucaaagggucacugccccuuauuggagaggccgacuguuugcaugaagaguacgguggccugaacaagagcaaaccguauuacaccgggaagcacgcuaaggccaucggaaauugcccuaucugggugaaaacaccccuaaagcucgcaaacggcacuaaauaucgcccuccagcuaagcugcuuaaagagcgaggguuuuucggugccauugcgggcuuucuggaaggaggcugggaggggaugauagccggauggcacgguuacaccagucauggcgcacacggggucgcuguggccgcugacuugaagucuacacaagaagccaucaacaagauuaccaaaaaucucaacucccugagcgaguuagaaguaaagaaucugcagagacucucgggagcaauggaugagcuucauaacgagauccuggaauuggacgagaaaguugaugaccuaagggccgauacuauaucuucccagauugaacuggcugugcuccugucaaaugagggcaucaucaacagugaagacgagcaccuucuggcguuggagcggaagcucaaaaagaugcugggucccagcgcagucgauauugggaauggcuguuucgaaacgaagcacaaaugcaaccaaacaugcuuagaccguaucgccgcuggaaccuuuaaugccggcgaguucucccugccaacuuuugauucucuaaacauuaccgcagccagccucaaugacgaugggcuggacaaccauacaauacuuuuguauuacucaaccgcugccaguucccuggcagugacucucaugcuggcgaucuucauugucuauauggugagccgcgacaauguuucuuguucaaucugccuuuga

SEQ ID NO: 156498 - RNA, 1755 nt, Artificial Sequence; identical to SEQ ID NO: 156337
  derived and/or modified CDS sequence (opt3) from hemagglutinin__InfluenzaB__ALE31985

SEQ ID NO: 156499 - RNA, 1758 nt, Artificial Sequence
  derived and/or modified CDS sequence (opt3) from hemagglutinin__InfluenzaB__ALE31986
augaaggccaucauugugcugcucauggucguuaccagcaacgcugacagaauaugcacaggcaucacuuccucuaauucaccccacgugguaaaaacggcaacccagggggaggugaacgucacaggagugauuccucuuacuaccacaccaaccaagagucauuucgccaaucugaaagguacugaaacaaggggcaaguuguguccgaaaugcuuaaacuguaccgaucuggacguugcgcuagggcggcccaagugcacgggaaagaucccuagcgcucgcguguccauucuccacgagguccgaccagugacuucuggcuguuuucccaucaugcaugaucguaccaaaauaagacaacugccuaaucuucugagggguuacgaacacauccgguugucgacacauaacguaauuaaugccgaggacgcaccagggggacccuauaagaucggcacuucaggcagcugcccuaacauuaccaaugggaacggauucuuugccacaauggcuugggcaguuccgaaaaaugauaagaacaaaaccgccacgaauccacucacuaucgaagugcccuacauauguacagagggugaggaccagauuaccgucuggggcuuccacagugauaacgaaacucagauggcuaagcuguauggggacuccaagccucagaaauuuacaucuagcgccaauggagugaccacgcacuacgugucccaaaucggcgguuucccaaaccagaccgaggaugggggacugccccagucaggccgcauugucaucgacuauaugguucagaagaguggcaaaacagggacuaucaccuaccaaagagguauucucuuaccucagaagguguggugcgcgagcggaaggucuaaaguaauaaagggcucccugccacuuaucggggaagcagauuguuugcaugagaaauauggaggccugaacaagucaaagcccuacuacacaggugagcacgccaaagcuguggggaauugcccgauuugggucaagacuccucuaaaacucgccaacggcaccaaguaucggcccccagcaaaacugcuuaaggaacgcggauuuuucggcgcuaucgccggguuucuggagggagguugggaaggcaugauagcgggguggcauggauacacaagccacggcgcccacgguguggcaguugcugccgacuugaagaguacccaggaggcuauuaauaaaaucacuaagaaccucaauucucuguccgaauuagaggugaaaaaccugcagcgacucagcggggccauggaugagcuucauaaugaaauccuggaguuggacgaaaaggucgacgaucuaagagcagacacgauuucgucucaaaucgagcuggccgugcuccuguccaacgaaggcauuauaaauucagaggaugagcaccuucuggcuuuggaaaggaaacucaagaagaugcugggaccuagugcgguagagaucggcaacggguguuucgaaacaaaacauaagugcaaucagaccugcuuagaccggauugcagccggaacuuuugaugcuggugaguucagccugcccaccuuugacucccuaaacaucacagccgcaucucucaaugaugacggccuggauaaccacaccauccuuuuguauuacagcacugccgcuucaagucuggccguuacacucaugauugcaauauucguggucuauauggugucccgugacaaugucagcuguucuaucugccuguga

SEQ ID NO: 156500 - RNA, 1755 nt, Artificial Sequence
  derived and/or modified CDS sequence (opt3) from hemagglutinin__InfluenzaB__ALE31988
augaaggccaucauugugcugcucauggucguuaccagcaacgcugacagaauaugcacaggcaucacuuccucuaauucaccccacgugguaaaaacggcaacccagggggaagugaacgucacaggagugauuccucuuacuaccacaccaaccaagaguuacuucgccaaucugaaagguacuaggacacggggcaaguuguguccggauugcuuaaacuguaccgaccuggauguugcgcuagggcgccccaugugcgugggaacgacuccuagcgcuaaagccuccauccuccaugaaguccgaccagugaccucuggcuguuuucccauuaugcacgaccguacaaagaucagacaacugccuaaucuucugagggguuaugagaagauacgguugucgacucagaacguaaucgaugcagaaaaagccccagggggacccuaccgccucggcaccucaggcagcugcccuaaugcuacaaguaagauuggguucuuugcaaccauggccugggcuguuccaaaagacaacuauaagaaugccacgaacccgcagacuguggagguccccuacaucuguacagaaggagaggaucagauuaccgugugggguuuccauuccgacaauaaaacucaaaugaagucucuguauggcgauagcaacccucagaaguuuacauccucagcgaauggggugaccacgcacuacgucagucagaucggagacuucccagaucagaccgaggacggcggucugccccaaagcgggagaauaguuguggauuauaugguacagaaaccuggaaagacaggcacuauuguguaccagaggggcguccucuuaccacagaaaguguggugcgcaucugggcgguccaagguuaucaaaggaucacugccccuuauuggugaagccgacuguuugcaugaggaauacggcgggcugaacaagagcaaaccguauuacaccggaaagcacgcuaaggccaucggcaauugcccuaucugggugaaaacaccccuaaagcucgcaaacgguacuaaauaucgcccuccagcuaagcugcuuaaagagcgaggguuuuucggcgccauugcgggauuucuggagggcgggugggaaggaaugauagccgguuggcacggcuacaccagucauggggcacacggagucgcuguggccgcugacuugaagucuacacaagaggccaucaacaagauuaccaaaaaucucaacucccugagcgaauuagagguaaagaaucugcagagacucucgggcgcaauggaugaacuucauaacgagauccuggaguuggacgaaaaaguugaugaccuaagggccgauacuauaucuucccagauugagcuggcugugcuccugucaaaugaagguaucaucaacagugaggacgaacaccuucuggcguuggagcggaagcucaaaaagaugcuggggcccagcgcagucgauauuggcaauggauguuucgagacgaagcacaaaugcaaccaaacaugcuuagaccguaucgccgcuggcaccuuuaaugccggggaguucucccugccaacuuuugauucucuaaacauuaccgcagccagccucaaugacgauggacuggacaaccauacaauacuuuuguauuacucaaccgcugccaguucccuggcagugacucucaugcuggcgaucuucauugucuauauggugagccgcgacaauguuucuuguucaaucugccuuuga

SEQ ID NO: 156501 - RNA, 1758 nt, Artificial Sequence; identical to SEQ ID NO: 156499
  derived and/or modified CDS sequence (opt3) from hemagglutinin__InfluenzaB__ALE31989

SEQ ID NO: 156502 - RNA, 1758 nt, Artificial Sequence; identical to SEQ ID NO: 156499
  derived and/or modified CDS sequence (opt3) from hemagglutinin__InfluenzaB__ALE31990

SEQ ID NO: 156503 - RNA, 1755 nt, Artificial Sequence; identical to SEQ ID NO: 156337
  derived and/or modified CDS sequence (opt3) from hemagglutinin__InfluenzaB__ALE31991

SEQ ID NO: 156504 - RNA, 1758 nt, Artificial Sequence
  derived and/or modified CDS sequence (opt3) from hemagglutinin__InfluenzaB__ALE31992
augaaggccaucauugugcugcucauggucguuaccagcaacgcugacagaauaugcacaggcaucacuuccucuaauucaccccacgugguaaaaacggcaacccagggggaggugaacgucacaggagugauuccucuuacuaccacaccaaccaagagucauuucgccaaucugaaagguacugaaacaaggggcaaguuguguccgaaaugcuuaaacuguaccgaucuggacguugcgcuagggcggcccaagugcacgggaaagaucccuagcgcucgcguguccauucuccacgagguccgaccagugacuucuggcuguuuucccaucaugcaugaucguaccaaaauaagacaacugccuaaucuucugagggguuacgaacacguacgguugucgacacauaacguuaucaaugccgaggacgcaccagggggacccuauaagauuggcacuucaggcagcugcccuaacaucaccaaugggaacggauucuuugccacaauggcuugggcagugcccaaaaaugauaagaacaaaaccgccacgaauccgcucacuauugaaguccccuacaucuguacagagcgcgaggaccagauaaccgugugggguuuccacagugauaacgaaacucagauggcuaagcuguauggcgacuccaagccucagaaauuuacaucuagcgccaauggggugaccacgcacuacgucucccaaauuggaggcuucccaaaccagaccgaggauggugggcugccccagucaggaagaaucguuguggacuauaugguacagaagaguggcaaaacaggcacuauuaccuaccaaagggggauccucuuaccucagaagguguggugcgcgagcggacggucuaaagucaucaaggguucccugccacuuauuggcgaagcagauuguuugcaugagaaauaugggggacugaacaagucaaagcccuacuacacaggcgagcacgccaaagcuauagguaauugcccgaucugggugaagacuccucuaaaacucgccaacgggaccaaguaucgcccaccagcaaaacugcuuaaggaacgaggcuuuuucggagcuauugccggcuuucuggaagggggaugggaggguaugaucgcgggcuggcauggguacacaagccacggagcccacggcguugcaguggcugccgacuugaagaguacccaggaggcuauaaauaaaauuacuaagaaccucaauucucuguccgaauuagaggucaaaaaccugcagagacucagcggugccauggaugagcuucauaaugaaauccuggaguuggacgaaaagguggacgaucuaagggcagacacgaucucgucucaaauugagcuggccguacuccuguccaacgaagggaucauuaauucagaggaugagcaccuucuggcuuuggaacggaaacucaagaagaugcugggcccuagugcgguugagauaggaaacggcuguuucgaaacaaaacauaagugcaaucagaccugcuuagaccguaucgcagccgggacuuuugaugcuggagaguucagccugcccaccuuugacucccuaaacauuacagccgcaucucucaaugaugacggucuggauaaccacaccauccuuuuguauuacagcacugccgcuucaagucuggccgugacacucaugaucgcaauuuucgucguguauauggucucccgcgacaaugugagcuguucuauaugccuguga

SEQ ID NO: 156505 - RNA, 1758 nt, Artificial Sequence; identical to SEQ ID NO: 155913
  derived and/or modified CDS sequence (opt3) from hemagglutinin__InfluenzaB__ALE31993

SEQ ID NO: 156506 - RNA, 1758 nt, Artificial Sequence
  derived and/or modified CDS sequence (opt3) from hemagglutinin__InfluenzaB__ALE31994
augaaggccaucauugugcugcucauggucguuaccagcaacgcugacagaauaugcacaggcaucacuuccucuaauucaccccacgugguaaaaacggcaacccagggggaggugaacgucacaggagugauuccucuuacuaccacaccaaccaagagucauuucgccaaucugaaagguacugaaacaaggggcaaguuguguccgaaaugcuuaaacuguaccgaucuggacguugcgcuagggcggcccaagugcacgggaaagaucccuagcgcucgcguguccauucuccacgagguccgaccagugacuucuggcuguuuucccaucaugcaugaucguaccaaaauaagacaacugccuaaucuucugagggguuacgaacacguacgguugucgacacauaacguuaucaaugccgaggacgcaccagggggacccuauaagauuggcacuucaggcagcugcccuaacaucaccaaugggaacggauucuuugccacaauggcuugggcagugcccaaaaaugauaagaacaaaaccgccacgaauccgcucacuauugaaguccccuacaucuguacagagggugaggaccagauaaccguguggggcuuccacagugauaacgaaacucagauggcuaagcuguauggggacuccaagccucagaaauuuacaucuagcgccaauggagugaccacgcacuacgucucccaaauuggcgguuucccaaaccagaccgaggaugggggacugccccagucaggccgcaucguuguggacuauaugguacagaagaguggcaaaacagggacuauuaccuaccaaagaggaauccucuuaccucagaagguguggugcgcgagcgguaggucuaaagucaucaagggcucccugccacuuauuggggaagcagauuguuugcaugagaaauauggaggccugaacaagucaaagcccuacuacacaggugagcacgccaaagcuauagggaauugcccgaucugggugcggacuccucuaaagcucgccaacggcaccaaauaucgcccaccagcaaagcugcuuaaagaacgaggauuuuucggcgcuauugccggguuucuggagggagguugggaaggcaugaucgcgggguggcauggauacacaagccacggcgcccacgguguugcaguggcugccgacuugaagaguacccaggaggcuauaaauaagauuacuaaaaaccucaauucucuguccgaauuagaggucaagaaccugcagagacucagcggggccauggaugagcuucauaaugaaauccuggaguuggacgaaaaaguggacgaucuaagggcagacacgaucucgucucaaauugagcuggccguacuccuguccaacgaaggcaucauuaauucagaggaugagcaccuucuggcuuuggaacggaagcucaaaaagaugcugggaccuagugcgguugagauaggcaacggguguuucgaaacaaagcauaaaugcaaucagaccugcuuagaccguaucgcagccggaacuuuugaugcuggugaguucagccugcccaccuuugacucccuaaacauuacagccgcaucucucaaugaugacggccuggauaaccacaccauccuuuuguauuacagcacugccgcuucaagucuggccgugacacucaugaucgcaauuuucgucguguauauggucucccgcgacaaugugagcuguucuauaugccuguga

SEQ ID NO: 156507 - RNA, 1755 nt, Artificial Sequence; identical to SEQ ID NO: 156496
  derived and/or modified CDS sequence (opt3) from hemagglutinin__InfluenzaB__ALN39719

SEQ ID NO: 156508 - RNA, 1755 nt, Artificial Sequence; identical to SEQ ID NO: 156337
  derived and/or modified CDS sequence (opt3) from hemagglutinin__InfluenzaB__ALN39720

SEQ ID NO: 156509 - RNA, 1755 nt, Artificial Sequence; identical to SEQ ID NO: 156337
  derived and/or modified CDS sequence (opt3) from hemagglutinin__InfluenzaB__ALN39721

SEQ ID NO: 156510 - RNA, 1755 nt, Artificial Sequence; identical to SEQ ID NO: 156337
  derived and/or modified CDS sequence (opt3) from hemagglutinin__InfluenzaB__ALN39723

SEQ ID NO: 156511 - RNA, 1755 nt, Artificial Sequence; identical to SEQ ID NO: 156337
  derived and/or modified CDS sequence (opt3) from hemagglutinin__InfluenzaB__ALN39724

SEQ ID NO: 156512 - RNA, 1755 nt, Artificial Sequence; identical to SEQ ID NO: 156500
  derived and/or modified CDS sequence (opt3) from hemagglutinin__InfluenzaB__ALN39725

SEQ ID NO: 156513 - RNA, 1755 nt, Artificial Sequence
  derived and/or modified CDS sequence (opt3) from hemagglutinin__InfluenzaB__ALN39726
augaaggccaucauugugcugcucauggucguuaccagcaacgcugacagaauaugcacaggcaucacuuccucuaauucaccccacgugguaaaaacggcaacccagggggaagugaacgucacaggagugauuccucuuacuaccacaccaaccaagaguuacuucgccaaucugaaagguacuaggacacggggcaaguuguguccggauugcuuaaacuguaccgaccuggauguugcgcuagggcgccccaugugcgugggaacgacuccuagcgcuaaagccuccauccuccaugaaguccgaccagugaccucuggcuguuuucccauuaugcacgaccguacaaagaucagacaacugccuaaucuucugagggguuaugagaagauacgguugucgacucagaacguaaucgaugcagaaaaagccccagggggacccuaccgccucggcaccucaggcagcugcccuaaugcuacaaguaagauuggguucuuugcaaccauggccugggcuguuccaaaagacaacuauaagaaugccacgaacccgcagacuguggagguccccuacaucuguacagaaggagaggaucagauuaccgugugggguuuccauuccgacaauaaaacucaaaugaagucucuguauggcgauagcaacccucagaaguuuacauccucagcggacggggugaccacgcacuacgucagucagaucggagauuucccagaccagaccgaggauggcggucugccccaaagcgggagaauaguuguggacuauaugaugcagaaaccuggaaagacaggcacuauuguauaccagaggggcgugcucuuaccacagaaagucuggugcgcaucugggcgguccaaggugaucaaaggaucacugccccuuauuggugaagccgacuguuugcaugaggaauacggcgggcugaauaagagcaaaccguauuacaccggaaagcacgcuaaggccaucggcaacugcccuaucuggguuaaaacaccccuaaagcucgcaaaugguacuaaauaucgcccuccagcuaagcugcuuaaagagcgaggguuuuucggcgccauugcgggauuucuggagggcgggugggaaggaaugauagccgguuggcacggcuacaccagucauggggcacacggaguggcugucgccgcugauuugaagucuacacaagaggccaucaacaagauuaccaaaaaccucaauucccugagcgaauuagaggugaagaaccugcagagacucucgggcgcaauggacgaacuucauaaugagauccuggaguuggaugaaaaaguagacgaucuaagggccgacacuauaucuucccagauugagcuggcuguucuccugucaaacgaagguaucaucaauagugaggaugaacaccuucuggcguuggagcggaagcucaaaaagaugcuggggcccagcgcaguggacauuggcaacggauguuucgagacgaagcacaaaugcaaucaaacaugcuuagaucguaucgccgcuggcaccuuuaacgccggggaguucucccugccaacuuuugacucucuaaauauuaccgcagccagccucaacgaugacggacuggacaaucauacaauacuuuuguauuacucaaccgcugccaguucccuggcagucacucucaugcuggcgaucuucauuguguauauggucagccgcgauaacgugucuuguucaaucugccuuuga

SEQ ID NO: 156514 - RNA, 1755 nt, Artificial Sequence; identical to SEQ ID NO: 156500
  derived and/or modified CDS sequence (opt3) from hemagglutinin__InfluenzaB__ALN39727

SEQ ID NO: 156515 - RNA, 1755 nt, Artificial Sequence; identical to SEQ ID NO: 156337
  derived and/or modified CDS sequence (opt3) from hemagglutinin__InfluenzaB__ALN39728

SEQ ID NO: 156516 - RNA, 1755 nt, Artificial Sequence; identical to SEQ ID NO: 156337
  derived and/or modified CDS sequence (opt3) from hemagglutinin__InfluenzaB__ALN39729

SEQ ID NO: 156517 - RNA, 1758 nt, Artificial Sequence
  derived and/or modified CDS sequence (opt3) from hemagglutinin__InfluenzaB__ALN39730
augaaggccaucauugugcugcucauggucguuaccagcaacgcugacagaauaugcacaggcaucacuuccucuaauucaccccacgugguaaaaacggcaacccagggggaggugaacgucacaggagugauuccucuuacuaccacaccaaccaagagucauuucgccaaucugaaagguacugaaacaaggggcaaguuguguccgaaaugcuuaaacuguaccgaucuggacguugcgcuagggcggcccaagugcacgggaaagaucccuagcgcucgcguguccauucuccacgagguccgaccagugacuucuggcuguuuucccaucaugcaugaucguaccaaaauaagacaacugccuaaucuucugagggguuacgaacacguacgguugucgacacauaacguuaucaaugccgaggacgcaccagggggacccuauaagauuggcacuucaggcagcugcccuaacaucaccaaugggaacggauucuuugccacaauggcuugggcagugccgaaaaaugauaagaacaaaaccgccacgaauccacucacuauugaaguccccuacaucuguacagagggugaggaccagauaaccguguggggcuuccacagugauaacgaaacucagauggcuaagcuguauggggacuccaagccucagaaauuuacaucuagcgccaauggagugaccacgcacuacgucucccaaauuggcgguuucccaaaccagaccgaggaugggggacugccccagucaggccgcaucguuguggacuauaugguacagaagaguggcaaaacagggacuauuaccuaccaaagaggaauccucuuaccucagaagguguggugcgcgagcgguaggucuaaagucaucaagggcucccugccacuuauuggggaagcagauuguuugcaugagaaauauggaggccugaacaagucaaagcccuacuacacaggugagcacgccaaagcuauagggaauugcccgaucugggugaagacuccucuaaaacucgccaacggcaccaaguaucggcccccagcaaaacugcuuaaggaacgcggauuuuucggcgcuauugccggguuucuggagggagguugggaaggcaugaucgcgggguggcauggauacacaagccacggcgcccacgguguugcaguggcugccgacuugaagaguacccaggaggcuauaaauaaaauuacuaagaaccucaauucucuguccgaauuagaggucaaaaaccugcagcgacucagcggggccauggaugagcuucauaaugaaauccuggaguuggacgaaaagguggacgaucuaagagcagacacgaucucgucucaaauugagcuggccguacuccuguccaacgaaggcaucauuaauucagaggaugagcaccuucuggcuuuggaaaggaaacucaagaagaugcugggaccuagugcgguugagauaggcaacggguguuucgaaacaaaacauaagugcaaucagaccugcuuagaccggaucgcagccggaacuuuugaugcuggugaguucuuucugcccaccuucgacagccuaaacauuacagccgcaucccucaaugaugacggccuggauaaccacaccauccuuuuguauuacucuacugccgcuagcucacuggccgugacacucaugaucgcaauuuucgucguguauauggucagucgugacaauguguccuguagcauaugccuguga

SEQ ID NO: 156518 - RNA, 1755 nt, Artificial Sequence; identical to SEQ ID NO: 156337
  derived and/or modified CDS sequence (opt3) from hemagglutinin__InfluenzaB__ALN39732

SEQ ID NO: 156519 - RNA, 1755 nt, Artificial Sequence
  derived and/or modified CDS sequence (opt3) from hemagglutinin__InfluenzaB__ALN39733
augaaggccaucauugugcugcucauggucguuaccagcaacgcugacagaauaugcacaggcaucacuuccucuaauucaccccacgugguaaaaacggcaacccagggggaagugaacgucacaggagugauuccucuuacuaccacaccaaccaagaguuacuucgccaaucugaaagguacuaggacacggggcaaguuguguccggauugcuuaaacuguaccgaccuggauguugcgcuagggcgccccaugugcgugggaacgacuccuagcgcuaaagccuccauccuccaugaaguccgaccagugaccucuggcuguuuucccauuaugcacgaccguacaaagaucagacaacugccuaaucuucugagggguuaugagaagauacgguugucgacucagaacguaaucgaugcagaaaaagccccagggggacccuaccgccucggcaccucaggcagcugcccuaaugcuacaaguaagauuggguucuuugcaaccauggccugggcuguuccaaaagacaacuauaagaaugccacgaacccgcagacuguggagguccccuacaucuguacagaaggagaggaucagauuaccgugugggguuuccauuccgacaauaaaacucaaaugaagucucuguauggcgauagcaacccucagaaguuuacauccucagcgaauggggugaccacgcacuacgucagucagaucggagacuucccagaucagaccgaggacggcggucugccccaaagcgggagaauaguuguggauuauaugaugcagaaaccuggaaagacaggcacuauuguauaccagaggggcgugcucuuaccacagaaagucuggugcgcaucugggcgguccaaggugaucaaaggaucacugccccuuauuggugaagccgacuguuugcaugaggaauacggcgggcugaacaagagcaaaccguauuacaccggaaagcacgcuaaggccaucggcaauugcccuaucuggguuaaaacaccccuaaagcucgcaaacgguacuaaauaucgcccuccagcuaagcugcuuaaagagcgaggguuuuucggcgccauugcgggauuucuggagggcgggugggaaggaaugauagccgguuggcacggcuacaccagucauggggcacacggaguggcugucgccgcugacuugaagucuacacaagaggccaucaacaagauuaccaaaaaucucaacucccugagcgaauuagaggugaagaaucugcagagacucucgggcgcaauggaugaacuucauaacgagauccuggaguuggacgaaaaaguagaugaccuaagggccgauacuauaucuucccagauugagcuggcuguucuccugucaaaugaagguaucaucaacagugaggacgaacaccuucuggcguuggagcggaagcucaaaaagaugcuggggcccagcgcaguggauauuggcaauggauguuucgagacgaagcaccguugcaaccaaacaugcuuagaccgcaucgccgcuggcaccuuuaaugccggggaguucucccugccaacuuuugauucucuaaacauuaccgcagccagccucaaugacgauggacuggacaaccauacaauacuuuuguauuacucaaccgcugccaguucccuggcagucacucucaugcuggcgaucuucauuguguauauggucagcagagacaaugugucuuguucaaucugccuuuga

SEQ ID NO: 156520 - RNA, 1755 nt, Artificial Sequence
  derived and/or modified CDS sequence (opt3) from hemagglutinin__InfluenzaB__ALN39751
augaaggccaucauugugcugcucauggucguuaccagcaacgcugacagaauaugcacaggcaucacuuccucuaauucaccccacgugguaaaaacggcaacccagggggaagugaacgucacaggagugauuccucuuacuaccacaccaaccaagaguuacuucgccaaucugaaagguacuaggacacggggcaaguuguguccggauugcuuaaacuguaccgaccuggauguugcgcuagggcgccccaugugcgugggaacgacuccuagcgcuaaagccuccauccuccaugaaguccgaccagugaccucuggcuguuuucccauuaugcacgaccguacaaagaucagacaacugccuaaucuucugagggguuaugagaagauacgguugucgacucagaacguaaucgaugcagaaaaagccccagggggacccuaccgccucggcaccucaggcagcugcccuaaugcuacaaguaagauuggguucuuugcaaccauggccugggcuguuccaaaagacaacuauaagaaugccacgaacccgcagacuguggagguccccuacaucuguacagaaggagaggaucagauuaccgugugggguuuccauuccgacaauaaaacucaaaugaagucucuguauggcgauagcaacccucagaaguuuacauccucagcgaauggggugaccacgcacuacgucagucagaucggagacuucccagaucagaccgaggacggcggucugccccaaagcgggagaauaguuguggauuauaugaugcagaaaccuggaaagacaggcacuauuguauaccagaggggcgugcucuuaccacagaaagucuggugcgcaucugggcgguccaaggugaucaaaggaucacugccccuuauuggugaagccgacuguuugcaugaggaauacggcgggcugaacaagagcaaaccguauuacaccggaaagcacgcuaaggccaucggcaauugcccuaucuggguuaaaacaccccuaaagcucgcaaacgguacuaaauaucgcccuccagcuaagcugcuuaaagagcgaggguuuuucggcgccauugcgggauuucuggagggcgggugggaaggaaugguggccgguuggcacggcuacaccagucauggggcacacggagucgcuguggccgcugacuugaagucuacacaagaggccauaaacaagaucaccaaaaaucucaacucccugagcgaauuagagguaaagaaucugcagagacucucgggcgcaauggaugaacuucauaacgagauucuggaguuggacgaaaaaguugaugaccuaagggccgauacuaucucuucccagauagagcuggcugugcuccugucaaaugaagguauuaucaacagugaggacgaacaccuucuggcguuggagcggaagcucaaaaagaugcuggggcccagcgcagucgauaucggcaauggauguuucgagacgaagcacaaaugcaaccaaacaugcuuagaccguauugccgcuggcaccuuuaaugccggggaguucucccugccaacuuuugauucucuaaacaucaccgcagccagccucaaugacgauggacuggacaaccauacaauucuuuuguauuacucaaccgcugccaguucccuggcagugacucucaugcuggcgcuuuucauagucuauauggugagccgcgacaauguuucuuguucaaucugccuguga

SEQ ID NO: 156521 - RNA, 1755 nt, Artificial Sequence; identical to SEQ ID NO: 156496
  derived and/or modified CDS sequence (opt3) from hemagglutinin__InfluenzaB__ALN39752

SEQ ID NO: 156522 - RNA, 1755 nt, Artificial Sequence; identical to SEQ ID NO: 156337
  derived and/or modified CDS sequence (opt3) from hemagglutinin__InfluenzaB__ALN39753

SEQ ID NO: 156523 - RNA, 1758 nt, Artificial Sequence
  derived and/or modified CDS sequence (opt3) from hemagglutinin__InfluenzaB__ALN39754
augaaggccaucauugugcugcucauggucguuaccagcaacgcugacagaauaugcacaggcaucacuuccucuaauucaccccacgugguaaaaacggcaacccagggggaggugaacgucacaggagugauuccucuuacuaccacaccaaccaagagucauuucgccaaucugaaagguacugaaacaaggggcaaguuguguccgaaaugcuuaaacuguaccgaucuggacguugcgcuagggcggcccaagugcacgggaaagaucccuagcgcucgcguguccauucuccacgagguccgaccagugacuucuggcuguuuucccaucaugcaugaucguaccaaaauaagacaacugccuaaucuucugagggguuacgaacacguacgguugucgacacauaacguuaucaaugccgaggacgcaccagggggacccuauaagauuggcacuucaggcagcugcccuaacaucaccaaugggaacggauucuuugccacaauggcuugggcagugccgaaaaaugauaagaacaaaaccgccacgaauccacucacuauugaaguccccuacaucuguacagagggugaggaccagauaaccguguggggcuuccacagugauaacgaaacucagauggcuaagcuguauggggacuccaagccucagaaauuuacaucuagcgccaauggagugaccacgcacuacgucucccaaauuggcgguuucccaaaccagaccgaggaugggggacugccccagucaggccgcaucguuguggacuauaugguacagaagaguggcaaaacagggacuauuaccuaccaaagaggaauccucuuaccucagaagguguggugcgcgagcgguaggucuaaagucaucaagggcucccugccacuuauuggggaagcagauuguuugcaugagaaauauggaggccugaacaagucaaagcccuacuacacaggugagcacgccaaagcuauagggaauugcccgaucugggugaagacuccucuaaaacucgccaacggcaccaaguaucggcccccagcaaaacugcuuaaggaacgcggauuuuucggcgcuauugccggguuucuggagggagguugggaaggcaugaucgcgggguggcauggauacacaagccacggcgcccacgguguugcaguggcugccgacuugaagaguacccaggaggcuauaaauaaaauuacuaagaaccucaauucucuguccgaauuagaggucaaaaaccugcagcgacucagcggggccauggaugagcuucauaaugaaauccuggaguuggacgaaaagguggacgaucuaagagcagacacgaucucgucucaaauugagcuggccguacuccuguccaacgaaggcaucauuaauucagaggaugagcaccuucuggcuuuggaaaggaaacucaagaagaugcugggaccuagugcgguugagauaggcaacggguguuucgaaacaaaacauaagugcaaucagaccugcuuagaccggaucgcagccggaacuuuugaugcuggugaguucagccugcccaccuuugacucccuaaacauuacagccgcaucucucaaugaugacggccuggauaaccacaccauccuuuuguauuacagcacugccgcuucaagucuggccgugacacucaugaucgcaauuuucgucguguauauggucucccgugacaaugugagcuguucuauaugccuguga

SEQ ID NO: 156524 - RNA, 1758 nt, Artificial Sequence
  derived and/or modified CDS sequence (opt3) from hemagglutinin__InfluenzaB__ALN39755
augaaggccaucauugugcugcuccuugucguuaccagcaacgcugacagaauaugcacaggcaucacuuccucuaauucaccccacgugguaaaaacggcaacccagggggaggugaacgucacaggagugauuccucugacuaccacaccaaccaagagucauuucgccaauuugaaagguacugaaacaaggggcaaguuauguccgaaaugccugaacuguaccgaucuagacguugcgcucgggcggcccaagugcacgggaaagaucccuagcgcucgcguguccauucugcacgagguccgaccagugacuucuggcuguuuucccaucaugcaugaucguaccaaaauaagacaacuuccuaaucuguugagggguuacgaacacguacggcucucgacacauaacguuaucaaugccgaggacgcaccagggggacccuauaagauuggcacuucaggcagcugcccuaacaucaccaaugggaacggauucuuugccacaauggcuugggcagugccgaaaaaugauaagaacaaaaccgccacgaauccacugacuauugaaguccccuacaucuguacagagggugaggaccagauaaccguguggggcuuccacagugauaacgaaacucagauggcuaagcuguauggggacuccaagccucagaaauuuacaucuagcgccaauggagugaccacgcacuacgucucccaaauuggcgguuucccaaaccagaccgaggaugggggacucccccagucaggccgcaucguuguggacuauaugguacagaagaguggcaaaacagggacuauuaccuaccaaagaggaaucuuacugccucagaagguguggugcgcgagcgguaggucuaaagucaucaagggcucccuuccauugauuggggaagcagauugucugcaugagaaauauggaggccuaaacaagucaaagcccuacuacacaggugagcacgccaaagcuauagggaauugcccgaucugggugaagacuccucucaaacuggccaacggcaccaaguaucggcccccagcaaaacuucugaaggaacgcggauuuuucggcgcuauugccggguuuuuggagggagguugggaaggcaugaucgcgggguggcauggauacacaagccacggcgcccacgguguugcaguggcugccgaccucaagaguacccaggaggcuauaaauaaaauuacuaagaacuuaaauucucuguccgaacuggaggucaaaaaccuccagcgacuuagcggggccauggaugagcugcauaaugaaaucuuggagcuagacgaaaagguggacgaucugagagcagacacgaucucgucucaaauugagcucgccguacugcuuuccaacgaaggcaucauuaauucagaggaugagcaccuguuggcucucgaaaggaaacugaagaagauguuaggaccuagugcgguugagauaggcaacggguguuucgaaacaaaacauaagugcaaucagaccugccuggaccggaucgcagccggaacuuuugaugcuggugaguucagccuacccaccuuugacucccucaacauuacagccgcaucucugaaugaugacggccuugauaaccacaccaucuugcuguauuacagcacugccgcuucaagucucgccgugacacugaugaucgcaauuuucgucguguauauggucucccgugacaaugugagcuguucuauaugccuuuga

SEQ ID NO: 156525 - RNA, 1755 nt, Artificial Sequence
  derived and/or modified CDS sequence (opt3) from hemagglutinin__InfluenzaB__ALN39756
augaaggccaucauugugcugcucauggucguuaccagcaacgcugacagaauaugcacaggcaucacuuccucuaauucaccccacgugguaaaaacggcaacccagggggaagugaacgucacaggagugauuccucuuacuaccacaccaaccaagaguuacuucgccaaucugaaagguacuaggacacggggcaaguuguguccggauugcuuaaacuguaccgaccuggauguugcgcuagggcgccccaugugcgugggaacgacuccuagcgcuaaagccuccauccuccaugaaguccgaccagugaccucuggcuguuuucccauuaugcacgaccguacaaagaucagacaacugccuaaucuucugagggguuaugagaagauacgguugucgacucagaacguaaucgaugcagaaaaagccccagggggacccuaccgccucggcaccucaggcagcugcccuaaugcuacaaguaagauuggguucuuugcaaccauggccugggcuguuccaaaagacaacuauaagaaugccacgaacccgcagacuguggagguccccuacaucuguacagaaggagaggaucagauuaccgugugggguuuccauuccgacaauaaaacucaaaugaagucucuguauggcgauagcaacccucagaaguuuacauccucagcgaauggggugaccacgcacuacgucagucagaucggagacuucccagaucagaccgaggacggcggucugccccaaagcgggagaauaguuguggauuauaugaugcagaaaccuggaaagacaggcacuauuguauaccagaggggcgugcucuuaccacagaaagucuggugcgcaucugggcgguccaaggugaucaaaggaucacugccccuuauuggugaagccgacuguuugcaugaggaauacggcgggcugaacaagagcaaaccguauuacaccggaaagcacgcuaaggccaucggcaauugcccuaucuggguuaaaacaccccuaaagcucgcaaacgguacuaaauaucgcccuccagcuaagcugcuuaaagagcgaggguuuuucggcgccauugcgggauuucuggagggcgggugggaaggaaugauagccgguuggcacggcuacaccagucauggggcacacggaguggcugucgccgcugacuugaagucuacacaagaggccaucaacaagauuaccaaaaaucucaacucccugagcgaauuagaggugaagaaucugcagagacucucgggcgcaauggaugaacuucauaacgagauccuggaguuggacgaaaaaguagaugaccuaagggccgauacuauaucuucccagauugagcuggcuguucuccugucaaaugaagguaucaucaacagugaggacgaacaccuucuggcguuggagcggaagcucaaaaagaugcuggggcccagcgcaguggauauuggcaauggauguuucgagacgaagcacaaaugcaaccaaacaugcuuagaccguaucgccgcuggcaccuuuaaugucggggaguucucccugccaacuuuugauucucuaaacauuaccgccgcaagccucaaugacgauggacuggacaaccauacaauacuuuuguauuacucaaccgccgcuaguucccuggccgugacucucaugcuggcaaucuucauugucuauauggugagccgcgacaauguuucuuguucaaucugccuuuga

SEQ ID NO: 156526 - RNA, 1758 nt, Artificial Sequence; identical to SEQ ID NO: 156523
  derived and/or modified CDS sequence (opt3) from hemagglutinin__InfluenzaB__ALN39757

SEQ ID NO: 156527 - RNA, 1755 nt, Artificial Sequence; identical to SEQ ID NO: 156337
  derived and/or modified CDS sequence (opt3) from hemagglutinin__InfluenzaB__ALN39758

SEQ ID NO: 156528 - RNA, 1755 nt, Artificial Sequence
  derived and/or modified CDS sequence (opt3) from hemagglutinin__InfluenzaB__ALN39759
augaagaccaucauugugcugcucauggucguuacaagcaacgccgacagaauaugcacuggcaucacguccucuaauucaccccacgugguaaaaaccgcuacacagggggaagugaacgucacuggagugauuccucuuaccacaaccccaacuaagaguuacuucgcaaaucugaaagguacaaggacccggggcaaguuguguccggauugcuuaaacuguacggaccuggauguugcccuagggcgccccaugugcgugggaacuaccccuagcgcgaaggcuuccauccuccaugaaguccgaccagugacaucuggcuguuuucccauuaugcacgaccguacuaaaaucagacaacugccuaaucuucugagggguuaugagaagauacgguugucgacccagaacguaaucgaugccgaaaaagcaccagggggacccuaccgccucggcacaucaggcagcugcccuaaugccaccaguaagauuggguucuuugcuacgauggcaugggccguuccaaaagacaacuauaagaaugcuacuaacccgcagacaguggagguccccuacaucuguaccgaaggagaggaucagauuacugugugggguuuccauuccgacaauaaaacacaaaugaagucucuguauggcgauagcaacccucagaaguuuaccuccucagccaauggggugacgacccacuacgucagucagaucggagacuucccagaucagacagaggacggcggucugccccaaagcgggagaauaguuguggauuauaugaugcagaaaccuggaaagacuggcaccauuguauaccagaggggcgugcucuuaccacagaaagucuggugcgcgucugggcgguccaaggugaucaaaggaucacugccccuuauuggugaagcagacuguuugcaugaggaauacggcgggcugaacaagagcaaaccguauuacacaggaaagcacgccaaggcuaucggcaauugcccuaucuggguuaaaacuccccuaaagcucgccaacgguaccaaauaucgcccuccagcaaagcugcuuaaagagcgaggguuuuucggcgcuauugccggauuucuggagggcgggugggaaggaaugauagcggguuggcacggcuacacaagucauggggcccacggaguggcagucgcugccgacuugaagucuacccaagaggcuaucaacaagauuacuaaaaaucucaacucccugagcgaauuagaggugaagaaucugcagagacucucgggcgccauggaugaacuucauaacgagauccuggaguuggacgaaaaaguagaugaccuaagggcagauacgauaucuucccagauugagcuggccguucuccugucaaaugaagguaucaucaacagugaggacgaacaccuucuggcuuuggagcggaagcucaaaaagaugcuggggcccagcgcgguggauauuggcaauggauguuucgagacaaagcacaaaugcaaccaaaccugcuuagaccguaucgcagccggcacuuuuaaugcuggggaguucucccugccaaccuuugauucucuaaacauuacagccgcaagccucaaugacgauggacuggacaaccauaccauacuuuuguauuacucaacugccgcuaguucccuggccgucacacucaugcuggcaaucuucauuguguauauggucagccgcgacaaugugucuuguucaaucugccuuuga

SEQ ID NO: 156529 - RNA, 1758 nt, Artificial Sequence; identical to SEQ ID NO: 156487
  derived and/or modified CDS sequence (opt3) from hemagglutinin__InfluenzaB__ALN39760

SEQ ID NO: 156530 - RNA, 1755 nt, Artificial Sequence; identical to SEQ ID NO: 156337
  derived and/or modified CDS sequence (opt3) from hemagglutinin__InfluenzaB__ALN39761

SEQ ID NO: 156531 - RNA, 1755 nt, Artificial Sequence; identical to SEQ ID NO: 156337
  derived and/or modified CDS sequence (opt3) from hemagglutinin__InfluenzaB__ALN39762

SEQ ID NO: 156532 - RNA, 1755 nt, Artificial Sequence; identical to SEQ ID NO: 156337
  derived and/or modified CDS sequence (opt3) from hemagglutinin__InfluenzaB__ALN39763

SEQ ID NO: 156533 - RNA, 1758 nt, Artificial Sequence; identical to SEQ ID NO: 156523
  derived and/or modified CDS sequence (opt3) from hemagglutinin__InfluenzaB__ALN39764

SEQ ID NO: 156534 - RNA, 1755 nt, Artificial Sequence
  derived and/or modified CDS sequence (opt3) from hemagglutinin__InfluenzaB__ALN39765
augaaggccaucauugugcugcucauggucguuaccagcaacgcugacagaauaugcacaggcaucacuuccucuaauucaccccacgugguaaaaacggcaacccagggggaagugaacgucacaggagugauuccucuuacuaccacaccaaccaagaguuacuucgccaaucugaaagguacuaggacacggggcaaguuguguccggauugcuuaaacuguaccgaccuggauguugcgcuagggcgccccaugugcgugggaacgacuccuagcgcuaaagccuccauccuccaugaaguccgaccagugaccucuggcuguuuucccauuaugcacgaccguacaaagaucagacaacugccuaaucuucugagggguuaugagaagauacgguugucgacucagaacguaaucgaugcagaaaaagccccagggggacccuaccgccucggcaccucaggcagcugcccuaaugcuacaaguaagauuggguucuuugcaaccauggccugggcuguuccaaaagacaacuauaagaaugccacgaacccgcagacuguggagguccccuacaucuguacagaaggagaggaucagauuaccgugugggguuuccauuccgacaauaaaacucaaaugaagucucuguauggcgauagcaacccucagaaguuuacauccucagcgaauggggugaccacgcacuacgucagucagaucggagacuucccagaucagaccgaggacggcggucugccccaaagcgggagaauaguuguggauuauaugaugcagaaaccuggaaagacaggcacuauuguauaccagaggggcgugcucuuaccacagaaagucuggugcgcaucugggcgguccaaggugaucaaaggaucacugccccuuauuggugaagccgacuguuugcaugaggaauacggcgggcugaacaagagcaaaccguauuacaccggaaagcacgcuaaggccaucggcaauugcccuaucuggguuaaaacaccccuaaagcucgcaaacgguacuaaauaucgcccuccagcuaagcugcuuaaagagcgaggguuuuucggcgccauugcgggauuucuggagggcgggugggaaggaaugauagccgguuggcacggcuacaccagucauggggcacacggaguggcugucgccgcugacuugaagucuacacaagaggccaucaacaagauuaccaaaaaucucaacucccugagcgaauuagaggugaauaaccugcagagacucucgggcgcaauggaugaacuucauaaugagauccuggaguuggacgaaaagguagaugaccuaagggccgauacuauaucuucccagauugagcuggcuguucuccugucaaacgaagguaucaucaauagugaggacgaacaccuucuggcguuggagcggaaacucaagaaaaugcuggggcccagcgcaguggauauuggcaacggauguuucgagacgaagcacaagugcaaucaaacaugcuuagaccguaucgccgcuggcaccuuuaacgccggggaguucucccugccaacuuuugauucucuaaauauuaccgcagccagccucaacgacgauggacuggacaaucauacaauacuuuuguauuacucaaccgcugccaguucccuggcagucacucucaugcuggcgcuuuucaucguguauauggucagccgcgacaacgugucuuguucaauuugccuguga

SEQ ID NO: 156535 - RNA, 1755 nt, Artificial Sequence; identical to SEQ ID NO: 156500
  derived and/or modified CDS sequence (opt3) from hemagglutinin__InfluenzaB__ALN39766

SEQ ID NO: 156536 - RNA, 1755 nt, Artificial Sequence; identical to SEQ ID NO: 156337
  derived and/or modified CDS sequence (opt3) from hemagglutinin__InfluenzaB__ALN39767

SEQ ID NO: 156537 - RNA, 1755 nt, Artificial Sequence; identical to SEQ ID NO: 156500
  derived and/or modified CDS sequence (opt3) from hemagglutinin__InfluenzaB__ALN39768

SEQ ID NO: 156538 - RNA, 1755 nt, Artificial Sequence
  derived and/or modified CDS sequence (opt3) from hemagglutinin__InfluenzaB__ALN39769
augaaggccaucauugugcugcucauggucguuaccagcaacgcugacagaauaugcacaggcaucacuuccucuaauucaccccacgugguaaaaacggcaacccagggggaggugaacgucacaggagugauuccucuuacuaccacaccaaccaagaguuacuucgccaaucugaaagguacuaggacacggggcaaguuguguccggauugcuuaaacuguaccgaccuggauguugcgcuagggcgccccaugugcgugggaacgacuccuagcgcuaaagccuccauccuccaugaaguccgaccagugaccucuggcuguuuucccauuaugcacggucguacaaagaucagacaacugccuaaucuucugaggggguaugagaagauacgguugucgacucagaacguaaucgacgcagaaaaagccccaggaggccccuaccgccucggcaccucagggagcugcccuaaugcuacaaguaagauuggauucuuugcaaccauggccugggcuguuccaaaagauaacuauaagaaugccacgaacccgcagacuguggagguccccuacaucuguacagaaggugaggaccagauuaccguguggggcuuccauuccgauaauaaaacucaaaugaagucucuguauggggacagcaacccucagaaguuuacauccucagcgaauggagugaccacgcacuacgucagucagaucggcgauuucccagaccagaccgaggauggugggcugccccaaagcggaagaauaguuguggacuauaugaugcagaaaccuggcaagacaggcacuauuguauaccagaggggagugcucuuaccacagaaagucuggugcgcaucugggcgguccaaggugaucaaagguucacugccccuuauuggcgaagccgauuguuugcaugaggaauacgggggacugaacaagagcaaaccguauuacaccggcaagcacgcuaaggccaucgguaauugcccuaucuggguuaaaacaccccuaaagcucgcaaacgggacuaaauaucgcccuccagcuaagcugcuuaaagagcgaggcuuuuucggagccauugcgggcuuucuggaagggggaugggaagguaugauagccggcuggcacggguacaccagucauggagcacacggcguggcugucgccgcugacuugaagucuacacaagaggccaucaacaagauuaccaaaaaucucaacucccugagcgaauuagaggugaagaaucugcagagacucucgggugcaauggacgaacuucauaacgagauccuggaguuggaugaaaaaguagacgaucuaagggccgacacuauaucuucccagauugagcuggcuguucuccugucaaaugaagggaucaucaacagugaggaugaacaccuucuggcguuggagcggaagcucaaaaagaugcugggccccagcgcaguggacauuggaaauggcuguuucgagacgaagcacaaaugcaaccaaacaugcuuagaucguaucgccgcugggaccuuuaaugccggagaguucucccugccaacuuuugacucucuaaacauuaccgcagccagccucaaugaugacggucuggauaaccauacaauacuuuuguauuacucaaccgcugccaguucccuggcagucacucucaugcuggcgaucuucauuguguauauggucagccgcgacaaugugucuuguucaaucugccuuuga

SEQ ID NO: 156539 - RNA, 1755 nt, Artificial Sequence; identical to SEQ ID NO: 156496
  derived and/or modified CDS sequence (opt3) from hemagglutinin__InfluenzaB__ALN39770

SEQ ID NO: 156540 - RNA, 1755 nt, Artificial Sequence; identical to SEQ ID NO: 156496
  derived and/or modified CDS sequence (opt3) from hemagglutinin__InfluenzaB__ALN39771

SEQ ID NO: 156541 - RNA, 1755 nt, Artificial Sequence; identical to SEQ ID NO: 156337
  derived and/or modified CDS sequence (opt3) from hemagglutinin__InfluenzaB__ALN39773

SEQ ID NO: 156542 - RNA, 1755 nt, Artificial Sequence; identical to SEQ ID NO: 156337
  derived and/or modified CDS sequence (opt3) from hemagglutinin__InfluenzaB__ALN39774

SEQ ID NO: 156543 - RNA, 1758 nt, Artificial Sequence
  derived and/or modified CDS sequence (opt3) from hemagglutinin__InfluenzaB__ALN39775
augcaggccaucauugugcugcucauggucguuaccagcaacgcugacagaauaugcacaggcaucacuuccucuaauucaccccacgugguaaagacggcaacccaaggggaggugaacgucacaggagugauuccucuuacuaccacaccaaccaaaagucauuucgccaaucugaaggguacugaaacaaggggcaaauuguguccgaagugcuuaaacuguaccgaucuggacguugcgcuagggcggcccaaaugcacgggaaagaucccuagcgcucgcguguccauucuccacgagguccgaccagugacuucuggcuguuuucccaucaugcaugaucguaccaagauaagacagcugccuaaucuucugagggguuacgaacacauccgguugucgacacauaacguaauuaaugccgaggacgcaccagggggacccuauaaaaucggcacuucaggcagcugcccuaacauuaccaaugggaacggauucuuugccacaauggcuugggcaguuccaaagaaugauaaaaacaagaccgccacgaauccgcucacuaucgaagugcccuacauauguacagagggugaggaccagauuaccgucuggggcuuccacagugauaacgaaacucagauggcuaaacuguauggggacuccaagccucaaaaguuuacaucuagcgccaauggagugaccacgcacuacgugucccagaucggcgguuucccaaaccagaccgaggaugggggacugccccagucaggccgcauugucaucgacuauaugguucagaaaaguggcaagacagggacuaucaccuaccaaagagguauucucuuaccucagaaaguguggugcguaagcggaaggucuaaggugauaaaaggcucccugccacuuaucggggaagcggauuguuugcaugagaaguauggaggccugaacaaaucaaagcccuacuacacaggugagcacgcaaaggccgucgggaauugcccgauuugggugaaaacuccucuaaagcucgcuaacggcaccaaauaucggcccccagccaagcugcuuaaagaacgcggauuuuucggcgcaaucgcuggguuucuggagggagguugggaaggcaugauagccggguggcauggauacacaagccacggcgcgcacgguguugccguggcagcugacuugaagaguacccaggaggccauuaauaagaucacuaaaaaccucaauucucuguccgaauuagaggucaagaaccugcaacgacucagcggggcuauggaugagcuucauaaugaaauccuggaguuggacgaaaaaguggacgaucuaagagccgacacgauuucgucucagaucgagcuggcaguacuccuguccaacgaaggcauuauaaauucagaggaugagcaccuucuggccuuggaaaggaagcucaaaaagaugcugggaccuagugcuguugagaucggcaacggguguuucgaaacaaagcauaaaugcaaucagaccugcuuagaccggauugcggcaggaacuuuugaugccggugaguucagccugcccaccuuugacucccuaaacaucacagcugccucucucaaugaugacggccuggauaaccacaccauccuuuuguauuacagcacugcagccucaagucuggcugugacacucaugauugccauauucgucguguauauggucucccgugacaaugugagcuguucuaucugccuguga

SEQ ID NO: 156544 - RNA, 1755 nt, Artificial Sequence
  derived and/or modified CDS sequence (opt3) from hemagglutinin__InfluenzaB__ALN39776
augaaggccaucauuauacugcucaugguggucaccagcaacgcugacagaaucugcacaggcauuacuuccucuaauucaccccacguugugaaaacggcaacccagggggaaguaaacgugacaggagucaucccucuuacuaccacaccaaccaagaguuacuucgccaaucugaaagguacuaggacacggggcaaguuguguccggauugcuuaaacuguaccgaccuggauguggcgcuagggcgccccaugugcguuggaacgacuccuagcgcuaaagccuccauucuccaugaagugcgaccagucaccucuggcuguuuucccaucaugcacgaccguacaaagauaagacaacugccuaaucuucugagggguuaugagaagauccgguugucgacucagaacgugauugaugcagaaaaagccccagggggacccuaccgccucggcaccucaggcagcugcccuaaugcuacaaguaagaucggguucuuugcaaccauggccugggcuguaccaaaagacaacuauaagaaugccacgaacccgcagacuguugaggugcccuacauuuguacagaaggagaggaucagaucaccgucugggguuuccauuccgacaauaaaacucaaaugaagucucuguauggcgauagcaacccucagaaguuuacauccucagcgaauggggugaccacgcacuacgugagucagauaggagacuucccagaucagaccgaggacggcggucugccccaaagcgggagaauugucguugauuauaugaugcagaaaccuggaaagacaggcacuaucguguaccagaggggcguacucuuaccacagaaaguguggugcgcaucugggcgguccaaggucauuaaaggaucacugccccuuaucggugaagccgacuguuugcaugaggaauacggcgggcugaacaagagcaaaccguauuacaccggaaagcacgcuaaggccaucggcaauugcccuauuugggugaaaacaccccuaaagcucgcaaacgguacuaaauaucgcccuccagcuaagcugcuuaaagagcgaggguuuuucggcgccauagcgggauuucuggagggcgggugggaaggaaugaucgccgguuggcacggcuacaccagucauggggcacacggaguugcuguggccgcugacuugaagucuacacaagaggccauuaacaagaucaccaaaaaucucaacucccugagcgaauuagaggucaagaaucugcagagacucucgggcgcaauggaugaacuucauaacgagauacuggaguuggacgaaaaaguggaugaccuaagggccgauacuauuucuucccagaucgagcuggcuguacuccugucaaaugaagguaucauuaacagugaggacgaacaccuucuggcguuggagcggaagcucaaaaagaugcuggggcccagcgcaguugauaucggcaauggauguuucgagacgaagcacaaaugcaaccaaacaugcuuagaccguauugccgcuggcaccuuuaaugccggggaguucucccugccaacuuuugauucucuaaacauaaccgcagccagccucaaugacgauggacuggacaaccauacaauccuuuuguauuacucaaccgcugccaguucccuggcagugacucucaugcuggcgauuuucaucgucuauauggugagccgcgacaaugucucuuguucaaucugccuuuga

SEQ ID NO: 156545 - RNA, 1755 nt, Artificial Sequence; identical to SEQ ID NO: 156500
  derived and/or modified CDS sequence (opt3) from hemagglutinin__InfluenzaB__ALN39778

SEQ ID NO: 156546 - RNA, 1758 nt, Artificial Sequence; identical to SEQ ID NO: 156523
  derived and/or modified CDS sequence (opt3) from hemagglutinin__InfluenzaB__ALN39779

SEQ ID NO: 156547 - RNA, 1755 nt, Artificial Sequence; identical to SEQ ID NO: 156337
  derived and/or modified CDS sequence (opt3) from hemagglutinin__InfluenzaB__ALN39780

SEQ ID NO: 156548 - RNA, 1758 nt, Artificial Sequence; identical to SEQ ID NO: 156523
  derived and/or modified CDS sequence (opt3) from hemagglutinin__InfluenzaB__ALN39781

SEQ ID NO: 156549 - RNA, 1758 nt, Artificial Sequence; identical to SEQ ID NO: 156487
  derived and/or modified CDS sequence (opt3) from hemagglutinin__InfluenzaB__ALN39782

SEQ ID NO: 156550 - RNA, 1755 nt, Artificial Sequence
  derived and/or modified CDS sequence (opt3) from hemagglutinin__InfluenzaB__ALN39783
augaaggccaucauugugcugcucauggucguuaccagcaacgcugacagaauaugcacaggcaucacuuccucuaauucaccccacgugguaaaaacggcaacccagggggaagugaacgucacaggagugauuccucuuacuaccacaccaaccaagaguuacuucgccaaucugaaagguacuaggacacggggcaaguuguguccggauugcuuaaacuguaccgaccuggauguugcgcuagggcgccccaugugcgugggaacgacuccuagcgcuaaagccuccauccuccaugaaguccgaccagugaccucuggcuguuuucccauuaugcacgaccguacaaagaucagacaacugccuaaucuucugagggguuaugagaagauacgguugucgacucagaacguaaucgaugcagaaaaagccccagggggacccuaccgccucggcaccucaggcagcugcccuaaugcuacaaguaagauuggguucuuugcaaccauggccugggcuguuccaaaagacaacuauaagaaugccacgaaccugcagacuguggaggucccguacaucuguacagaaggagaggaucagauuaccgugugggguuuccauuccgacaauaaaacucaaaugaagucucuguauggcgauagcaacccccagaaguuuacauccucagcgaauggggugaccacgcacuacgucagucagaucggagacuucccugaucagaccgaggacggcggucucccacaaagcgggagaauaguuguggauuauaugguacagaaacccggaaagacaggcacuauuguguaccagaggggcgucuuacugccucagaaaguguggugcgcaucugggcgguccaagguuaucaaaggaucacuuccauugauuggugaagccgacugucugcaugaggaauacggcgggcuaaacaagagcaaacccuauuacaccggaaagcacgcuaaggccaucggcaauugcccgaucugggugaaaacaccucucaagcuggcaaacgguacuaaauaucgacccccagcuaaacuucugaaggagcgcggguuuuucggcgccauugcgggauuuuuggagggcgggugggaaggaaugauagccgguuggcacggcuacaccagucauggggcacacggagucgcuguggccgcugaccucaagucuacacaagaggccaucaacaagauuaccaaaaaucugaacuccuuaagcgaacuggagguaaagaaucuccagagacuuucgggcgcaauggaugaacugcauaacgagaucuuggagcuagacgaaaaaguugaugaccugagggccgauacuauaucuucccagauugagcucgcugugcugcuuucaaaugaagguaucaucaacagugaggacgaacaccuguuggcgcucgagcggaagcugaaaaagauguuagggccuagcgcagucgauauuggcaauggauguuucgagacgaagcacaaaugcaaccaaacaugccuggaccguaucgccgcuggcaccuuuaaugccggggaguucucccuacccacuuuugauucucucaacauuaccgcagccagccugaaugacgauggacuugacaaccauacaauauugcuguauuacucaaccgcugccaguucccucgcagugacucugaugcuugcgaucuucauugucuauauggugagccgcgacaauguuucuuguucaaucugccuguga

SEQ ID NO: 156551 - RNA, 1758 nt, Artificial Sequence; identical to SEQ ID NO: 156499
  derived and/or modified CDS sequence (opt3) from hemagglutinin__InfluenzaB__ALN39784

SEQ ID NO: 156552 - RNA, 1758 nt, Artificial Sequence; identical to SEQ ID NO: 156523
  derived and/or modified CDS sequence (opt3) from hemagglutinin__InfluenzaB__ALN39785

SEQ ID NO: 156553 - RNA, 1755 nt, Artificial Sequence; identical to SEQ ID NO: 156337
  derived and/or modified CDS sequence (opt3) from hemagglutinin__InfluenzaB__ALN39786

SEQ ID NO: 156554 - RNA, 1758 nt, Artificial Sequence; identical to SEQ ID NO: 156523
  derived and/or modified CDS sequence (opt3) from hemagglutinin__InfluenzaB__ALN39787

SEQ ID NO: 156555 - RNA, 1758 nt, Artificial Sequence; identical to SEQ ID NO: 156523
  derived and/or modified CDS sequence (opt3) from hemagglutinin__InfluenzaB__ALN39788

SEQ ID NO: 156556 - RNA, 1755 nt, Artificial Sequence
  derived and/or modified CDS sequence (opt3) from hemagglutinin__InfluenzaB__ALN39790
augaaggccaucauugugcugcucauggucguuaccagcgacgcugauagaauaugcacaggcaucacuuccucuaacucaccccacgugguaaaaacggcaacccagggggaagugaaugucacaggagugauuccucuuacuaccacaccaaccaagaguuacuucgccaaccugaaagguacuaggacacggggcaaguuguguccggacugcuuaaauuguaccgaucuggacguugcgcuagggcgccccaugugcgugggaacgacuccuagcgcuaaagccuccauccuccaugaaguccgaccagugaccucuggcuguuuucccauuaugcacgaucguacaaagaucagacaacugccuaaccuucugagggguuaugagaagauacgguugucgacucagaauguaaucgacgcagaaaaagccccagggggacccuaccgccucggcaccucaggcagcugcccuaacgcuacaaguaagauuggguucuuugcaaccauggccugggcuguuccaaaagauaauuauaagaacgccacgaauccgcagacuguggagguccccuacaucuguacagaaggagaggaccagauuaccgugugggguuuccauuccgauaacaaaacucaaaugaagucucuguauggcgacagcaauccucagagauuuacauccucagcgaacggggugaccacgcacuacgucagucagaucggagauuucccagaccagaccgaggauggcggucugccccaaagcgggaggauaguuguggacuauaugguacagaagccuggaaaaacaggcacuauuguguaccagcggggcguccucuuaccacagaagguguggugcgcaucugggcgcuccaaaguuaucaagggaucacugccccuuauuggugaagccgacuguuugcaugaggaauacggcgggcugaauaaaagcaagccguauuacaccggaaaacacgcuaaggccaucggcaacugcccuaucugggugaagacaccccuaaaacucgcaaaugguacuaaguaucgaccuccagcuaaacugcuuaaggagagaggguuuuucggcgccauugcgggauuucuggagggcgggugggaaggaaugauagccgguuggcacggcuacaccagucauggggcacacggagucgcuguggccgcugauuugaaaucuacacaagaggccaucaacaagauuaccaagaaccucaauucccugagcgaauuagagguuaaaaaccugcagaggcucucgggcgcaauggacgaacuucauaaugagauccuggaguuggaugaaaagguagacgaucuacgggccgacacuauaucuucccagauugagcuggcugugcuccugucaaacgaagguaucaucaauagugaggaugaacaccuucuggcguuggagcguaaacucaagaaaaugcuggggcccagcgcagucgacauuggcaacggauguuucgagacgaagcacaagugcaaucaaacaugcuuagaucgcaucgccgcuggcaccuuuaacgccggggaguucucccugccaacuuuugacucucuaaauauuaccgcagccagccucaacgaugacggacuggacaaucauacaauacuuuuguauuacucaaccgcugccaguucccuggcagugacucucaugcuggcgaucuucauugucuauauggugagcagagauaacguuucuuguucaaucugccuuuga

SEQ ID NO: 156557 - RNA, 1755 nt, Artificial Sequence
  derived and/or modified CDS sequence (opt3) from hemagglutinin__InfluenzaB__ALN39791
augaaggccaucauugugcugcucauggucguuaugagcaacgcugacagaauaugcaccggcaucacauccucuaauucaccccacgugguaaaaacugcaacgcagggggaagugaacgucaccggagugauuccucuuacaacuaccccaacaaagaguuacuucgccaaucugaaagguaccaggacucggggcaaguuguguccggauugcuuaaacuguacagaccuggauguugcgcuagggcgccccaugugcgugggaaccacgccuagcgcuaaagccuccauccuccaugaaguccgaccagugacuucuggcuguuuucccauuaugcacgaccguaccaagaucagacaacugccuaaucuucugagggguuaugagaagauacgguugucgacacagaacguaaucgaugcagaaaaagccccagggggacccuaccgccucggcacuucaggcagcugcccuaaugcuaccaguaagauuggguucuuugcaacaauggccugggcuguuccaaaagacaacuauaagaaugccaccaacccgcagacgguggagguccccuacaucuguacugaaggagaggaucagauuacagugugggguuuccauuccgacaauaaaacccaaaugaagucucuguauggcgauagcaacccucagaaguuuacuuccucagcgaauggggugacaacccacuacgucagucagaucggagacuucccagaucagacggaggacggcggucugccccaaagcgggagaauaguuguggauuauaugguacagaaaccuggaaagaccggcacaauuguguaccagaggggcguccucuuaccacagaaaguguggugcgcaucugggcgguccaagguuaucaaaggaucacugccccuuauuggugaagccgacuguuugcaugaggaauacggcgggcugaacaagagcaaaccguauuacacuggaaagcacgcuaaggccaucggcaauugcccuaucugggugaaaaccccucuaaagcucgcaaacgguacaaaauaucgcccacccgcuaagcugcuuaaagagcgaggguuuuucggcgccauugcgggauuucuggagggcgggugggaaggaaugauagccgguuggcacggcuacacaagucauggggcacacggagucgcuguggccgcugacuugaagucuacccaagaggccaucaacaagauuacuaaaaaucucaacucccugagcgaauuagagguaaagaaucugcagagacucucgggcgcaauggaugaacuucauaacgagauccuggaguuggacgaaaaaguugaugaccuaagggccgauaccauaucuucccagauugagcuggcugugcuccugucaaaugaagguaucaucaacagugaggacgaacaccuucuggcguuggagcggaagcucaaaaagaugcuggggcccagcgcagucgauauuggcaauggauguuucgagacuaagcacaaaugcaaccaaacgugcuuagaccguaucgccgcuggcacauuuaaugccggggaguucucccugccaaccuuugauucucuaaacauuacugcagccagccucaaugacgauggacuggacaaccauaccauacuuuuguauuacucaacagcugccaguucccuggcagugacccucaugcuggcgaucuucauugucuauauggugagccgcgacaauguuucuuguucaaucugccuuuga

SEQ ID NO: 156558 - RNA, 1758 nt, Artificial Sequence; identical to SEQ ID NO: 156523
  derived and/or modified CDS sequence (opt3) from hemagglutinin__InfluenzaB__ALN39792

SEQ ID NO: 156559 - RNA, 1758 nt, Artificial Sequence; identical to SEQ ID NO: 156523
  derived and/or modified CDS sequence (opt3) from hemagglutinin__InfluenzaB__ALN39793

SEQ ID NO: 156560 - RNA, 1755 nt, Artificial Sequence
  derived and/or modified CDS sequence (opt3) from hemagglutinin__InfluenzaB__ALN39794
augaaggccaucauuauacugcucaugguggucaccagcaacgcugacagaaucugcacaggcauuacuuccucuaauucaccccacguugugaaaacggcaacccagggggaaguaaacgugacaggagucaucccucuuacuaccacaccaaccaagaguuacuucgccaaucugaaagguacuaggacacggggcaaguuguguccggauugcuuaaacuguaccgaccuggauguggcgcuagggcgccccaugugcguuggaacgacuccuagcgcuaaagccuccauucuccaugaagugcgaccagucaccucuggcuguuuucccaucaugcacgaccguacaaagauaagacaacugccuaaucuucugagggguuaugagaagauccgguugucgacucagaacgugauugaugcagaaaaagccccagggggacccuaccgccucggcaccucaggcagcugcccuaaugcuacaaguaagaucggguucuuugcaaccauggccugggcuguaccaaaagacaacuauaagaaugccacgaacccgcagacuguugaggugcccuacauuuguacagaaggagaggaucagaucaccgucugggguuuccauuccgacaauaaaacucaaaugaagucucuguauggcgauagcaacccucagaaguuuacauccucagcggacggggugaccacgcacuacgugagucagauaggagauuucccagaccagaccgaggauggcggucugccccaaagcgggagaauugucguugacuauaugaugcagaaaccuggaaagacaggcacuaucguguaccagaggggcguacucuuaccacagaaaguguggugcgcaucugggcgguccaaggucauuaaaggaucacugccccuuaucggugaagccgacuguuugcaugaggaauacggcgggcugaauaagagcaaaccguauuacaccggaaagcacgcuaaggccaucggcaacugcccuauuugggugaaaacaccccuaaagcucgcaaaugguacuaaauaucgcccuccagcuaagcugcuuaaagagcgaggguuuuucggcgccauagcgggauuucuggagggcgggugggaaggaaugaucgccgguuggcacggcuacaccagucauggggcacacggaguugcuguggccgcugauuugaagucuacacaagaggccauuaacaagaucaccaaaaaccucaauucccugagcgaauuagaggucaagaaccugcagagacucucgggcgcaauggacgaacuucauaaugagauacuggaguuggaugaaaaaguggacgaucuaagggccgacacuauuucuucccagaucgagcuggcuguacuccugucaaacgaagguaucauuaauagugaggaugaacaccuucuggcguuggagcggaagcucaaaaagaugcuggggcccagcgcaguugacaucggcaacggauguuucgagacgaagcacaaaugcaaucaaacaugcuuagaucguauugccgcuggcaccuuuaacgccggggaguucucccugccaacuuuugacucucuaaauauaaccgcagccagccucaacgaugacggacuggacaaucauacaauccuuuuguauuacucaaccgcugccaguucccuggcagugacucucaugcuggcgauuuucaucgucuauauggugagccgcgauaacgucucuuguucaaucugccuuuga

SEQ ID NO: 156561 - RNA, 1755 nt, Artificial Sequence; identical to SEQ ID NO: 156500
  derived and/or modified CDS sequence (opt3) from hemagglutinin__InfluenzaB__ALN39795

SEQ ID NO: 156562 - RNA, 1758 nt, Artificial Sequence
  derived and/or modified CDS sequence (opt3) from hemagglutinin__InfluenzaB__ALN39796
augaaggccaucauugugcugcucauggucguuaccagcaacgcugacagaauaugcacaggcaucacuuccucuaauucaccccacgugguaaaaacggcaacccagggggaggugaacgucacaggagugauuccucuuacuaccacaccaaccaagagucauuucgccaaucugaaagguacugaaacaaggggcaaguuguguccgaaaugcuuaaacuguaccgaucuggacguugcgcuagggcggcccaagugcacgggaaagaucccuagcgcucgcguguccauucuccacgagguccgaccagugacuucuggcuguuuucccaucaugcaugaucguaccaaaauaagacaacugccuaaucuucugagggguuacgaacacauccgguugucgacacauaacguaauuaaugccgaggacgcaccagggggacccuauaagaucggcacuucaggcagcugcccuaacgccaccaaugggaacggauucuuugcuacaauggcaugggccguuccgaaaaaugauaagaacaaaaccgcuacgaauccacucacuauugaagugcccuacaucuguacagagggugaggaccagauaaccgucuggggcuuccacagugauaacgaaacucagauggccaagcuguauggggacuccaagccucagaaauuuacaucuagcgcgaauggagugaccacgcacuacgugucccaaauuggcgguuucccaaaccagaccgaggaugggggacugccccagucaggccgcaucgucguugacuauauggugcagaagaguggcaaaacagggacuauuaccuaccaaagaggaauccucuuaccucagaagguauggugcgcaagcgguaggucuaaagugaucaagggcucccugccacuuauuggggaagccgauuguuugcaugagaaauauggaggccugaacaagucaaagcccuacuacacaggugagcacgcuaaagccauagggaauugcccgaucugggucaagacuccucuaaaacucgcaaacggcaccaaguaucggcccccagcuaaacugcuuaaggaacgcggauuuuucggcgccauugcgggguuucuggagggagguugggaaggcaugaucgccggguggcauggauacacaagccacggcgcacacgguguggcuguugccgcugacuugaagaguacccaggaggccauaaauaaaauuacuaagaaccucaauucucuguccgaauuagaggugaaaaaccugcagcgacucagcggggcaauggaugagcuucauaaugaaauccuggaguuggacgaaaaggucgacgaucuaagagccgacacgaucucgucucaaauugagcuggcugugcuccuguccaacgaaggcaucauuaauucagaggaugagcaccuucuggcguuggaaaggaaacucaagaagaugcugggaccuagugcaguagagauaggcaacggguguuucgaaacaaaacauaagugcaaucagaccugcuuagaccggaucgccgcuggaacuuuugaugccggugaguucagccugcccaccuuugacucccuaaacauuacagcagccucucucaaugaugacggccuggauaaccacaccauccuuuuguauuacagcacugcugccucaagucuggcaguuacacucaugaucgcgauuuucguggucuauauggugucccgugacaaugucagcuguucuauaugccuguga

SEQ ID NO: 156563 - RNA, 1755 nt, Artificial Sequence; identical to SEQ ID NO: 156500
  derived and/or modified CDS sequence (opt3) from hemagglutinin__InfluenzaB__ALN39797

SEQ ID NO: 156564 - RNA, 1755 nt, Artificial Sequence
  derived and/or modified CDS sequence (opt3) from hemagglutinin__InfluenzaB__ALN39798
augaaggccaucauugugcugcucauggucguuaccagcaacgcugacagaauaugcacaggcaucacuuccucuucaaguccccacgugguaaaaacggcaacccagggggaagugaaugucacaggagugauuccucuuacuaccacaccaaccaagagcuacuucgccaaccugaaagguacuaggacacggggcaaguuguguccggauugcuuaaauuguaccgaccuggauguugcgcuagggcgccccaugugcgugggaacgacuccuuccgcuaaagccucuauccuccaugaaguccgaccagugaccucgggcuguuuucccauuaugcacgaccguacaaagaucagacaacugccuaaccuucugagggguuaugagaagauacgguugucaacucagaauguaaucgaugcagaaaaagccccagggggacccuaccgccucggcaccagcggcaguugcccuaacgcuacauccaagauuggguucuuugcaaccauggccugggcuguuccaaaagacaauuauaagaacgccacgaauccgcagacuguggagguccccuacaucuguacagaaggagaggaucagauuaccgugugggguuuccauucugacaacaaaacucaaaugaaaagccuguauggcgauuccaauccucagaaguuuacaucaagugcgaacggggugaccacgcacuacgucagccagaucggagacuucccagaucagaccgaggacggcggucugccccaaucugggagaauaguuguggauuauaugaugcagaagccuggaaagacaggcacuauuguauaccagaggggcgugcucuuaccacagaaagucuggugcgcauccgggcggucaaaggugaucaaaggaagccugccccuuauuggugaagccgacuguuugcaugaggaauacggcgggcugaauaagaguaaaccguauuacaccggaaagcacgcuaaggccaucggcaacugcccuaucuggguuaaaacaccccuaaagcucgcaaaugguacuaaauaucgcccuccagcuaagcugcuuaaagagcgaggguuuuucggcgccauugcgggauuucuggagggcgggugggaaggaaugauagccgguuggcacggcuacaccucucauggggcacacggaguggcugucgccgcugacuugaaguccacacaagaggccaucaacaagauuaccaaaaaccucaauagccugucggaauuagaggugaagaaccugcagagacucucuggcgcaauggaugaacuucauaaugagauccuggaguuggacgaaaaaguagaugaccuaagggccgauacuauauccucacagauugagcuggcuguucuccugaguaacgaagguaucaucaauagcgaggacgaacaccuucuggcguuggagcggaagcucaaaaagaugcuggggcccuccgcaguggauauuggcaacggauguuucgagacgaagcacaaaugcaaucaaacaugcuuagaccguaucgccgcuggcaccuuuaacgccggggaguucucucugccaacuuuugauagccuaaauauuaccgcagccucacucaacgacgauggacuggacaaucauacaauacuuuuguauuacaguaccgcugccuccagccuggcagucacucucaugcuggcgaucuucauuguguauauggucucucgcgacaacgugucauguaguaucugccuuuga

SEQ ID NO: 156565 - RNA, 1755 nt, Artificial Sequence; identical to SEQ ID NO: 156337
  derived and/or modified CDS sequence (opt3) from hemagglutinin__InfluenzaB__ALN39799

SEQ ID NO: 156566 - RNA, 1755 nt, Artificial Sequence
  derived and/or modified CDS sequence (opt3) from hemagglutinin__InfluenzaB__ALN39800
augaaggccaucauugugcugcucauggucguuaccagcaacgcugacagaauaugcacaggcaucacuuccucuaauucaccccacgugguaaaaacggcaacccagggggaagugaacgucacaggagugauuccucuuacuaccacaccaaccaagaguuacuucgccaaucugaaagguacuaggacacggggcaaguuguguccggauugcuuaaacuguaccgaccuggauguugcgcuagggcgccccaugugcgugggaacgacuccuagcgcuaaagccuccauccuccaugaaguccgaccagugaccucuggcuguuuucccauuaugcacgaccguacaaagaucagacaacugccuaaucuucugagggguuaugagaagauacgguugucgacucagaacguaaucgaugcagaaaaagccccagggggacccuaccgccucggcaccucaggcagcugcccuaaugcuacaaguaagauuggguucuuugcaaccauggccugggcuguuccaaaagacaacuauaagaaugccacgaacccgcagacuguggagguccccuacaucuguacagaaggagaggaucagauuaccgugugggguuuccauuccgacaauaaaacucaaaugaagucucuguauggcgauagcaacccucagaaguuuacauccucagcgaauggggugaccacgcacuacgucagucagaucggagacuucccagaucagaccgaggacggcggucugccccaaagcgggagaauaguuguggauuauaugaugcagaaaccuggaaagacaggcacuauuguauaccagaggggcgugcucuuaccacagaaagucuggugcgcaucugggcgguccaaggugaucaaaggaucacugccccuuauuggugaagccgacuguuugcaugaggaauacggcgggcugaacaagagcaaaccguauuacaccggaaagcacgcuaaggccaucggcaauugcccuaucuggguuaaaacaccccuaaagcucgcaaacgguacuaaauaucgcccuccagcuaagcugcuuaaagagcgaggguuuuucggcgccauugcgggauuucuggagggcgggugggaaggaaugauagccgguuggcacggcuacaccagucauggggcacacggaguggcugucgccgcugacuugaagucuacacaagaggccaucaacaagauuaccaaaaaucucaacucccugagcgaauuagaggugaagaaucugcagagacucucgggcgcaauggaugaacuucauaacgagauccuggaguuggacgaaaaaguagaugaccuaagggccgauacuauaucuucccagauugagcuggcuguucuccugucaaaugaagguaucaucaacagugaggacgaacaccuucuggcguuggagaagaaacucaagaagaugcuggggcccagcgcaguggauauuggcaauggauguuucgagacgaaacacaagugcaaccaaacaugcuuagaccggaucgccgcuggcaccuuuaaugccggggaguucucccugccaacuuuugauucucuaaacauuaccgcagccagccucaaugacgauggacuggacaaccauacaauacuuuuguauuacucaaccgcugccaguucccuggcagucacucucaugcuggcgaucuucauuguguauauggucagccgugacaaugugucuuguucaaucugccuuuga

SEQ ID NO: 156567 - RNA, 1755 nt, Artificial Sequence; identical to SEQ ID NO: 156557
  derived and/or modified CDS sequence (opt3) from hemagglutinin__InfluenzaB__ALN39801

SEQ ID NO: 156568 - RNA, 1755 nt, Artificial Sequence; identical to SEQ ID NO: 156500
  derived and/or modified CDS sequence (opt3) from hemagglutinin__InfluenzaB__ALN39802

SEQ ID NO: 156569 - RNA, 1755 nt, Artificial Sequence; identical to SEQ ID NO: 156557
  derived and/or modified CDS sequence (opt3) from hemagglutinin__InfluenzaB__ALN39803

SEQ ID NO: 156570 - RNA, 1755 nt, Artificial Sequence; identical to SEQ ID NO: 156496
  derived and/or modified CDS sequence (opt3) from hemagglutinin__InfluenzaB__ALN39804

SEQ ID NO: 156571 - RNA, 1758 nt, Artificial Sequence; identical to SEQ ID NO: 156523
  derived and/or modified CDS sequence (opt3) from hemagglutinin__InfluenzaB__ALN39805

SEQ ID NO: 156572 - RNA, 1758 nt, Artificial Sequence; identical to SEQ ID NO: 155037
  derived and/or modified CDS sequence (opt3) from hemagglutinin__InfluenzaB__ACN29380

SEQ ID NO: 156573 - RNA, 1758 nt, Artificial Sequence; identical to SEQ ID NO: 155369
  derived and/or modified CDS sequence (opt3) from hemagglutinin__InfluenzaB__EPI498048

SEQ ID NO: 156574 - RNA, 1758 nt, Artificial Sequence
  derived and/or modified CDS sequence (opt3) from hemagglutinin__InfluenzaB__ANC28539
augaaggccaucauugugcugcucauggucguuaccagcaacgcugacagaauaugcacaggcaucacuuccucuaauucaccccacgugguaaaaacggcaacccagggggaggugaacgucacaggagugauuccucuuacuaccacaccaaccaagagucauuucgccaaucugaaagguacugaaacaaggggcaaguuguguccgaaaugcuuaaacuguaccgaucuggacguugcgcuagggcggcccaagugcacgggaaagaucccuagcgcucgcguguccauucuccacgagguccgaccagugacuucuggcuguuuucccaucaugcaugaucguaccaaaauaagacaacugccuaaucuucugagggguuacgaacacauccgguugucgacacauaacguaauuaaugccgagaacgcaccagggggacccuauaagaucggcacuucaggcagcugcccuaauauuaccaacgggaauggauucuuugccacaauggcuugggcaguuccgaaaaacgacaagaauaaaaccgccacgaacccacucacuaucgaagugcccuacauauguacagagggugaggaucagauuaccgucuggggcuuccacagugacaaugaagcucagauggccaagcuguauggggauuccaagccucagaaauuuacuucuagcgcgaacggagugacaacccacuacgugucccaaaucggcgguuucccaaaccagacggaggacgggggacugccccagucaggccgcauugucguugauuauauggugcagaagaguggcaaaaccgggacaaucacuuaccaaagaggaauccucuuaccucagaagguauggugcgcaagcgguaggucuaaagugauuaagggcucccugccacuuauaggggaagccgacuguuugcaugagaaauauggaggccugaauaagucaaagcccuacuacaccggugagcacgcuaaagccaucgggaacugcccgauuugggucaagacaccucuaaaacucgcaaauggcacuaaguaucggcccccagcuaaacugcuuaaggaacgcggauuuuucggcgccaucgcgggguuucuggagggagguugggaaggcaugauagccggguggcauggauacaccagccacggcgcacacgguguggcuguugccgcugauuugaagaguacacaggaggccauuaacaaaaucaccaagaaucucaacucucuguccgaauuagaggugaaaaaucugcagcgacucagcggggcaauggacgagcuucauaacgaaauccuggaguuggaugaaaaggucgacgaccuaagagccgauacuauuucgucucaaaucgagcuggcugugcuccuguccaaugaaggcauuauaaacucagaggacgagcaccuucuggcguuggaaaggaaacucaagaagaugcugggaccuagugcaguagagaucggcaauggguguuucgaaacgaaacauaagugcaaccagacaugcuuagaucggauugccgcuggaaccuuugacgccggugaguucagccugcccacuuuugauucccuaaauaucaccgcagccucucucaacgacgauggccuggacaaucacacaauccuuuuguauuacagcaccgcugccucaagucuggcaguuacucucaugauugcgauauucguggucuauauggugucccgugauaacgucagcuguucuaucugccuguga

SEQ ID NO: 156575 - RNA, 1758 nt, Artificial Sequence
  derived and/or modified CDS sequence (opt3) from hemagglutinin__InfluenzaB__EPI827073
augaaggccaucauugugcugcucauggucguuaccagcaacgcugacagaauaugcacaggcaucacuuccucuaauucaccccacgugguaaaaacggcaacccagggggaggugaacgucacaggagugauuccucuuacuaccacaccaaccaagagucauuucgccaaucugaaagguacugaaacaaggggcaaguuguguccgaaaugcuuaaacuguaccgaucuggacguugcgcuagggcggcccaagugcacgggaaagaucccuagcgcucgcguguccauucuccacgagguccgaccagugacuucuggcuguuuucccaucaugcaugaucguaccaaaauaagacaacugccuaaucuucugagggguuacgaacacauccgguugucgacacauaacguaauuaaugccgagaacgcaccagggggacccuauaagaucggcacuucaggcagcugcccuaauauuaccaacgggaauggauucuuugccacaauggcuugggcaguuccgaaaaacgacaagaauaaaaccgccacgaacccacucacuaucgaagugcccuacauauguacagagggugaggaucagauuaccgucuggggccugcacagugacaaugaaauccagauggcuaagcuguauggggauuccaagccucagaaauucacuucuagcgccaacggagugacaacccacuacgugucccaaauuggcgguuuuccaaaccagacggaggacgggggacucccccagucaggccgcaucgucguugauuauauggugcagaagaguggcaaaaccgggacaaucacuuaccaaagaggaauuuuacugccucagaagguauggugcgcgagcgguaggucuaaagugauaaagggcucccuuccauugaucggggaagcagacugucugcaugagaaauauggaggccuaaauaagucaaagcccuacuacaccggugagcacgccaaagcuauugggaacugcccgaucugggucaagacaccucucaaacuggccaauggcacuaaguaucggcccccagcaaaacuucugaaggaacgcggauucuuuggcgcuauagccggguucuuggagggagguugggaaggcaugauugcgggguggcauggauacaccagccacggcgcccacgguguggcaguugcugccgaucucaagaguacacaggaggcuaucaacaaaaucaccaagaaucugaacucuuuauccgaacuggaggugaaaaaucuccagcgacuuagcggggccauggacgagcugcauaacgaaauuuuggagcuagaugaaaaggucgacgaccugagagcagauacuaucucgucucaaauugagcucgccgugcugcuuuccaaugaaggcauaaucaacucagaggacgagcaccuguuggcucucgaaaggaaacugaagaagauguuaggaccuagugcgguagagauuggcaauggguguuuugaaacgaaacauaagugcaaccagacaugccuggaucggaucgcagccggaaccuucgacgcuggugaguuuagccuacccacuuucgauucccucaauaucaccgccgcaucucugaacgacgauggccuugacaaucacacaauuuugcuguauuacagcaccgccgcuucaagucucgccguuacucugaugauagcaaucuuuguggucuauauggugucccgugauaacgucagcuguucuauuugccuuuga

SEQ ID NO: 156576 - RNA, 1758 nt, Artificial Sequence; identical to SEQ ID NO: 154795
  derived and/or modified CDS sequence (opt3) from hemagglutinin__InfluenzaB__EPI244699

SEQ ID NO: 156577 - RNA, 1758 nt, Artificial Sequence; identical to SEQ ID NO: 154788
  derived and/or modified CDS sequence (opt3) from hemagglutinin__InfluenzaB__EPI244702

SEQ ID NO: 156578 - RNA, 1755 nt, Artificial Sequence; identical to SEQ ID NO: 156177
  derived and/or modified CDS sequence (opt3) from hemagglutinin__InfluenzaB__EPI540671

SEQ ID NO: 156579 - RNA, 1755 nt, Artificial Sequence
  derived and/or modified CDS sequence (opt3) from hemagglutinin__InfluenzaB__EPI573303
augaaggccaucauugugcugcucauggucguuaccagcaacgcugacagaauaugcacaggcaucacuuccucuaauucaccccacgugguaaaaacggcaacccagggggaagugaacgucacaggagugauuccucuuacuaccacaccaaccaagaguuacuucgccaaucugaaagguacuaggacacggggcaaguuguguccggauugcuuaaacuguaccgaccuggauguugcgcuagggcgccccaugugcgugggaacgacuccuagcgcuaaagccuccauccuccaugaaguccgaccagugaccucuggcuguuuucccauuaugcacgaccguacaaagaucagacaacugccuaaucuucugagggguuaugagaagauacgguugucgacucagaacguaaucgaugcagaaaaagccccagggggacccuaccgccucggcaccucaggcagcugcccuaaugcuacaaguaagauuggguucuuugcaaccauggccugggcuguuccaaaagacaacuauaagaaugccacgaacccgcugacuguggagguccccuacaucuguacagaaggagaggaucagauuaccgugugggguuuccauuccgacgauaaaacucagaugaagucucuguauggcgacagcaauccucaaaaguuuacauccucagcgaacggggugaccacgcacuacgucagucagaucggagauuucccagaccagaccgaggauggcggucucccccagagcgggagaauaguuguggacuauaugaugcaaaaaccuggaaagacaggcacuauuguauaccagaggggcguguuacugccacagaaagucuggugcgcaucugggcgguccaaggugaucaaaggaucacuucccuugauuggugaagccgacugucugcaugaggaauacggcgggcuaaauaagagcaaaccguauuacaccggaaagcacgcuaaggccaucggcaacugcccuaucuggguuaaaacaccccucaagcuggcaaaugguacuaaauaucgcccuccagcuaagcugcugaaagagcgaggguuuuucggcgccauugcgggauuuuuggagggcgggugggaaggaaugauagccgguuggcacggcuacaccagucauggggcacacggaguggcugucgccgcugaucucaagucuacacaggaggccaucaacaagauuaccaaaaaccuuaauuccuuaagcgaacuggaggugaagaaccuccaaagacuuucgggcgcaauggacgaacugcauaaugagaucuuggagcuagaugaaaaaguagacgaucugagggccgacacuauaucuucccagauugagcucgcuguucugcuuucaaacgaagguaucaucaauagugaggaugaacaccuguuggcgcucgagcggaagcugaaaaagauguuagggcccagcgcaguggacauuggcaacggauguuucgagacgaagcacaaaugcaaucagacaugccuggaucguaucgccgcuggcaccuuuaacgccggggaguucucccuaccaacuuuugacucucucaauauuaccgcagccagccugaacgaugacggacuugacaaucauacaauauugcuguauuacucaaccgcugccaguucccucgcagucacucugaugcuugcgaucuucauuguguauauggucagccgcgauaacgugucuuguucaaucugccuguga

SEQ ID NO: 156580 - RNA, 1755 nt, Artificial Sequence
  derived and/or modified CDS sequence (opt3) from hemagglutinin__InfluenzaB__EPI829466
augaaggccaucauugugcugcucauggucguuaccagcaacgcugacagaauaugcacaggcaucacuuccucuaauucaccccacgugguaaaaacggcaacccagggggaggugaacgucacaggagugauuccucuuacuaccacaccaaccaagaguuacuucgccaaucugaaagguacuaggacacggggcaaguuguguccggauugcuuaaacuguaccgaccuggauguugcgcuagggcgccccaugugcgugggaacgacuccuagcgcuaaagccuccauccuccaugaaguccgaccagugaccucuggcuguuuucccauuaugcacgaccguacaaagaucagacaacugccuaaucuucugagggguuaugagaagauacgguugucgacucagaacguaaucgaugcagaaaaagccccagggggacccuaccgccucggcaccucaggcagcugcccuaaugcuacaaguaagauuggguucuuugcaaccauggccugggcuguuccaaaagacaacuauaagaaugccacgaacccgcugacuguggagguccccuacaucuguacagaaggagaggaucagauuaccgugugggguuuccauuccgacgauaaaacucagaugaagucucuguauggcgacagcaauccucaaaaguuuacauccucagcgaacggggugaccacgcacuacgucagucagaucggagauuucccagaccagaccgaggaugaaggccucccccagagcgguagaauaguuguggacuauaugaugcaaaaaccugggaagacaggaacuauuguauaccagaggggcguguuacugccacagaaagucuggugcgcaucuggccgguccaaggugaucaaagggucacuucccuugauuggagaggccgacugucugcaugaagaguacgguggccuaaauaagagcaaaccguauuacaccgggaagcacgcuaaggccaucggaaacugcccuaucuggguuaaaacaccccucaagcuggcaaauggcacuaaauaucgcccuccagcuaagcugcugaaagagcgaggguuuuucggugccauugcgggcuuuuuggaaggaggcugggaggggaugauagccggauggcacgguuacaccagucauggcgcacacgggguggcugucgccgcugaucucaagucuacacaggaagccaucaacaagauuaccaaaaaccuuaauuccuuaagcgagcuggaagugaagaaccuccaaagacuuucgggagcaauggacgagcugcauaaugagaucuuggaacuagaugagaaaguagacgaucugagggccgacacuauaucuucccagauugaacucgcuguucugcuuucaaacgagggcaucaucaauagugaagaugagcaccuguuggcgcucgagcggaagcugaaaaagauguuaggucccagcgcaguggacauugggaacggcuguuucgaaacgaagcacaaaugcaaucagacaugccuggaucguaucgccgcuggaaccuuuaacgccggcgaguucucccuaccaacuuuugacucucucaauauuaccgcagccagccugaacgaugacgggcuugacaaucauacaauauugcuguauuacucaaccgcugccaguucccucgcagucacucugaugcuugcgaucuucauuguguauauggucagccgcgauaacgugucuuguucaaucugccuguga

SEQ ID NO: 156581 - RNA, 1755 nt, Artificial Sequence
  derived and/or modified CDS sequence (opt3) from hemagglutinin__InfluenzaB__EPI684429
augaaggccaucauugugcugcucauggucguuaugagcaacgcugacagaauaugcaccggcaucacauccucuaauucaccccacgugguaaaaacugcaacgcagggggaagugaacgucaccggagugauuccucuuacaacuaccccaacaaagaguuacuucgccaaucugaaagguaccaggacucggggcaaguuguguccggauugcuuaaacuguacagaccuggauguugcgcuagggcgccccaugugcgugggaaccacgccuagcgcuaaagccuccauccuccaugaaguccgaccagugacuucuggcuguuuucccauuaugcacgaccguaccaagaucagacaacugccuaaucuucugagggguuaugagaagauacgguugucgacacagaacguaaucgaugcagaaaaagccccagggggacccuaccgccucggcacuucaggcagcugcccuaaugcuaccaguaagauuggguucuuugcaacaauggccugggcuguuccaaaagacaacuauaagaaugccaccaacccgcagacgguggagguccccuacaucuguacugaaggagaggaucagauuacagugugggguuuccauuccgacaauaaaacccaaaugaagucucuguauggcgauagcaacccucagaaguuuacuuccucagcgaauggggugacaacccacuacgucagucagaucggagacuucccagaucagacggaggacggcggucugccccaaagcgggagaauaguuguggauuauaugguacagaaaccuggaaagaccggcacaauuguguaccagaggggcguccucuuaccacagaaaguguggugcguuucugggcgguccaaggugaucaaaggaucacugccccuuauuggugaagcagacuguuugcaugaggaauacggcgggcugaacaagagcaaaccguauuacacuggaaagcacgccaaggcuaucggcaauugcccuaucugggucaaaaccccucuaaagcucgccaacgguacaaaauaucgcccacccgcaaagcugcuuaaagagcgaggguuuuucggcgcuauugccggauuucuggagggcgggugggaaggaaugauagcggguuggcacggcuacacaagucauggggcccacggaguggcaguagcugccgacuugaagucuacccaagaggcuaucaacaagauuacuaaaaaucucaacucccugagcgaauuagagguuaagaaucugcagagacucucgggcgccauggaugaacuucauaacgagauccuggaguuggacgaaaaaguggaugaccuaagggcagauaccauaucuucccagauugagcuggccguccuccugucaaaugaagguaucaucaacagugaggacgaacaccuucuggcuuuggagcggaagcucaaaaagaugcuggggcccagcgcgguggauauuggcaauggauguuucgagacuaagcacaaaugcaaccaaacgugcuuagaccguaucgcagccggcacauuuaaugcuggggaguucucccugccaaccuuugauucucuaaacauuacugccgcaagccucaaugacgauggacuggacaaccauaccauacuuuuguauuacucaacagccgcuaguucccuggccgucacccucaugcuggcaaucuucauuguguauaugguuagccgcgacaaugugucuuguucaaucugccuuuga

SEQ ID NO: 156582 - RNA, 1758 nt, Artificial Sequence; identical to SEQ ID NO: 154800
  derived and/or modified CDS sequence (opt3) from hemagglutinin__InfluenzaB__AFH58447

SEQ ID NO: 156583 - RNA, 1758 nt, Artificial Sequence
  derived and/or modified CDS sequence (opt3) from hemagglutinin__InfluenzaB__EPI173279
augaaggccaucauugugauacugauggucguuaccagcaacgcugacagaaucugcacaggcauuacuuccucuaauucaccccacgugguaaaaacggcaacccagggggaggugaacgucacaggagugaucccucucacuaccacaccaaccaagagucauuucgccaaucuuaaagguacugaaacaaggggcaagcuguguccgaaaugcuugaacuguaccgauuuagacguugcgcuggggcggcccaagugcacgggaaagauuccuagcgcucgcguguccauccuacacgagguccgaccagugacuucuggcuguuuucccauaaugcaugaucguaccaaaaucagacaacucccuaaucugcuuagggguuacgaacacauucggcugucgacacauaacguaaucaaugccgagaacgcaccagggggacccuauaagauuggcacuucaggcagcugcccuaauaucaccaacgggaauggauucuuugccacaauggcuugggcaguuccaaagaacgacaagaauaaaaccgccacgaacccguugacuauagaagugcccuacauuuguacagagggugaggaucagaucaccgucuggggcuuccacagugacuccgaaacucagauggcuaagcucuauggggauucuaagccucagaaauuuacaagcuccgccaauggagugaccacgcacuacgugucacaaauuggcgguuucccaaaccagaccgaggacgggggacugccccagaguggccgcaucgucguugauuauauggugcagaaaagcggcaaaacagggacuaucaccuaccaaagagguauucugcucccucagaagguauggugcgcgucuggaagguccaaagugauaaagggcucauuaccacugaucggggaagcagacugucuucaugagaaauauggaggcuugaacaagagcaagcccuacuacacaggugagcacgccaaagcuauugggaauugcccgaucugggucaagacuccucugaaacuagccaacggcaccaaguaucggcccccagcaaaacuccugaaggaacgcggauuuuucggcgcuauagccggguuucuugagggagguugggaaggcaugauugcgggguggcauggauacacaagucacggcgcccacgguguggcaguugcugccgaucugaagucuacccaggaggcuaucaauaaaaucacuaagaaccuuaauucccucagcgaacuggaggugaaaaacuuacagcgacugucgggggccauggacgagcuccauaaugaaauucuugagcuggaugaaaaggucgacgacuugagagcagauacgaucucuucccaaauugagcuagccgugcugcucucaaacgaaggcauaaucaauagugaggacgagcaccuguuggcucuggaaaggaaauugaagaagaugcucggaccuagcgcgguagagauuggcaacggguguuucgaaacaaaacauaagugcaaucagaccugccuggaucggaucgcagccggaacuuuugacgcuggugaguucuccuuacccaccuuugauucucugaacaucacagccgcaagccuaaaugacgauggccucgacaaccacaccauucugcuuuauuacucaacugccgcuaguuccuuggccguuacacugaugauagcaaucuucguggucuauauggugagccgugauaaugucucuuguucaauuugccucuga

SEQ ID NO: 156584 - RNA, 1758 nt, Artificial Sequence; identical to SEQ ID NO: 155369
  derived and/or modified CDS sequence (opt3) from hemagglutinin__InfluenzaB__EPI163726

SEQ ID NO: 156585 - RNA, 1758 nt, Artificial Sequence; identical to SEQ ID NO: 156523
  derived and/or modified CDS sequence (opt3) from hemagglutinin__InfluenzaB__EPI636340

SEQ ID NO: 156586 - RNA, 1758 nt, Artificial Sequence
  derived and/or modified CDS sequence (opt3) from hemagglutinin__InfluenzaB__EPI645995
augaaggccaucauugugcugcucauggucguuaccagcaacgcugacagaauaugcacaggcaucacuuccucuaauucaccccacgugguaaaaacggcaacccagggggaggugaacgucacaggagugauuccucuuacuaccacaccaaccaagagucauuucgccaaucugaaagguacugaaacaaggggcaaguuguguccgaaaugcuuaaacuguaccgaucuggacguugcgcuagggcggcccaagugcacgggaaagaucccuagcgcucgcguguccauucuccacgagguccgaccagugacuucuggcuguuuucccaucaugcaugaucguaccaaaauaagacaacugccuaaucuucugagggguuacgaacacguacgguugucgacacauaacguuaucaaugccgaggacgcaccagggggacccuauaagauuggcacuucaggcagcugcccuaacaucaccaaugggaacggauucuuugccacaauggcuugggcagugccgaaaaaugauaagaacaaaaccgccacgaauccacucacuauugaaguccccuacaucuguacagagggugaggaccagauaaccguguggggcuuccacagugaugacgaaacucagauggcuaagcuguauggggauuccaagccucagaaauuuacaucuagcgccaacggagugaccacgcacuacgucucccaaauuggcgguuucccaaaucagaccgaggacgggggacugccccagucaggccgcaucguuguggauuauaugguacagaagaguggcaaaacagggacuauuaccuaccaaagaggaauccucuuaccucagaagguguggugcgcgagcgguaggucuaaagucaucaagggcucccugccacuuauuggggaagcagacuguuugcaugagaaauauggaggccugaacaagucaaagcccuacuacacaggugagcacgccaaagcuauagggaacugcccgaucugggugaagacuccucuaaaacucgccaauggcaccaaguaucggcccccagcaaaacugcuuaaggaacgcggauuuuucggcgcuauugccggguuucuggagggagguugggaaggcaugaucgcgggguggcauggauacacaagccacggcgcccacgguguugcaguggcugccgauuugaagaguacccaggaggcuauaaacaaaauuacuaagaaucucaacucucuguccgaauuagaggucaaaaaucugcagcgacucagcggggccauggacgagcuucauaacgaaauccuggaguuggacgaaaagguggaugaccuaagagcagauacgaucucgucucaaauugagcuggccguacuccuguccaaugaaggcaucauuaacucagaggacgagcaccuucuggcuuuggaaaggaaacucaagaagaugcugggaccuagugcgguugagauaggcaauggguguuucgaaacaaaacauaagugcaaccagaccugcuuagaucggaucgcagccggaacuuuugacgcuggugaguucagccugcccaccuuugauucccuaaauauuacagccgcaucucucaacgacgauggccuggacaaucacaccauccuuuuguauuacagcacugccgcuucaagucuggccgugacacucaugaucgcaauuuucgucguguauauggucucccgugauaacgugagcuguucuauaugccuguga

SEQ ID NO: 156587 - RNA, 1755 nt, Artificial Sequence; identical to SEQ ID NO: 156177
  derived and/or modified CDS sequence (opt3) from hemagglutinin__InfluenzaB__EPI539769

SEQ ID NO: 156588 - RNA, 1755 nt, Artificial Sequence; identical to SEQ ID NO: 156579
  derived and/or modified CDS sequence (opt3) from hemagglutinin__InfluenzaB__EPI551249

SEQ ID NO: 156589 - RNA, 1755 nt, Artificial Sequence
  derived and/or modified CDS sequence (opt3) from hemagglutinin__InfluenzaB__EPI544259
augaaggccaucauugugcugcucauggucguuaccagcaacgcugacagaauaugcacaggcaucacuuccucuaauucaccccacgugguaaaaacggcaacccagggggaagugaacgucacaggagugauuccucuuacuaccacaccaaccaagaguuacuucgccaaucugaaagguacuaggacacggggcaaguuguguccggauugcuuaaacuguaccgaccuggauguugcgcuagggcgccccaugugcgugggaacgacuccuagcgcuaaagccuccauccuccaugaaguccgaccagugaccucuggcuguuuucccauuaugcacgaccguacaaagaucagacaacugccuaaucuucugagggguuaugagaagauacgguugucgacucagaacguaaucgaugcagaaaaagccccagggggacccuaccgccucggcaccucaggcagcugcccuaaugcuacaaguaagauuggguucuuugcaaccauggccugggcuguuccaaaagacaacuauaagaaugccacgaacccgcugacuguggagguccccuacaucuguacagaaggagaggaucagauuaccgugugggguuuccauuccgacaauaaaaaccagaugaagucucuguauggcgauagcaauccucaaaaguuuacuuccucagcgaacggggugacaacccacuacgucagucagaucggagacuucccagaucagacggaggacggcggucucccccagagcgggagaauaguuguggauuauaugaugcaaaaaccuggaaagaccggcacaauuguauaccagaggggcguguuacugccacagaaagucuggugcgcaucugggcgguccaaggugaucaaaggaucacuucccuugauuggugaagccgacugucugcaugaggaauacggcgggcuaaauaagagcaaaccguauuacacuggaaagcacgcuaaggccaucggcaacugcccuaucuggguuaaaaccccucucaagcuggcaaacgguacaaaauaucgcccacccgcuaagcugcugaaagagcgaggguuuuucggcgccauugcgggauuuuuggagggcgggugggaaggaaugauagccgguuggcacggcuacacaagucauggggcacacggaguggcugucgccgcugaccucaagucuacccaggaggccaucaauaagauuacuaaaaaccuuaauuccuuaagcgaacuggaggugaagaaccuccaaagacuuucgggcgcaauggaugaacugcauaaugagaucuuggagcuagacgaaaaaguagaugaccugagggccgauaccauaucuucccagauugagcucgcuguucugcuuucaaacgaagguaucaucaauagugaggacgaacaccuguuggcgcucgagcggaagcugaaaaagauguuagggcccagcgcaguggauauuggcaacggauguuucgagacuaagcacaaaugcaaucagacgugccuggaccguaucgccgcuggcacauuuaacgccggggaguucucccuaccaaccuuugauucucucaauauuacugcagccagccugaacgacgauggacuugacaaucauaccauauugcuguauuacucaacagcugccaguucccucgcagucacccugaugcuugcgaucuucauuguguauauggucagccgcgacaacgugucuuguucaaucugccuguga

SEQ ID NO: 156590 - RNA, 1755 nt, Artificial Sequence
  derived and/or modified CDS sequence (opt3) from hemagglutinin__InfluenzaB__EPI592699
augaaggccaucauugugcugcucauggucguuaccagcaacgcugacagaauaugcacaggcaucacuuccucuaauucaccccacgugguaaaaacggcaacccagggggaagugaacgucacaggagugauuccucuuacuaccacaccaaccaagaguuacuucgccaaucugaaagguacuaggacacggggcaaguuguguccggauugcuuaaacuguaccgaccuggauguugcgcuagggcgccccaugugcgugggaacgacuccuagcgcuaaagccuccauccuccaugaaguccgaccagugaccucuggcuguuuucccauuaugcacgaccguacaaagaucagacaacugccuaaucuucugagggguuaugagaagauacgguugucgacucagaacguaaucgaugcagaaaaagccccagggggacccuaccgccucggcaccucaggcagcugcccuaaugcuacaaguaagauuggguucuuugcaaccauggccugggcuguuccaaaagacaacuauaagaaugccacgaacccgcagacuguggagguccccuacaucuguacagaaggagaggaucagauuaccgugugggguuuccauuccgacaauaaaauccaaaugaagucucuguauggcgauagcaacccucagaaguuuacuuccucagcgaauggggugacaacccacuacgucagucagauaggagacuucccagaucagacggaggacggcggucugccccaaagcgggagaauuguuguggauuauaugguacagaaaccuggaaagaccggcacaaucguguaccagaggggcguccucuuaccacagaaaguguggugcgcaucugggcgguccaagguuauuaaaggaucacugccccuuaucggugaagccgacuguuugcaugaggaauacggcgggcugaacaagagcaaaccguauuacacuggaaagcacgcuaaggccaucggcaauugcccuauuugggugaaaaccccucuaaagcucgcaaacgguacaaaauaucgcccacccgcuaagcugcuuaaagagcgaggguuuuucggcgccauagcgggauuucuggagggcgggugggaaggaaugaucgccgguuggcacggcuacacaagucauggggcacacggagucgcuguggccgcugacuugaagucuacccaagaggccauuaacaagaucacuaaaaaucucaacucccugagcgaauuagagguaaagaaucugcagagacucucgggcgcaauggaugaacuucauaacgagauacuggaguuggacgaaaaaguugaugaccuaagggccgauaccauuucuucccagaucgagcuggcugugcuccugucaaaugaagguaucauuaacagugaggacgaacaccuucuggcguuggagcggaagcucaaaaagaugcuggggcccagcgcagucgauaucggcaauggauguuucgagacuaagcacaaaugcaaccaaacgugcuuagaccguauugccgcuggcacauuuaaugccggggaguucucccugccaaccuuugauucucuaaacauaacugcagccagccucaaugacgauggacuggacaaccauaccauccuuuuguauuacucaacagcugccaguucccuggcagugacccucaugcuggcgauuuucaucgucuauauggugagccgcgacaauguuucuuguucaaucugccuuuga

SEQ ID NO: 156591 - RNA, 1755 nt, Artificial Sequence; identical to SEQ ID NO: 156500
  derived and/or modified CDS sequence (opt3) from hemagglutinin__InfluenzaB__EPI592707

SEQ ID NO: 156592 - RNA, 1755 nt, Artificial Sequence
  derived and/or modified CDS sequence (opt3) from hemagglutinin__InfluenzaB__EPI693094
augaaggccaucauugugcugcucauggucguuaccagcaacgcugacagaauaugcacaggcaucacuuccucuaauucaccccacgugguaaaaacggcaacccagggggaggugaacgucacaggagugauuccucuuacuaccacaccaaccaagaguuacuucgccaaucugaaagguacuaggacacggggcaaguuguguccggauugcuuaaacuguaccgaccuggauguugcgcuagggcgccccaugugcgugggaacgacuccuagcgcuaaagccuccauccuccaugaaguccgaccagugaccucuggcuguuuucccauuaugcacgaccguacaaagaucagacaacugccuaaucuucugagggguuaugagaagauacgguugucgacucagaacguaaucgaugcagaaaaagccccagggggacccuaccgccucggcaccucagagagcugcccuaaugcuacaaguaagauuggcuucuuugcaaccauggccugggcuguuccaaaagacaacuauaagaaugccacgaacccgcagacuguggaaguccccuacaucuguacagagggggaggaucagauuaccguguggggauuccauuccgacaauaaaauccaaaugaagucucuguauggugauagcaacccucagaaguuuacuuccucagcgaauggcgugacaacccacuacgucagucagauaggggacuucccagaucagacggaagacggaggccugccccaaagcgguagaauuguuguggauuauaugguacagaaaccugggaagaccggaacaaucguguaccagaggggcguccucuuaccacagaaaguguggugcgcaucuggccgguccaagguuauuaaagggucacugccccuuaucggagaggccgacuguuugcaugaagaguacgguggccugaacaagagcaaaccguauuacacugggaagcacgcuaaggccaucggaaauugcccuauuugggugaaaaccccucuaaagcucgcaaacggcacaaaauaucgcccacccgcuaagcugcuuaaagagcgaggguuuuucggugccauagcgggcuuucuggaaggaggcugggaggggaugaucgccggauggcacgguuacacaagucauggcgcacacggggucgcuguggccgcugacuugaagucuacccaagaagccauuaacaagaucacuaaaaaucucaacucccugagcgaguuagaaguaaagaaucugcagagacucucgggagcaauggaugagcuucauaacgagauacuggaauuggacgagaaaguugaugaccuaagggccgauaccauuucuucccagaucgaacuggcugugcuccugucaaaugagggcaucauuaacagugaagacgagcaccuucuggcguuggagcggaagcucaaaaagaugcugggucccagcgcagucgauaucgggaauggcuguuucgaaacuaagcacaaaugcaaccaaacgugcuuagaccguauugccgcuggaacauuuaaugccggcgaguucucccugccaaccuuugauucucuaaacauaacugcagccagccucaaugacgaugggcuggacaaccauaccauccuuuuguauuacucaacagcugccaguucccuggcagugacccucaugcuggcgauuuucaucgucuauauggugagccgcgacaauguuucuuguucaaucugccuuuga

SEQ ID NO: 156593 - RNA, 1758 nt, Artificial Sequence; identical to SEQ ID NO: 156523
  derived and/or modified CDS sequence (opt3) from hemagglutinin__InfluenzaB__EPI678796

SEQ ID NO: 156594 - RNA, 1758 nt, Artificial Sequence
  derived and/or modified CDS sequence (opt3) from hemagglutinin__InfluenzaB__EPI721064
augaaggccaucauugugcugcucauggucguuaccagcaacgcugacagaauaugcacaggcaucacuuccucuaauucaccccacgugguaaaaacggcaacccagggggaggugaacgucacaggagugauuccucuuacuaccacaccaaccaagagucauuucgccaaucugaaagguacugaaacaaggggcaaguuguguccgaaaugcuuaaacuguaccgaucuggacguugcgcuagggcggcccaagugcacgggaaagaucccuagcgcucgcguguccauucuccacgagguccgaccagugacuucuggcuguuuucccaucaugcaugaucguaccaaaauaagacaacugccuaaucuucugagggguuacgaacacguacgguugucgacacauaacguuaucaaugccgaggacgcaccagggggacccuauaagauuggcacuucacgcagcugcccuaacaucaccaauggcaacggguucuuugccacaauggcuugggcagugcccaaaaaugauaagaacaaaaccgccacgaauccgcucacuauugaaguccccuacaucuguacagagggagaggaccagauaaccgugugggguuuccacagugauaacgaaacucagauggcuaagcuguauggcgacuccaagccucagaaauuuacaucuagcgccaauggggugaccacgcacuacgucucccaaauuggaggcuucccaaaccagaccgaggauggugggcugccccagucaggaagaaucguuguggacuauaugguacagaagaguggcaaaacaggcacuauuaccuaccaaagggggauccucuuaccucagaagguguggugcgcgagcggacggucuaaagucaucaaggguucccugccacuuauuggcgaagcagauuguuugcaugagaaauaugggggacugaacaagucaaagcccuacuacacaggcgagcacgccaaagcuauagguaauugcccgaucugggugaagacuccucuaaaacucgccaacgggaccaaguaucgcccaccagcaaaacugcuuaaggaacgaggcuuuuucggagcuauugccggcuuucuggaagggggaugggaggguaugaucgcgggcuggcauggguacacaagccacggagcccacggcguugcaguggcugccgacuugaagaguacccaggaggcuauaaauaaaauuacuaagaaccucaauucucuguccgaauuagaggucaaaaaccugcagagacucagcggugccauggaugagcuucauaaugaaauccuggaguuggacgaaaagguggacgaucuaagggcagacacgaucucgucucaaauugagcuggccguacuccuguccaacgaagggaucauuaauucagaggaugagcaccuucuggcuuuggaacggaaacucaagaagaugcugggcccuagugcgguugagauaggaaacggcuguuucgaaacaaaacauaagugcaaucagaccugcuuagaccguaucgcagccgggacuuuugaugcuggagaguucagccugcccaccuuugacucccuaaacauuacagccgcaucucucaaugaugacggucuggauaaccacaccauccuuuuguauuacagcacugccgcuucaagucuggccgugacacucaugaucgcaauuuucgucguguauauggucucccgcgacaaugugagcuguucuauaugccuguga

SEQ ID NO: 156595 - RNA, 1758 nt, Artificial Sequence; identical to SEQ ID NO: 154804
  derived and/or modified CDS sequence (opt3) from hemagglutinin__InfluenzaB__EPI328904

SEQ ID NO: 156596 - RNA, 1755 nt, Artificial Sequence
  derived and/or modified CDS sequence (opt3) from hemagglutinin__InfluenzaB__EPI543191
augaaggccaucauugugcugcucauggucguuaccagcaacgcugacagaauaugcacaggcaucacuuccucuaauucaccccacgugguaaaaacggcaacccagggggaagugaacgucacaggagugauuccucuuacuaccacaccaaccaagaguuacuucgccaaucugaaagguacuaggacacggggcaaguuguguccggauugcuuaaacuguaccgaccuggauguugcgcuagggcgccccaugugcgugggaacgacuccuagcgcuaaagccuccauccuccaugaaguccgaccagugaccucuggcuguuuucccauuaugcacgaccguacaaagaucagacaacugccuaaucuucugagggguuaugagaagauacgguugucgacucagaacguaaucgaugcagaaaaagccccagggggacccuaccgccucggcaccucaggcagcugcccuaaugcuacaaguaagauuggguucuuugcaaccauggccugggcuguuccaaaagacaacuauaagaaugccacgaacccgcugacuguggagguccccuacaucuguacagaaggagaggaucagauuaccgugugggguuuccauuccgacaaaaagacucagaugaagucucuguauggcgauagcaauccucaaaaauuuacauccucagcgaacggggugaccacgcacuacgucagucagaucggagacuucccagaucagaccgaggacggcggucucccccagagcgggagaauaguuguggauuauaugaugcaaaagccuggaaaaacaggcacuauuguauaccagaggggcguguuacugccacagaaggucuggugcgcaucugggcgguccaaagugaucaagggaucacuucccuugauuggugaagccgacugucugcaugaggaauacggcgggcuaaauaaaagcaagccguauuacaccggaaagcacgcuaaagccaucggcaacugcccuaucuggguuaagacaccccucaaacuggcaaaugguacuaaguaucgcccuccagcuaaacuucugaaggagcgaggguuuuucggcgccauugcgggauuuuuggagggcgggugggaaggaaugauagccgguuggcacggcuacaccagucauggggcacacggaguggcugucgccgcugaccucaagucuacacaggaggccaucaacaaaauuaccaagaacuuaaauucccugagcgaacuggaggugaaaaaccuccaaagacuuucgggcgcaauggaugaacugcauaaugagaucuuggagcuagacgaaaagguagaugaccugagggccgauacuauaucuucccagauugagcucgcuguucugcuuucaaacgaagguaucaucaauagugaggacgaacaccuguuggcgcucgagcggaaacugaagaagauguuagggcccagcgcaguggauauuggcaacggauguuucgagacgaaacacaagugcaaucagacaugccuggaccguaucgccgcuggcaccuuuaacgccggggaguucucccuaccaacuuuugauucucucaauauuaccgcagccagccugaacgacgauggacuugacaaucauacaauauugcuguauuacucaaccgcugccaguucccucgcagucacucugaugcuugcgaucuucauuguguauauggucagccgcgacaacgugucuuguucaaucugccuguga

SEQ ID NO: 156597 - RNA, 1755 nt, Artificial Sequence; identical to SEQ ID NO: 156177
  derived and/or modified CDS sequence (opt3) from hemagglutinin__InfluenzaB__EPI500359

SEQ ID NO: 156598 - RNA, 1755 nt, Artificial Sequence
  derived and/or modified CDS sequence (opt3) from hemagglutinin__InfluenzaB__EPI543185
augaaggccaucauugugcugcucauggucguuaccagcaacgcugacagaauaugcacaggcaucacuuccucuaauucaccccacgugguaaaaacggcaacccagggggaagugaacgucacaggagugauuccucuuacuaccacaccaaccaagaguuacuucgccaaucugaaagguacuaggacacggggcaaguuguguccggauugcuuaaacuguaccgaccuggauguugcgcuagggcgccccaugugcgugggaacgacuccuagcgcuaaagccuccauccuccaugaaguccgaccagugaccucuggcuguuuucccauuaugcacgaccguacaaagaucagacaacugccuaaucuucugagggguuaugagaagauacgguugucgacucagaacguaaucgaugcagaaaaagccccagggggacccuaccgccucggcaccucaggcagcugcccuaaugcuacaaguaagauuggguucuuugcaaccauggccugggcuguuccaaaagacaacuauaagaaugccacgaacccgcagacuguggagguccccuacaucuguacagaaggagaggaucagauuaccgugugggguuuccauuccgacaauaaaaaccaaaugaagucucuguauggcgauagcaauccucagaaguuuacuuccucagcgaacggggugacaacccacuacgucagucagaucggagacuucccagaucagacggaggacggcggucugccccaaagcgggagaauaguuguggauuauaugaugcagaaaccuggaaagaccggcacaauuguauaccagaggggcgugcucuuaccacagaaagucuggugcgcaucugggcgguccaaggugaucaaaggaucacugccccuuauuggugaagccgacuguuugcaugaggaauacggcgggcugaauaagagcaaaccguauuacacuggaaagcacgcuaaggccaucggcaacugcccuaucuggguuaaaaccccucuaaagcucgcaaacgguacaaaauaucgcccacccgcuaagcugcuuaaagagcgaggguuuuucggcgccauugcgggauuucuggagggcgggugggaaggaaugauagccgguuggcacggcuacacaagucauggggcacacggaguggcugucgccgcugacuugaagucuacccaagaggccaucaauaagauuacuaaaaaccucaauucccugagcgaauuagaggugaagaaccugcagagacucucgggcgcaauggaugaacuucauaaugagauccuggaguuggacgaaaaaguagaugaccuaagggccgauaccauaucuucccagauugagcuggcuguucuccugucaaacgaagguaucaucaauagugaggacgaacaccuucuggcguuggagcggaagcucaaaaagaugcuggggcccagcgcaguggauauuggcaacggauguuucgagacuaagcacaaaugcaaucaaacgugcuuagaccguaucgccgcuggcacauuuaacgccggggaguucucccugccaaccuuugauucucuaaauauuacugcagccagccucaacgacgauggacuggacaaucauaccauacuuuuguauuacucaacagcugccaguucccuggcagucacccucaugcuggcgaucuucauuguguauauggucagccgcgacaacgugucuuguucaaucugccuuuga

SEQ ID NO: 156599 - RNA, 1755 nt, Artificial Sequence; identical to SEQ ID NO: 156337
  derived and/or modified CDS sequence (opt3) from hemagglutinin__InfluenzaB__EPI536447

SEQ ID NO: 156600 - RNA, 1755 nt, Artificial Sequence; identical to SEQ ID NO: 154806
  derived and/or modified CDS sequence (opt3) from hemagglutinin__InfluenzaB__NP_056660

SEQ ID NO: 156601 - RNA, 1755 nt, Artificial Sequence
  derived and/or modified CDS sequence (opt3) from hemagglutinin__InfluenzaB__ABG85167
augaaggccaucauugugcugcucauggucguuaccagcaacgcugacagaauaugcacaggcaucacuuccucuaauucaccccacgugguaaaaacggcaacccagggggaggugaacgucacaggagugauuccucuuacuaccacaccaaccaggagucauuucgccaaucugaaggguacucaaacacggggcaaauuguguccgaacugcuuuaauuguaccgauuuagacguugcgcuggggcgccccaagugcaugggaaacaucccuagcgcuaaaguguccauucuacacgaagucaagccagugacgucuggcuguuuccccaucaugcaugaucgaacuaagauacgucagcucccuaaucugcuuagagguuacgagaacaucaggcugucgaccucaaauguaauuaacgccgaaacagcaccagggggacccuauaaaguuggcacuagcggcaguugcccuaauguggccaaccggaauggguuuuucaacaccauggcuugggucaucccaaaggacaauaacaaaacagcaauuaacccggugaccguggagguccccuacaucuguuccgaaggagaggaucagauaacgguuugggguuuucacucugacgauaagacucagauggagcgcuuguauggcgacagcaauccucaaaaauucacauccucagccaacggggugaccacucauuacguaagucagauuggaggcuuuccaaaucagacagaagaugagggucucaagcagagcgggagaaucguggucgacuauauggugcaaaagcccggaaaaaccggcacgauuguuuaccagaggggcauccugcugccucagaagguguggugcgcuucugggcgguccaaagucaucaagggaucacucccauuaauuggugaagccgauugucugcacgagaaauauggcgggcuuaacaagagcaaacccuacuacaccggagagcacgcgaaggcaauaggcaauugcccgaucugggugaagacaccuuugaaacuggccaacgguacuaaguaucgacccccagcuaaacuacucaaggaacgcggguucuuuggcgccauugcaggauuccuggagggcgggugggaaggaaugaucgcugguuggcauggcuacaccagucacggggcccauggaguagcgguugccgcagaccuuaaaucuacacaggaggcuauaaauaagauuacuaagaaccugaacuccuugagcgaacucgaggugaaaaaucugcaaagauuaucgggcgccaugaauggucugcacgaugagauccucgaacuugacgagaaggucgacgaucugagggcugacaccaucucuucccagauugaauuggccgugcuacugucaaacgaggggaucauuaauagugaagaugagcaccuccuggcacuugagcggaaacugaagaaaauguugggcccuagcgccgucgaaauaggaaacggcuguuuugagacaaagcauaagugcaaucagaccugccucgaccguaucgcugcggggacuuucaacgcaggagauuuuucccugcccacguucgacucuuuaaacauuacagccgcuagccugaaugaugacgaucuagacaaccacaccauccuccuguauuacucaacugccgcaaguucccuugccgugaccuugaugaucgcuauuuucauaguuuauauggugagccgcgauaauguaucuuguucaaucugccuguga

SEQ ID NO: 156602 - RNA, 1755 nt, Artificial Sequence
  derived and/or modified CDS sequence (opt3) from hemagglutinin__InfluenzaB__EPI376346
augaaggccaucauugugcugcucauggucguuaccagcaacgcugacagaauaugcacaggcaucacuuccucuaauucaccccacgugguaaaaacggcaacccagggggaggugaacgucacaggagugauuccucuuacuaccacaccaaccaagaguuacuucgccaaucugaaagguacuaagacaaggggcaaauuguguccggauugcuuaaacuguaccgaccuggauguugcgcuagggcggcccaugugcgugggaacgacuccuagcgcuaaggccuccauccuccaugaaguccgcccagugaccucuggcuguuuucccauuaugcacgaccgaacaaagauccgucaacuggcaaaucuucugagagguuaugagaacauaagguugucgacucagaauguaaucgaugccgaaaaagcuccugggggaccauaccggcucggcaccucaggcagcugccccaacgcaacaaguaaguccggguucuuugccaccauggcuugggccguuccuaaagacaauaacaagaaugcgacgaacccacugacuguggaggucccguauauuugugcagaaggagaggaucagaucacagugugggguuuccauucugacgauaaaacccagaugaagaaucuguacggcgacagcaacccccaaaaguuuacuuccucagccaauggggugacaacccacuaugucagucagauuggaggcuucccugaucagacggaggacggugggcucccacagagcggacgcaucguuguggauuacaugaugcaaaaacccggcaagaccggcacaauaguauaucagagagggguguuacugccucagaaagucuggugcgcuucuggaagguccaaggugauuaaagguucacuuccauugaucggcgaagccgacugucugcaugagaaguacgggggacuaaacaaaagcaagcccuacuauacuggcgaacacgcaaaggcuauugguaacugcccgaucuggguuaaaaccccucucaagcuggccaaugggacaaaauaccggcccccagcgaaacuucugaaggagcgcggcuuuuucggagccaucgcaggcuuuuuggaagggggaugggaagguaugauugcuggcuggcacggguauacaagucauggagcccacggcguggcugucgccgcagaccucaagucuacccaggaggccauaaacaagaucacuaaaaaucugaacuccuuaagcgaacuggaggugaagaaucuccaacgacuuucgggugcuauggaugaacugcauaacgagauuuuggagcuagacgaaaaaguagaugaccugagagcggauaccaucucuucccagauagagcucgcaguucugcuuucaaaugaagggauuaucaacagugaggacgaacaccuguuggcccucgagaggaagcugaaaaagauguuaggcccuagcgcuguggauaucggaaauggcuguuucgagacuaagcacaaaugcaaccagacgugccuggaccggauugccgcagggacauuuaaugccggagaguucucccuacccaccuuugauucucucaacaucacugcugccagccugaaugacgauggucuugacaaccauaccauuuugcuguacuauucaacagcagcgaguucccucgcugucacccugaugcuugccauauucaucguguacauggucagccgugacaaugugucuuguucaauuugccuguga

SEQ ID NO: 156603 - RNA, 1755 nt, Artificial Sequence; identical to SEQ ID NO: 154902
  derived and/or modified CDS sequence (opt3) from hemagglutinin__InfluenzaB__EPI368425

SEQ ID NO: 156604 - RNA, 1755 nt, Artificial Sequence; identical to SEQ ID NO: 154868
  derived and/or modified CDS sequence (opt3) from hemagglutinin__InfluenzaB__ACH53430

SEQ ID NO: 156605 - RNA, 1758 nt, Artificial Sequence; identical to SEQ ID NO: 154693
  derived and/or modified CDS sequence (opt3) from hemagglutinin__InfluenzaB__EPI331151

SEQ ID NO: 156606 - RNA, 1758 nt, Artificial Sequence
  derived and/or modified CDS sequence (opt3) from hemagglutinin__InfluenzaB__EPI356777
augaaggccaucauugugcugcucauggucguuaccagcaacgcugacagaauaugcacaggcaucacuuccucuaauucaccccacgugguaaaaacggcaacccagggggaggugaacgucacaggagugauuccucuuacuaccacaccaaccaagagucauuucgccaaucugaaagguacugaaacaaggggcaaguuguguccgaaaugcuuaaacuguaccgaucuggacguugcgcuagggcggcccaagugcacgggaaagaucccuagcgcucgcguguccauucuccacgagguccgaccagugacuucuggcuguuuucccaucaugcaugaucguaccaaaauaagacaacugccuaaucuucugagggguuacgaacacauccgguugucgacacauaacguaauuaaugccgagaacgcaccagggggacccuauaagaucggcacuucaggcagcugcccuaauguuaccaacgggaauggauucuuugccacaauggcuugggcagugccgaaaaacgacaagaauaaaaccgccacgaacccacucacuauugaaguccccuacaucuguacagagggugaggaucagauaaccguguggggcuuccacagugacgaugaaacucagauggcuaagcuguauggggacuccaagccucagaaauuuacaucuagcgccaauggagugaccacgcacuacgucucccaaauuggcgguuucccaaaccagaccgaggaugggggacugccccagucaggccgcaucguuguggacuauaugguacagaagaguggcaaaacagggacuauuaccuaccaaagaggaauccucuuaccucagaagguguggugcgcgagcgguaggucuaaagucaucaagggcucccugccacuuauuggggaagcagauuguuugcaugagaaauauggaggccugaacaagucaaagcccuacuacacaggugagcacgccaaagcuauagggaauugcccgaucugggugaagacuccucuaaaacucgccaacggcaccaaguaucggcccccagcaaaacugcuuaaggaacgcggauuuuucggcgcuauugccggguuucuggagggagguugggaaggcaugaucgcgggguggcauggauacacaagccacggcgcccacgguguugcaguggcugccgacuugaagaguacccaggaggcuauaaauaaaauuacuaagaaccucaauucucuguccgaauuagaggucaaaaaccugcagcgacucagcggggccauggaugagcuucauaaugaaauccuggaguuggacgaaaagguggacgaucuaagagcagacacgaucucgucucaaauugagcuggccguacuccuguccaacgaaggcaucauuaauucagaggaugagcaccuucuggcuuuggaaaggaaacucaagaagaugcugggaccuagugcgguugagauaggcaacggguguuucgaaacaaaacauaagugcaaucagaccugcuuagaccggaucgcagccggaacuuuugaugcuggugaguucagccugcccaccuuugacucccuaaacauuacagccgcaucucucaaugaugacggccuggauaaccacaccauccuuuuguauuacagcacugccgcuucaagucuggccgugacacucaugaucgcaauuuucgucguguauauggucucccgugacaaugugagcuguucuauaugccuguga

SEQ ID NO: 156607 - RNA, 1752 nt, Artificial Sequence; identical to SEQ ID NO: 154475
  derived and/or modified CDS sequence (opt3) from hemagglutinin__InfluenzaB__CY018349

SEQ ID NO: 156608 - RNA, 1752 nt, Artificial Sequence
  derived and/or modified CDS sequence (opt3) from hemagglutinin__InfluenzaB__AY581945
augaaggccaucauugugcugcucauggucguuaccagcaacgcugacagaauaugcacaggcaucacuuccucuaauucaccccacgugguaaaaacggcaacccagggggaggugaacgucacaggagugauuccucuuacuaccacaccaaccaagagucauuucgccaaucugaaagguacuaagacaaggggcaaauuguguccgaacugcuuaaauuguaccgaucuggacguugcgcuagcucggcccaugugcguggggacgacuccuagcgccaaggcauccauccuccacgaaguccgcccagugaccucuggauguuuucccauuaugcaugaucgaacaaagauccgucaacugccuaaccuucugagaggcuacgagaauauaagguugucgacucagaacguaaucaaugccgaacgggcuccaggugggcccuaucgccucggaaccucaggcagcugcccuaacguuacaaguagagacggcuucuuugcaaccauggccugggcugugccaagggauaauaaaacggccacuaacccgcugacagucgaggugcccuacauuuguaccaagggggaagaccagaucacuguguggggauuccacuccgauaauaaaacacagaugaagaaccuguauggugacucuaauccucaaaaauuuaccagcuccgcgaacggcgucacgacccauuacguuucacagauugggggauucccaaaccagacagaggauggcggucucccccagagugggcggaucgugguagacuauauggugcaaaagccuggaaagacuggcaccauagucuaccagcgcggcguguuacugccacagaaaguuuggugcgcaagcgggcgaucuaaggugauuaaaggaucccuucccuugaucggugaggccgauugucugcacgaaaaguauggcgggcuaaauaaaucaaagccguacuacacaggagagcacgcuaaagccauuggcaacugcccuaucugggucaagacuccccucaagcuggcaaaugguaccaaauauagaccuccagcuaaacuucugaaggaaaggggguuuuucggcgccaucgcgggauuuuuggagggcgggugggagggaaugauugccgguuggcauggcuacacaagccacggggcacauggaguggcuguagccgcugaccucaagaguacccaggaagccauaaacaaaaucacuaagaaucugaacucuuuauccgagcuggaaguuaagaaucuccaacggcuuagcggcgcaauggaugagcugcacaacgaaauuuuggagcuagacgagaaaguggacgaucugcgugccgacacgaucucgucucagauagaacucgcuguccugcuuuccaaugaggguauuaucaacucagaagaugagcaccuguuggcgcucgaacgcaagcugaaaaagauguuagggcccagugcaguggacaucggcaauggauguuucgagacaaaacauaagugcaaccagaccugccuggauagaauugccgcuggcacuuuuaaugccggggaguucagccuaccaaccuuugacucccucaacaucacagcagccucucugaaugaugacggacuugauaaccacaccauuuugcuguauuacagcacugcugccucaagucucgcagucacacugaugauagcgaucuucauuguguauaugguuuccagggacaacgugagcuguucuaucugccuuuga

SEQ ID NO: 156609 - RNA, 1755 nt, Artificial Sequence; identical to SEQ ID NO: 156356
  derived and/or modified CDS sequence (opt3) from hemagglutinin__InfluenzaB__EPI541351

SEQ ID NO: 156610 - RNA, 1755 nt, Artificial Sequence
  derived and/or modified CDS sequence (opt3) from hemagglutinin__InfluenzaB__EPI541760
augaaggccgugaucguccugcucaugguugugaccagcaacgcugacagaauuugcacaggcauaacuuccucuaauucaccccacguagugaaaacggcaacccagggggaagucaacgugacaggaguuaucccucuuacuaccacaccaaccaagaguuacuucgccaaucugaaagguacuaggacacggggcaaguuguguccggauugcuuaaacuguaccgaccuggauguggcgcuagggcgccccaugugcgucggaacgacuccuagcgcuaaagccuccauucuccaugaagugcgaccaguaaccucuggcuguuuucccaucaugcacgaccguacaaagauuagacaacugccuaaucuucugagggguuaugagaagauccgguugucgacucagaacguuauagaugcagaaaaagccccagggggacccuaccgccucggcaccucaggcagcugcccuaaugcuacaaguaagaucggguucuuugcaaccauggccugggcugugccaaaagacaacuauaagaaugccacgaacccgcugacugucgaggugcccuacauuuguacagaaggagaggaucagaucaccgugugggguuuccauuccgacaauaaaacucagaugaagucucuguauggcgauagcaacccucaaaaguuuacauccucagcgaauggggucaccacgcacuacguuagucagauuggagacuucccagaucagaccgaggacggcggucucccccagagcgggagaaucgugguagauuauaugaugcaaaaaccuggaaagacaggcacuauaguguaccagaggggcgucuuacugccacagaaaguguggugcgcaucugggcgguccaagguuauuaaaggaucacuucccuugaucggugaagccgacugucugcaugaggaauacggcgggcuaaacaagagcaaaccguauuacaccggaaagcacgcuaaggccauuggcaauugcccuaucugggugaaaacaccccucaagcuggcaaacgguacuaaauaucgcccuccagcuaaacuucugaaggagcgaggguuuuucggcgccaucgcgggauuuuuggagggcgggugggaaggaaugauugccgguuggcacggcuacaccagucauggggcacacggagucgcuguggccgcugaccucaagucuacacaggaggccauaaacaagaucaccaaaaaucugaacuccuuaagcgaacuggagguaaagaaucuccaaagacuuucgggcgcaauggaugaacugcauaacgagauuuuggagcuagacgaaaaaguugaugaccugagggccgauacuaucucuucccagauagagcucgcugugcugcuuucaaaugaagguauuaucaacagugaggacgaacaccuguuggcgcucgagcggaagcugaaaaagauguuagggcccagcgcagucgauaucggcaauggauguuucgagacgaagcacaaaugcaaccagacaugccuggaccguauugccgcuggcaccuuuaaugccggggaguucucccuaccaacuuuugauucucucaacaucaccgcagccagccugaaugacgauggacuugacaaccauacaauuuugcuguauuacucaaccgcugccaguucccucgcagugacucugaugcuugcgauauucaucgucuauauggugagccgcgacaauguuucuuguucaauuugccuguga

SEQ ID NO: 156611 - RNA, 1758 nt, Artificial Sequence; identical to SEQ ID NO: 154935
  derived and/or modified CDS sequence (opt3) from hemagglutinin__InfluenzaB__EPI477397

SEQ ID NO: 156612 - RNA, 1758 nt, Artificial Sequence
  derived and/or modified CDS sequence (opt3) from hemagglutinin__InfluenzaB__EPI492571
augaaggccaucauugugcugcucauggucguuaccagcaacgcugacagaauaugcacaggcaucacuuccucuaauucaccccacgugguaaaaacggcaacccagggggaggugaacgucacaggagugauuccucuuacuaccacaccaaccaagagucauuucgccaaucugaaagguacugaaacaaggggcaaguuguguccgaaaugcuuaaacuguaccgaucuggacguugcgcuagggcggcccaagugcacgggaaagaucccuagcgcucgcguguccauucuccacgagguccgaccagugacuucuggcuguuuucccaucaugcaugaucguaccaaaauaagacaacugccuaaucuucugagggguuacgaacacauccgguugucgacacauaacguaauuaaugccgaggacgcaccagggggacccuauaagaucggcacuucaggcagcugcccuaacguuaccaaugggaacggauucuuugccacaauggcuugggcagugccgaaaaaugauaagaacaaaaccgccacgaauccacucacuauugaaguccccuacaucuguacagagggugaggaccagauaaccguguggggcuuccacagugauauugaaacucagauggcuaagcuguauggggacuccaagccucagaaauuuacaucuagcgccaacggagugaccacgcacuacgucucccaaaucggcgguuucccaaaucagaccgaggaugggggacugccccagucaggccgcauuguuguggacuauaugguacagaagaguggcaaaacagggacuaucaccuaccaaagaggaauccucuuaccucagaagguguggugcgcgagcgguaggucuaaagucauuaagggcucccugccacuuauaggggaagcagauuguuugcaugagaaauauggaggccugaacaagucaaagcccuacuacacaggugagcacgccaaagcuaucgggaacugcccgauuugggugaagacuccucuaaaacucgccaauggcaccaaguaucggcccccagcaaaacugcuuaaggaacgcggauuuuucggcgcuaucgccggguuucuggagggagguugggaaggcaugauagcgggguggcauggauacacaagccacggcgcccacgguguugcaguggcugccgacuugaagaguacccaggaggcuauuaacaaaaucacuaagaaucucaacucucuguccgaauuagaggucaaaaaucugcagcgacucagcggggccauggaugagcuucauaacgaaauccuggaguuggacgaaaagguggacgaucuaagagcagacacgauuucgucucaaaucgagcuggccguacuccuguccaaugaaggcauuauaaacucagaggaugagcaccuucuggcuuuggaaaggaaacucaagaagaugcugggaccuagugcgguugagaucggcaauggguguuucgaaacaaaacauaagugcaaccagaccugcuuagaccggauugcagccggaacuuuugaugcuggugaguucagccugcccaccuuugacucccuaaauaucacagccgcaucucucaacgaugacggccuggauaaucacaccauccuuuuguauuacagcacugccgcuucaagucuggccgugacacucaugauugcaauauucgucguguauauggucucccgugacaacgugagcuguucuaucugccuguga

SEQ ID NO: 156613 - RNA, 1758 nt, Artificial Sequence
  derived and/or modified CDS sequence (opt3) from hemagglutinin__InfluenzaB__EPI498340
augaaggccaucauugugcugcucauggucguuaccagcaacgcugacagaauaugcacaggcaucacuuccucuaauucaccccacgugguaaaaacggcaacccagggggaggugaacgucacaggagugauuccucuuacuaccacaccaaccaagagucauuucgccaaucugaaagguacugaaacaaggggcaaguuguguccgaaaugcuuaaacuguaccgaucuggacguugcgcuagggcggcccaagugcacgggaaagaucccuagcgcucgcguguccauucuccacgagguccgaccagugacuucuggcuguuuucccaucaugcaugaucguaccaaaauaagacaacugccuaaucuucugagggguuacgaacacauccgguugucgacacauaacguaauuaauacugaggacgccccagggggacccuauaagaucggcaccucaggcagcugcccuaacguuacaaaugggaacggauucuuugcaaccauggccugggcugugccgaaaaaugauaagaacaaaacggcaacuaauccacucacaauugaaguccccuacaucuguaccgagggugaggaccagauaacuguguggggcuuccacagugauauugaaacacagauggccaagcuguauggggacuccaagccucagaaauuuaccucuagcgcuaacggagugacgacccacuacgucucccaaaucggcgguuucccaaaucagacagaggaugggggacugccccagucaggccgcauuguuguggacuauaugguacagaagaguggcaaaacugggaccaucacauaccaaagaggaauccucuuaccucagaagguguggugcgccagcgguaggucuaaagucauuaagggcucccugccacuuauaggggaagcggauuguuugcaugagaaauauggaggccugaacaagucaaagcccuacuacacuggugagcacgcaaaagccaucgggaacugcccgauuugggugaagaccccucuaaaacucgcuaauggcacaaaguaucggcccccagccaaacugcuuaaggaacgcggauuuuucggcgcaaucgcuggguuucuggagggagguugggaaggcaugauagccggguggcauggauacaccagccacggcgcgcacgguguugccguggcagcugacuugaagaguacucaggaggccauuaacaaaaucacgaagaaucucaacucucuguccgaauuagaggucaaaaaucugcagcgacucagcggggcuauggaugagcuucauaacgaaauccuggaguuggacgaaaagguggacgaucuaagagccgacacaauuucgucucaaaucgagcuggcaguacuccuguccaaugaaggcauuauaaacucagaggaugagcaccuucuggccuuggaaaggaaacucaagaagaugcugggaccuagugcuguugagaucggcaauggguguuucgaaaccaaacauaagugcaaccagacuugcuuagaccggauugcggcaggaaccuuugaugccggugaguucagccugcccacauuugacucccuaaauaucaccgcugccucucucaacgaugacggccuggauaaucacacuauccuuuuguauuacagcacagcagccucaagucuggcugugacgcucaugauugccauauucgucguguauauggucucccgugacaacgugagcuguucuaucugccuguga

SEQ ID NO: 156614 - RNA, 1758 nt, Artificial Sequence
  derived and/or modified CDS sequence (opt3) from hemagglutinin__InfluenzaB__EPI516490
augaaggccaucauugugcugcucauggucguuaccagcaacgcugacagaauaugcacaggcaucacuuccucuaauucaccccacgugguaaaaacggcaacccagggggaggugaacgucacaggagugauuccucuuacuaccacaccaaccaagagucauuucgccaaucugaaagguacugaaacaaggggcaaguuguguccgaaaugcuuaaacuguaccgaucuggacguugcgcuagggcggcccaagugcacgggaaagaucccuagcgcucgcguguccauucuccacgagguccgaccagugacuucuggcuguuuucccaucaugcaugaucguaccaaaauaagacaacugccuaaucuucugagggguuacgaacacauccgguugucgacacauaacguaauuaaugccgaggacgcaccagggggacccuauaagaucggcacuucaggcagcugcccuaacguuaccaaugggaacggauucuuugccacaauggcuugggcagugccgaaaaaugauaagaacaaaaccgccacgaauccacucacuauugaaguccccuacaucuguacagagggugaggaccagauaaccguguggggcuuccacagugauaacgaaauucagauggcuaagcuguauggggacuccaagccucagaaauuuacuucuagcgccaauggagugacaacccacuacgucucccaaaucggcgguuucccaaaccagacggaggaugggggacugccccagucaggccgcauuguuguggacuauaugguacagaagaguggcaaaaccgggacaaucacuuaccaaagaggaauccucuuaccucagaagguguggugcgcgagcgguaggucuaaagucauuaagggcucccugccacuuauaggggaagcagauuguuugcaugagaaauauggaggccugaacaagucaaagcccuacuacaccggugagcacgccaaagcuaucgggaauugcccgauuugggugaagacaccucuaaaacucgccaacggcacuaaguaucggcccccagcaaaacugcuuaaggaacgcggauuuuucggcgcuaucgccggguuucuggagggagguugggaaggcaugauagcgggguggcauggauacaccagccacggcgcccacgguguugcaguggcugccgacuugaagaguacacaggaggcuauuaauaaaaucaccaagaaccucaauucucuguccgaauuagaggucaaaaaccugcagcgacucagcggggccauggaugagcuucauaaugaaauccuggaguuggacgaaaagguggacgaucuaagagcagacacuauuucgucucaaaucgagcuggccguacuccuguccaacgaaggcauuauaaauucagaggaugagcaccuucuggcuuuggaaaggaaacucaagaagaugcugggaccuagugcgguugagaucggcaacggguguuucgaaacgaaacauaagugcaaucagacaugcuuagaccggauugcagccggaaccuuugaugcuggugaguucagccugcccacuuuugacucccuaaacaucaccgccgcaucucucaaugaugacggccuggauaaccacacaauccuuuuguauuacagcaccgccgcuucaagucuggccgugacucucaugauugcaauauucgucguguauauggucucccgugacaaugugagcuguucuaucugccuguga

SEQ ID NO: 156615 - RNA, 1755 nt, Artificial Sequence; identical to SEQ ID NO: 156177
  derived and/or modified CDS sequence (opt3) from hemagglutinin__InfluenzaB__EPI538119

SEQ ID NO: 156616 - RNA, 1755 nt, Artificial Sequence; identical to SEQ ID NO: 156596
  derived and/or modified CDS sequence (opt3) from hemagglutinin__InfluenzaB__EPI538125

SEQ ID NO: 156617 - RNA, 1755 nt, Artificial Sequence
  derived and/or modified CDS sequence (opt3) from hemagglutinin__InfluenzaB__EPI556422
augaaggccaucauugugcugcucauggucguuaccagcaacgcugacagaauaugcacaggcaucacuuccucuaauucaccccacgugguaaaaacggcaacccagggggaagugaacgucacaggagugauuccucuuacuaccacaccaaccaagaguuacuucgccaaucugaaagguacuaggacacggggcaaguuguguccggauugcuuaaacuguaccgaccuggauguugcgcuagggcgccccaugugcgugggaacgacuccuagcgcuaaagccuccauccuccaugaaguccgaccagugaccucuggcuguuuucccauuaugcacgaccguacaaagaucagacaacugccuaaucuucugagggguuaugagaagauacgguugucgacucagaacguaaucgaugcagaaaaagccccagggggacccuaccgccucggcaccucaggcagcugcccuaaugcuacaaguaagauuggguucuuugcaaccauggccugggcuguuccaaaagacaacuauaagaaugccacgaacccgcugacuguggagguccccuacaucuguacagaaggagaggaucagauuaccgugugggguuuccauuccgacaucaaaacucagaugaagucucuguauggcgauagcaauccucaaaaguuuacauccucagcgaacggggugaccacgcacuacgucagucagauaggagacuucccagaucagaccgaggacggcggucucccccagagcgggagaauuguuguggauuauaugaugcaaaaaccuggaaagacaggcacuaucguauaccagaggggcguguuacugccacagaaagucuggugcgcaucugggcgguccaaggugauuaaaggaucacuucccuugaucggugaagccgacugucugcaugaggaauacggcgggcuaaauaagagcaaaccguauuacaccggaaagcacgcuaaggccaucggcaacugcccuauuuggguuaaaacaccccucaagcuggcaaaugguacuaaauaucgcccuccagcuaagcugcugaaagagcgaggguuuuucggcgccauagcgggauuuuuggagggcgggugggaaggaaugaucgccgguuggcacggcuacaccagucauggggcacacggaguggcugucgccgcugaccucaagucuacacaggaggccauuaacaagaucaccaaaaaccuuaauuccuuaagcgaacuggaggugaagaaccuccaaagacuuucgggcgcaauggaugaacugcauaaugagauauuggagcuagacgaaaaaguagaugaccugagggccgauacuauuucuucccagaucgagcucgcuguucugcuuucaaacgaagguaucauuaauagugaggacgaacaccuguuggcgcucgagcggaagcugaaaaagauguuagggcccagcgcaguggauaucggcaacggauguuucgagacgaagcacaaaugcaaucagacaugccuggaccguauugccgcuggcaccuuuaacgccggggaguucucccuaccaacuuuugauucucucaauauaaccgcagccagccugaacgacgauggacuugacaaucauacaaucuugcuguauuacucaaccgcugccaguucccucgcagucacucugaugcuugcgauuuucaucguguauauggucagccgcgacaacgugucuuguucaaucugccuguga

SEQ ID NO: 156618 - RNA, 1755 nt, Artificial Sequence
  derived and/or modified CDS sequence (opt3) from hemagglutinin__InfluenzaB__EPI614608
augaaggccaucauugugcugcucauggucguuaccagcaacgcugacagaauaugcacaggcaucacuuccucuaauucaccccacgugguaaaaacggcaacccagggggaggugaacgucacaggagugauuccucuuacuaccacaccaaccaagaguuacuucgccaaucugaaagguacuaggacacggggcaaguuguguccggauugcuuaaacuguaccgaccuggauguugcgcuagggcgccccaugugcgugggaacgacuccuagcgcuaaagccuccauccuccaugaaguccgaccaauuaccucuggcuguuuucccaucaugcacgaccguacaaagauaagacaacugccuaaucuucugagggguuaugagaagauccgguugucgacucagaacgugauugaugcagaaaaagccccagggggacccuaccgccucggcaccucaggcagcugcccuaaugcuacaaguaagaucggguucuuugcaaccauggccugggcuguaccaaaagacaacuauaagaaugccacgaacccgcugacuguugaggugcccuacauuuguacagaaggagaggaucagaucaccgucugggguuuccauuccgacgagaaaacucagaugaagucucuguauggcgauagcaauccucaaaaguuuacauccucagcgaacggggugaccacgcacuacgugagucagauaggagacuucccagaucagaccgaagacggcggucucccccagagcgggagaauugucguugauuauaugaugcaaaaaccuggaaagacaggcacuaucguguaccagaggggcguauuacugccacagaaaguguggugcgcaucugggcgguccaaggucauuaaaggaucacuucccuugaucggugaggccgacugucugcaugaagaguacggcgggcuaaauaagagcaaaccguauuacaccggaaagcacgcuaaggccaucggcaacugcccuauuugggugaaaacaccccucaagcuggcaaaugguacuaaauaucgcccuccagcuaagcugcugaaagagcgaggguuuuucggcgccauagcgggauuuuuggaaggcgggugggagggaaugaucgccgguuggcacggcuacaccagucauggggcacacggaguugcuguggccgcugaccucaagucuacacaggaagccauuaacaagaucaccaaaaaccuuaauuccuuaagcgagcuggaagucaagaaccuccaaagacuuucgggcgcaauggaugagcugcauaaugagauauuggaacuagacgagaaaguggaugaccugagggccgauacuauuucuucccagaucgaacucgcuguacugcuuucaaacgaggguaucauuaauagugaagacgagcaccuguuggcgcucgagcggaagcugaaaaagauguuagggcccagcgcaguugauaucggcaacggauguuucgaaacgaagcacaaaugcaaucagacaugccuggaccguauugccgcuggcaccuuuaacgccggggaguucucccuaccaacuuuugauucucucaauauaaccgcagccagccugaacgacgauggacuugacaaucauacaaucuugcuguauuacucaaccgcugccaguucccucgcagugacucugaugcuugcgauuuucaucgucuauauggugagccgcgacaacgucucuuguucaaucugccuguga

SEQ ID NO: 156619 - RNA, 1755 nt, Artificial Sequence
  derived and/or modified CDS sequence (opt3) from hemagglutinin__InfluenzaB__EPI614610
augaaggccaucauugugcugcucauggucguuaccagcaacgcugacagaauaugcacaggcaucacuuccucuaauucaccccacgugguaaaaacggcaacccagggggaggugaacgucacaggagugauuccucuuacuaccacaccaaccaagaguuacuucgccaaucugaaagguacuaggacacggggcaaguuguguccggauugcuuaaacuguaccgaccuggauguugcgcuagggcgccccaugugcgugggaacgacuccuagcgcuaaagccuccauccuccaugaaguccgaccagugaccucuggcuguuuucccauuaugcacgaccguacaaagaucagacaacugccuaaucuucugagggguuaugagaagauacgguugucgacucagaacguaaucgaugcagaaaaagccccagggggacccuaccgccucggcaccucaggcagcugcccuaaugcuacaaguaagauuggguucuuugcaaccauggccugggcuguuccaaaagacaacuauaagaaugccacgaacccgcugacuguggagguccccuacaucuguacagaaggagaggaucagauuaccgugugggguuuccauuccgacgagaaaacucagaugaagucucuguauggcgauagcaauccucaaaaguuuacauccucagcgaacggggugaccacgcacuacgucagucagaucggagacuucccagaucagaccgaagacggcggucucccccagagcgggagaauaguuguggauuauaugaugcaaaaaccuggaaagacaggcacuauuguauaccagaggggcguguuacugccacagaaagucuggugcgcaucugggcgguccaaggugaucaaaggaucacuucccuugauuggugaggccgacugucugcaugaagaguacggcgggcuaaauaagagcaaaccguauuacaccggaaagcacgcuaaggccaucggcaacugcccuaucuggguuaaaacaccccucaagcuggcaaaugguacuaaauaucgcccuccagcuaagcugcugaaagagcgaggguuuuucggcgccauugcgggauuuuuggaaggcgggugggagggaaugauagccgguuggcacggcuacaccagucauggggcacacggaguggcugucgccgcugaccucaagucuacacaggaagccaucaacaagauuaccaaaaaccuuaauuccuuaagcgagcuggaagugaagaaccuccaaagacuuucgggcgcaauggaugagcugcauaaugagaucuuggaacuagacgagaaaguagaugaccugagggccgauacuauaucuucccagauugaacucgcuguucugcuuucaaacgaggguaucaucaauagugaagacgagcaccuguuggcgcucgagcggaagcugaaaaagauguuagggcccagcgcaguggauauuggcaacggauguuucgaaacgaagcacaaaugcaaucagacaugccuggaccguaucgccgcuggcaccuuuaacgccggggaguucucccuaccaacuuuugauucucucaauauuaccgcagccagccugaacgacgauggacuugacaaucauacaauauugcuguauuacucaaccgcugccaguucccucgcagucacucugaugcuugcgaucuucauuguguauauggucagccgcgacaacgugucuuguucaaucugccuguga

SEQ ID NO: 156620 - RNA, 1758 nt, Artificial Sequence
  derived and/or modified CDS sequence (opt3) from hemagglutinin__InfluenzaB__AAA43697
augaaggccaucauugugcugcucauggucguuaccagcaacgcugacagaauaugcacaggcaucacuuccucuaauucaccccacgugguaaaaacggcaacccagggggaagugaacgucacaggagugauuccucuuacuaccacaccaaccaagagucauuucgccaaucugaaagguacuaagacaaggggcaaauuguguccgaagugcuuaaacuguaccgaucuggacguugcgcuagcucggcccaagugcauggggacgaucccuagcgccaaagcauccauucuccacgaagugaagccagucacuucuggauguuuucccaucaugcaugaucgcaccaaaauacgacaacugccuaaucuucugcguggcuacgagcacaucagauugucgacacauaacgugauuaaugccgaaacugcuccaggugggcccuauaagguaggaaccucaggcagcugcccuaacguuacaaauggcaacggguucuuugcaaccauggccugggcugugccgaaaaaugacaacaauaagacggccacuaacccacucacagucgaggugcccuacaucuguaccgaaggagaggaucagauuacugugugggguuuccacagugacuccgagacacagauggucaagcuguauggcgauucuaaaccucagaaguuuaccagcuccgcgaaugggguuacgacccacuacgugucacaaaucggaggcuucccaaaccaggcagaagacggugggcugccccagaguggaaggauaguaguggauuauaugguccagaaaagcggcaagacaggcacuauuaccuaccaacgggggauccucuuaccucagaaaguguggugcgccucuggacgcuccaagguuauuaaagguucacugccacuuaucggcgaggcugacuguuugcaugaaaaguaugggggacugaacaagagcaaacccuacuacacaggcgagcacgccaaggcaaucgguaauugcccgauuugggugaaaacuccucuaaagcucgcuaacgggaccaaauauagacccccagccaagcugcuuaaggagaggggcuuuuucggagcgauagccggcuuucuggaagggggaugggaggguaugaucgcaggcuggcauggguacacaagucacggagcucacggcgucgccguggcugccgauuugaaaucuacccaggaagcaauuaauaagaucacuaaaaaccucaauucccugagcgaguuagaaguaaagaaccugcagcggcucucgggugccauggacgagcuucauaaugagauacuggaauuggaugagaaaguugacgaccuacgcgcugauacgauuucuucccaaaucgaacuggcggugcuccugucaaacgaggggaucauuaauagugaagacgagcaccuucuggcauuggagcgaaagcucaagaaaaugcugggcccuagcgccgucgaaaucggaaacggcuguuucgagacaaagcauaaaugcaaucagaccugcuuagauagaauugcugccgggacuuuuaacgcaggagaguucucccugcccaccuuugacucucuaaauauaacagccgcuagccucaacgaugacggucuggauaaucacaccauccuuuuguauuacucaacugccgcaaguucccuggcggugacacucaugauugcuaucuucaucgucuauauggugagcagggacaacguuucuuguucaauuugccuguga

SEQ ID NO: 156621 - RNA, 1755 nt, Artificial Sequence
  derived and/or modified CDS sequence (opt3) from hemagglutinin__InfluenzaB__EPI271545
augaaggccaucauugugcugcucauggucguuaccagcaacgcugacagaauaugcacaggcaucacuuccucuaauucaccccacgugguaaaaacggcaacccagggggaagugaacgucacaggagugauuccucuuacuaccacaccaaccaagaguuacuucgccaaucugaaagguacuaggacacggggcaaguuguguccggauugcuuaaacuguaccgaccuggauguugcgcuagggcgccccaugugcgugggaacgacuccuagcgcuaaagccuccauccuccaugaaguccgaccagugaccucuggcuguuuucccauuaugcacgaccguacaaagaucagacaacugccuaaucuucugagggguuaugagaacauacgguugucgacucagaauguaaucgaugcagaaaaggccccagggggacccuaccgccucggcaccucaggcagcugcccuaacgcuacaaguaaaauuggguucuuugcaaccauggccugggcuguuccaaaggacaauuauaaaaacgccacgaauccgcugacuguggagguccccuacaucuguacagaaggagaggaucagauuaccgugugggguuuccauuccgacaacaagacucagaugaaaucucuguauggcgauagcaauccucaaaaguuuacauccucagcgaacggggugaccacgcacuacgucagucagaucggagacuucccagaucagaccgaggacggcggucucccccagagcgggagaauaguuguggauuauaugaugcaaaagccuggaaaaacaggcacuauuguauaccagaggggcguguuacugccacagaaggucuggugcgcaucugggcgguccaaagugaucaagggaucacuucccuugauuggugaagccgacugucugcaugagaaauacggcgggcuaaauaagagcaaaccguauuacaccggagaacacgcuaaggccaucggcaacugcccuaucuggguuaagacaccccucaaacuggcaaacgguacuaaguaucgcccuccagcuaaacuucugaaggagcgaggguuuuucggcgccauugcgggauuuuuggagggcgggugggaaggaaugauagccgguuggcacggcuacaccagucauggggcacacggaguggcugucgccgcugaccucaaaucuacacaggaggccaucaauaagauuaccaagaacuuaaauucccugagcgaacuggaggugaaaaaccuccaaagacuuucgggcgcaauggaugaacugcauaaugagaucuuggagcuagacgaaaagguagaugaccugagggccgauacuauaucuucccagauugagcucgcuguucugcuuucaaacgaagguaucaucaauagugaggacgaacaccuguuggcgcucgagcggaaacugaagaaaauguuagggcccagcgcaguggauauuggcaacggauguuucgagacgaagcacaagugcaaucagacaugccuggaccguaucgccgcuggcaccuuuaacgccggggaguucucccuaccaacuuuugauucucucaauauuaccgcagccagccugaacgacgauggacuugacaaucauacaauauugcuguauuacucaaccgcugccaguucccucgcagucacucugaugcuugcgaucuucauuguguauauggucagccgcgacaacgugucuuguucaaucugccuguga

SEQ ID NO: 156622 - RNA, 1755 nt, Artificial Sequence
  derived and/or modified CDS sequence (opt3) from hemagglutinin__InfluenzaB__AGB08329
augaaggccaucauugugcugcucauggucguuaccagcaacgcugacagaauaugcacaggcaucacuuccucuaauucaccccacgugguaaaaacggcaacccagggggaagugaacgucacaggagugauuccucuuacuaccacaccaaccaagaguuacuucgccaaucugaaagguacuaggacacggggcaaguuguguccggauugcuuaaacuguaccgaccuggauguugcgcuagggcgccccaugugcgugggaacgacuccuagcgcuaaagccuccauccuccaugaaguccgaccagugaccucuggcuguuuucccauuaugcacgaccguacaaagaucagacaacugccuaaucuucugagggguuaugagaacauacgguugucgacucagaauguaaucgaugcagaaaaggccccagggggacccuaccgccucggcaccucaggcagcugcccuaacgcuacaaguaaaauuggguucuuugcaaccauggccugggcuguuccaaaggacaauuauaaaaacgccacgaauccgcugacuguggagguccccuacaucuguacagaaggagaggaucagauuaccgugugggguuuccauuccgacaacaagauccagaugaaaucucuguauggcgauagcaauccucaaaaguuuacuuccucagcgaacggggugacaacccacuacgucagucagauaggagacuucccagaucagacggaggacggcggucucccccagagcgggagaauuguuguggauuauaugaugcaaaagccuggaaaaaccggcacaaucguauaccagaggggcguguuacugccacagaaggucuggugcgcaucugggcgguccaaagugauuaagggaucacuucccuugaucggugaagccgacugucugcaugagaaauacggcgggcuaaauaagagcaaaccguauuacacuggagaacacgcuaaggccaucggcaacugcccuauuuggguuaagaccccucucaaacuggcaaacgguacaaaguaucgcccacccgcuaaacuucugaaggagcgaggguuuuucggcgccauagcgggauuuuuggagggcgggugggaaggaaugaucgccgguuggcacggcuacacuucccauggggcacacggaguggcugucgccgcugaccucaaaucuacccaggaggccauuaauaagaucacaaagaaccugaauaguuuaagcgaacuggaggugaaaaaccuccaaagacuuucgggcgcaauggaugaacugcauaaugagauauuggagcuagacgaaaagguagaugaccugagggccgauaccauuucuucccagaucgagcucgcuguucugcuuucaaacgaagguaucauuaauagugaggacgaacaccuguuggcgcucgagcggaaacugaagaaaauguuagggcccagcgcaguggauaucggcaacggauguuucgagacuaagcacaagugcaaucagacgugccuggaccguauugccgcuggcacauuuaacgccggggaguucucccuaccaaccuuugauucucucaauauaacugcagccagccugaacgacgauggacuugacaaucauaccaucuugcuguauuacucaacagcugccaguucccucgcagucacccugaugcuugcgauuuucaucguguauauggucagccgcgacaacgugucuuguucaaucugccuguga

SEQ ID NO: 156623 - RNA, 1755 nt, Artificial Sequence; identical to SEQ ID NO: 154803
  derived and/or modified CDS sequence (opt3) from hemagglutinin__InfluenzaB__EPI294880

SEQ ID NO: 156624 - RNA, 1752 nt, Artificial Sequence; identical to SEQ ID NO: 154514
  derived and/or modified CDS sequence (opt3) from hemagglutinin__InfluenzaB__CY018765

SEQ ID NO: 156625 - RNA, 1401 nt, Artificial Sequence
  derived and/or modified CDS sequence (opt3) from neuraminidase__InfluenzaB__AAN39743
augcugcccagcaccauccagacacucacucuuuuccugacguccggcgggguguuguuaucucuguacgucucagcccuacucaguuaucugcuuuacagcgacauucuguugaaguuuuccccuaccaaaguuauagcuccaacaaugucucucgauugcgcaaacgccucgaaugugcaagcgguaaaccacucagcuacugaggaaaugaccuuccugcugccggagcccgaauggacauauccuagacucagcugucagggaaguaccuuucagaaggccuuacugaucuccccacauagguucggugaggcaaaaggcaauucugcuccccuuauuauccgggaaccuuuuauugcuugcgggccaaaggaguguauccacuucgcauugacucauuacgccgcucagcccggaggcuauuacaacgguacacgcgaggaccgaaauaaacugcgucaccuaauaagcgugaaccucgggaagaucccuaccgucgaaaauuccauuuuucauauggccgcguggucaggaagugcaugccacgauggcagagaguggacguauaucggcguggacgggccagauagcaacgcccugauuaagaucaaauacggagaagccuacacugacaccuaucacucuuacgccaauaacauacuuaggacacaagaguccgcauguaauugcauugguggcgauuguuaucugaugaucacugacgggucagcuagcggaauuagucggugccgcuucuugaagaucagagagggcaggaucauuaaagaaauauuuccgaccggucggguugagcauacagaagaguguaccugcggguucgccucuaacaagacgaucgaaugugugugccgcgauaauuccuacacugcgaaacgacccuuugucaagcucaacguggagacagacaccgccgagauuagacugaugugcacugaaacauauuuagauaccccuaggccagacgauggaagcaucacgggccccugugagucgaauggcgacaaggggaacggagguauaaaaggcggguucguacaccagcggauggcaucucguauuggacgcugguacuccagaaccaugucaaagacaaaaaggaugggcauggaacuguauguuaaguacgacggugauccuuggacugacagugaugcucucgccccaagcggggugauggucuccauggaggaacccggcugguacucuuuuggauucgagaucaaagacaagaaaugcgaugugccguguaucggcauugagauggugcaugacgggggaaagaagaccuggcacagcgcugccacagcaaucuauugccuuauggguucaggccagcuguugugggauacugucaccgggguugacauggcccuauga

SEQ ID NO: 156626 - RNA, 1401 nt, Artificial Sequence
  derived and/or modified CDS sequence (opt3) from neuraminidase__InfluenzaB__AAN39747
augcugcccagcaccauccagacacucauucuuuuccugacuuccggcgggguguuguuaucucuguacgucucagcccuacucaguuaucugcuuuacagcgacauacuguugaaguuuuccccuacgaaaaucauugcuccaaccaugucucucgauugcgcaaacgccucgaauguucaagcggugaaccacucagcuacaaaggagaugacuuuccugcugccggaacccgaguggaccuauccuagacucagcugucagggaaguacauuucagaaagccuuacugaucuccccacauagguucggugaagcaaagggcaauucugcuccccuuauuauccgggagccuuuuauagccugcgggccaaaagaauguaagcacuucgcauugacccauuacgccgcucagcccggaggcuauuacaacgguacucgcgaggaccgaaauaagcugcgucaccuaaucagcguaaaccucgggaaaauuccuacaguggaaaauuccaucuuucauauggccgcguggucaggaagugcaugccacgauggcagagaguggaccuauauuggcgucgacgggccagauagcaacgcccugaucaagauaaaauacggagaggcuuacacggacacuuaucacucuuacgccaauaacauucuuaggacccaagaauccgcauguaauugcaucgguggcgauuguuaucugaugauuacagacgggucagcuagcggaaucaguaagugccgguucuugaaaauccgcgagggcagaauuauaaaggagaucuuuccgacugguaggguggaacauaccgaggaauguacaugcggguucgccucuaacaagaccauugagugugcgugccgggauaauuccuacacggccaaacgccccuuuguuaagcucaacguggaaacugacacagcagagauccgacugaugugcaccaaaacuuauuuagauacaccuagaccagacgauggaagcauaaccggccccugugagucgaauggcgacaaggggucuggagguauuaaaggcggguucguccaccagaggauggcuuccaagaucggacggugguacucacguacgaugaguaaaaccaagcgcaugggcauggaacuguaugugaaguacgacggugauccuuggacagacagcgaugcccucgcuccauccgggguaaugguuucuaucgaggaacccggcugguacagcuuuggauucgagauuaaagacaagaaaugcgaugugccguguaucggcauugaaaugguccaugacgggggaaagaaaacuuggcacucagccgcaaccgccauauauugccuuauggguaguggccagcuguugugggauacagugacugggguggacauggcucuauga

SEQ ID NO: 156627 - RNA, 1401 nt, Artificial Sequence
  derived and/or modified CDS sequence (opt3) from neuraminidase__InfluenzaB__AAN39749
augcugcccagcaccauccagacacucacucuuuuccugacguccggcgggguguuguuaucucuguacgucucagcccuacucaguuaucugcuuuacagcgacauucuguugaaguuuuccccuaccaaaguuauagcuccaacaaugucucucgauugcgcaaacgccucgaaugugcaagcgguaaaccacucagcuacugaggaaaugaccuuccugcugccggagcccgaauggacauauccuagacucagcugucagggaaguaccuuucagaaggccuuacugaucuccccacauagguucggugaggcaaaaggcaauucugcuccccuuauuauccgggaaccuuuuauugcuugcgggccaaaggaguguaaacacuucgcauugacucauuacgccgcucagcccggaggcuauuacaacgguacacgcgaggaccgaaauaagcugcgucaccuaaucagcgugaaccucgggaagauaccuaccgucgaaaauuccaucuuucauauggccgcguggucaggaagugcaugccacgauggcagagaguggacguauauuggcguggacgggccagauagcaacgcccugaucaaaauuaaguacggagaagccuacacugacaccuaucacucuuacgccaauaacauccuuaggacacaagaguccgcauguaauugcauagguggcgauuguuaucugaugauuacugacgggucagcuagcggaaucagucggugccgcuucuugaaaauuagagagggcaggaucaucaaggaaauuuuuccgaccggucggguugagcauacagaagaguguaccugcggguucgccucuaacaaaacgauagaaugugcgugccgcgauaauuccuacacugccaagcgacccuuugugaagcucaacgucgagacagacaccgcagagaucagacugaugugcacugaaacauauuuagauaccccuaggccagacgauggaagcauuacgggccccugugagucgaauggcgacaaagggaacggagguaucaagggcggguucgugcaccagcggauggcuucucguauaggacgcugguacuccagaaccaugucaaaaacaaagaggaugggcauggaacuguauguaaaauacgacggugauccuuggacugacagugaugcccucgcuccaagcgggguuaugguguccauggaggaacccggcugguacucuuuuggauucgagauuaaggacaaaaagugcgaugucccguguaucggcaucgagauggugcaugacgggggaaagaaaaccuggcacagcgccgcaacagccauuuauugccuuauggguucaggccagcuguugugggauacugugaccggggucgacauggcucuauga

SEQ ID NO: 156628 - RNA, 1401 nt, Artificial Sequence
  derived and/or modified CDS sequence (opt3) from neuraminidase__InfluenzaB__AAN39751
augcugcccagcaccauccagacacucacucuuuuccugacguccggcgggguguuguuaucucuguacgucucagcccuacucaguuaucugcuuuacagcgacauucuguugaaguuuuccccuaccaaaguuauagcuccaacaaugucucucgauugcgcaaacgccucgaaugugcaagcgguaaaccacucagcuacugaggaaaugaccuuccugcugccggagcccgaauggacauauccuagacucagcugucagggaaguaccuuucagaaggccuuacugaucuccccacauagguucggugaggcaaaaggcaauucugcuccccuuauuauccgggaaccuuuuauugcuugcgggccaaaggaguguaaacacuucgcauugacucauuacgccgcucagcccggaggcuauuacaacgguacacgcgaggaccgaaauaagcugcgucaccuaaucagcgugaaccucgggaagauaccuaccgucgaaaauuccaucuuucauauggccgcguggucaggaagugcaugccacgauggcagagaguggacguauauuggcguggacgggccagauagcaacgcccugaucaaaauuaaguacggagaagccuacacugacaccuaucacucuuacgccaauaacauccuuaggacacaagaguccgcauguaauugcauagguggcgauuguuaucugaugauuacugacgggucagcuagcggaaucagucggugccgcuucuugaaaauuagagagggcaggauccucaaggaaaucuuuccgaccggucggguugagcauacagaagaguguaccugcggguucgccucuaacaaaacgauugaaugugcgugccgcgauaauuccuacacugccaagcgacccuuugugcagcugaacgucgagacagacaccgcagagauaagauuaaugugcacugaaacauaucuggauaccccuaggccagacgauggaagcaucacgggccccugugagucgaauggcgacaaggggaacggagguauuaaaggcggguucgugcaccagcggauggcuucucguaucggacgcugguacuccagaaccaugucaaagacaaaaaggaugggcauggaccucuauguaaaguacgauggugacccuuggacugauagugacgcccuugcuccaagcgggguuaugguguccauggaggaacccggcugguacucuuuuggauucgaaauaaaagauaagaaaugcgacgucccguguauuggcaucgagauggugcaugaugggggaaagaagaccuggcacagcgccgcaacagccaucuauugccugauggguucaggccaguugcuaugggacacugugaccggggucgauauggcucuguga

SEQ ID NO: 156629 - RNA, 1401 nt, Artificial Sequence
  derived and/or modified CDS sequence (opt3) from neuraminidase__InfluenzaB__AAN39753
augcugcccagcaccauccagacacucacucuuuuccugacguccggcgggguguuguuaucucuguacgucucagcccuacucaguuaucugcuuuacagcgacauucuguugaaguuuuccccuaccaaaguuauagcuccaacaaugucucucgauugcgcaaacgccucgaaugugcaagcgguaaaccacucagcuacugaggaaaugaccuuccugcugccggagcccgaauggacauauccuagacucagcugucagggaaguaccuuucagaaggccuuacugaucuccccacauagguucggugaggcaaaaggcaauucugcuccccuuauuauccgggaaccuuuuauugccugcgggccaaaggaguguaaacacuucgcauugacucauuacgccgcucagcccggagaguauuacaacggcacacgcgaagaccgaaauaagcugcgucaccuaaucagcgugaaccucgguaagauaccuaccgucgaaaauuccaucuuucauauggccgcguggucagggagugcaugccacgauggaagagaauggacguauauuggcguggacggcccagauagcaacgcccugaucaaaauuaaguacggggaggcuuacacugacaccuaucacucuuacgccaauaacauccuuaggacacaagaguccgcauguaauugcauaggaggugauuguuaucugaugauuacugacggcucagcuagcgggaucagucggugccgcuucuugaaaauuagagaaggaaggaucaucaaggagauuuuuccgaccggccggguugaacauacagaggaauguaccugcgguuucgccucuaacaaaacgauagagugugcgugccgcgauaauuccuacacugccaagcgacccuuugugaagcucaacgucgagacagacaccgcagaaaucagacugaugugcacugagacauauuuagauaccccuaggccagacgaugggagcauuacgggacccugugaaucgaauggcgacaaaggcaacgggggaaucaaggguggcuucgugcaccagcggauggcuucucguauagggcgcugguacuccagaaccaugucaaaaacaaagaggaugggaauggagcuguauguaaaauacgacggcgauccuuggacugacagugaugcccucgcuccaagcgguguuaugguguccauggaggagcccgggugguacucuuuuggcuucgagauuaaggacaaaaagugcgaugucccguguaucggaaucgaaauggugcaugacggcgggaagaaaaccuggcacagcgccgcaacagccauuuauugccuuaugggaucaggucagcuguugugggauacugugaccggcgucgacauggcucuauga

SEQ ID NO: 156630 - RNA, 1401 nt, Artificial Sequence
  derived and/or modified CDS sequence (opt3) from neuraminidase__InfluenzaB__AAN39759
augcugcccagcaccauccagacacucacucuuuuccugacguccggcgggguguuguuaucucuguacgucucagccagucuaagcuaucuccuguacuccgacauucuucugaaguugucuccuaccgagauaacagcuccaacuaugccgcucgauugcgcaaacgccucgaauguucaagcggugaacagaucagcuaccaaaggaguaacacugcugcuccccgaaccugaguggaccuauccaagguuaagcugucccgguaguacuuuucagaaggcccugcuuaucuccccucaccgguucggcgaaacaaaaggaaauucugcaccauugauuauccgcgagcccuuuauugccugcgggccuaaggaauguaaacauuucgcucugacccacuacgcagcccagccaggcgguuauuacaacgggacgcgagaggaccguaauaagcuaagacaucucaucagcgugaagcugggaaaaauaccgacugucgagaacuccaucuuucacauggcugccuggucaggcagugcgugccaugauggcaaggaauggaccuauauugggguggacggacccgauagcaaugcacuucugaaaaucaaguacggugaggccuacacagacacuuaucacucuuacgcuaacaauauuuugaggacccaggaauccgccuguaacugcaucggcgggaauuguuaucucaugauaacagauggaucagcaagcggcauuagugagugccgguuccugaaaauccgcgaggguagaauuaucaaggaaaucuuuccuaccgggaggguuaagcacacggaggaauguacuugcggauucgcuucuaacaaaacaauugagugugccugccgggacaauuccuacaccgcgaagcgcccauuugugaaauuaaacgucgaaacugauacagccgagauacgacugaugugcaccgagacguaucucgacacccccagaccugaugacggcagcaucacaggcccaugugaaucgaauggggauaagggaucugguggcauuaaagggggauucgugcaucaaaggauggaguccaagaucggccggugguacucacguacuaugaguaaaaccaagcgcauggguauggggcuuuauguaaaguacgacggcgaccccuggacagauagcgacgcacuggcuuuguccggaguuauggugucuauagaggaaccgggcugguacagcuuuggguucgaaauuaaagauaagaaaugcgacgucccuuguaucggaaucgagauggugcacgaugguggcaaggagacuuggcauucagccgcuaccgccauuuauugccuaauggggaguggacagcugcucugggacacagugaccggcgucgauauggcacuguga

SEQ ID NO: 156631 - RNA, 1401 nt, Artificial Sequence
  derived and/or modified CDS sequence (opt3) from neuraminidase__InfluenzaB__AAN39761
augcugcccagcaccauccagacacucacucuuuuccugacguccggcgggguguuguuaucucuguacgucucagccagucuaagcuaucuccuguacuccgacauucuucugaaguuuucucaaaccgagauaacagcuccuacuaugccauuggauugcgcaaacgccucgaauguucaggcggugaacagaucagcuaccaaaggaguaacacuccugcugccggaacccgaguggaccuauccuaggcucagcuguccagguaguacuuuccagaaggccuuacugaucucuccccaccgguuuggcgaaacaaaaggaaauuccgcaccucuuauuauccgcgagccauucauugccugcgggcccaaggaauguaaacauuuugcuuugacccacuacgcagcccagccuggcgguuauuacaacgggacgcgagaggaccguaauaagcugagacaucuaaucagcgugaagcucggaaaaauaccaacugucgagaacuccaucuuccacauggcugccuggucaggcagugcgugccaugauggcagggaauggaccuauauugggguggacggaccggauagcaaugcacugcuuaagaucaaauacggugaggccuacacagacacuuaucacucuuacgcuaagaacauucugcggacccaagaauccgccuguaauugcaucggcggggauuguuauuugaugauaacagacggaucagcaagcggcauuagugagugccgcuuucucaaaaucagagaggguaggauuaucaaggaaaucuuccccaccgggcggauuaagcacacggaggaauguacuugcggauuugcuucuaacaaaacaauagagugugccugccgcgauaauuccuacaccgcgaagcgaccuuucguuaaacugaacguggaaacugacacagccgagaucagauuaaugugcaccgagacguaucuggauaccccaaggcccgacgauggcagcauuacaggcccuugugaaucgaauggggacaagggaucugguggcaucaaagggggauuuguccaucagcggauggcauccaagauaggccguugguacucacgcacuaugaguaaaaccaagagaauggguauggggcucuaugugaaguacgacggcgauccauggacagacagcgaggcucuugcccuguccggaguaaugguuucuauggaggaacccggcugguacagcuucggguuugaaauuaaagauaagaaaugcgacgugccguguaucggaaucgagaugguccacgaugguggcaagacuaccuggcauucagcugccacagcaauuuauugcuugauggggaguggacagcuacugugggacaccgugacuggcguggauauggcccucuga

SEQ ID NO: 156632 - RNA, 1401 nt, Artificial Sequence
  derived and/or modified CDS sequence (opt3) from neuraminidase__InfluenzaB__AAN39769
augcugcccagcaccauccagacacucacucuuuuccugacguccggcgggguguuguuaucucuguacgucucagcccuacucaguuaucugcuuuacagcgacauucuguugaaguuuuccccuaccaaaauaaucgcuccaacaacuucucucgauucggcaaacgccucaaauuuccaagcgguuaaccacagcgcuaccaaggagaugacauuucugcugccggaacccgaguggaccuauccuagacucaguugccagggauccacuuuccagaaagccuuacugauuucuccacauagguuuggugaagcaaagggcaauagcgcuccccuuaucauucgggagccuuucaucgccugugggccaaaagaaugcaagcacuuugcauugacacauuacgccgcucagcccggaggcuauuacaacgguacccgcgaggaccgaaauaagcugcgucaccuaauauccgugaaccucgggaaaaucccuacgguagaaaauucaauuuuccauauggccgcguggaguggaagcgcaugucacgauggcagagaauggacuuauaucggcguggacgggccagauucuaacgcccugauuaagaucaaauacggagaggcuuacaccgacacauaucacuccuacgccaauaacauacuuaggacucaagaaucagcaugcaauuguauugguggcgauugcuaucugaugaucaccgacgggagcgcuaguggaauuucuaagugucgguuuuugaaaauccgcgagggcagaaucauuaaggagauauucccgacagguagggucgaacauaccgaggaaugcacguguggguuugccuccaacaagacuaucgagugcgcgugucgggauaauagcuacacagccaaacgccccuucgugaagcucaacguugaaaccgacacugcagagauucgacugaugugcacagagaccuauuuagauacgccuagaccagacgauggaucgaucaccggccccugcgaaucuaauggcgacaaaggguccggagguauaaagggcggguuugugcaccagaggauggcuucaaaaauuggacggugguacagucguacaaugagcaagacuaaacgcaugggcauggagcuguaugucaaguacgacggugauccuuggaccgacuccgaugcccucgcuccaucuggggugaugguaagcaucgaggagcccggcugguacucauucggauucgaaaucaaggacaaaaagugugauguuccgugcauuggcaucgagauggugcaugacgggggaaaaacaacuuggcacagugccgcaaccgccauuuauugucuuauggguuccggccagcuguugugggauacagucaccgggguggacauggcucuauga

SEQ ID NO: 156633 - RNA, 1401 nt, Artificial Sequence
  derived and/or modified CDS sequence (opt3) from neuraminidase__InfluenzaB__AAN39771
augcugcccagcaccauccagacacucacucuuuuccugacguccggcgggguguuguuaucucuguacgucucagcccuacucaguuaucugcuuuacagcgacauucuguugaaguuuuccccuaccaaaauaaucgcuccaacaacuucucucgauucggcaaacgccucaaauuuccaagcgguuaaccacagcgcuaccaaggagaugacauuucugcugccggaacccgaguggaccuauccuagacucaguugccagggauccacuuuccagaaagccuuacugauuucuccacauagguuuggugaagcaaagggcaauagcgcuccccuuaucauucgggagccuuucaucgccugugggccaaaagaaugcaagcacuuugcauugacacauuacgccgcucagcccggaggcuauuacaacgguacccgcgaggaccgaaauaagcugcgucaccuaauauccgugaaccucgggaaaaucccuacgguagaaaauucaauuuuccauauggccgcguggaguggaagcgcaugucacgauggcagagaauggacuuauaucggcguggacgggccagauucuaacgcccugauuaagaucaaauacggagaggcuuacaccgacacauaucacuccuacgccaauaacauacuuaggacucaagaaucagcaugcaauuguauugguggcgauugcuaucugaugaucaccgacgggagcgcuaguggaauuucuaagugucgguuuuugaaaauccgcgagggcagaaucgucaaggagauuuucccgacagguaggguggaacauaccgaggaaugcacguguggguuugccuccaacaagacuauagagugcgcgugucgggauaauagcuacacagccaaacgccccuucguuaagcucaacguggaaaccgacacugcagagauccgacugaugugcacagagaccuauuuagauacgccuagaccagacgauggaucgauuaccggccccugcgaaucuaauggcgacaaaggguccggagguaucaagggcggguuuguccaccagaggauggcuucaaaaauaggacggugguacagucguacaaugagcaagacuaaacgcaugggcauggagcuguaugugaaguacgacggugauccuuggaccgacuccgaugcccucgacccaucugggguaaugguuagcauugaggagcccggcugguacucauucggauucgaaaucaaggauaaaaagugugacgugccgugcaucggcauugagaugguccaugaugggggaaaaacaacuuggcacagugcugccaccgcaaucuauugucuuauggguuccggccagcuguugugggacacaauuaccgggguggauauggcccuauga

SEQ ID NO: 156634 - RNA, 1401 nt, Artificial Sequence
  derived and/or modified CDS sequence (opt3) from neuraminidase__InfluenzaB__AAN39773
augcugcccagcaccauccagacacucacucuuuuccugacguccggcgggguguuguuaucucuguacgucucagcccuacucaguuaucugcuuuacagcgacauucuguugaaguuuuccccuaccaaaauaaucgcuccaacaacuucucucgauucggcaaacgccucaaauuuccaagcgguuaaccacagcgcuaccaaggagaugacauuucugcugccggaacccgaguggaccuauccuagacucaguugccagggauccacuuuccagaaagccuuacugauuucuccacauagguuuggugaagcaaagggcaauagcgcuccccuuaucauucgggagccuuucaucgccugugggccaaaagaaugcaagcacuuugcauugacacauuacgccgcucagcccggaggcuauuacaacgguacccgcgaggaccgaaauaagcugcgucaccuaauauccgugaacuucgggaaaaucccuacgguagaaaauucaauuuuucauauggccgcguggaguggaagcgcaugucacgauggcagagaauggacuuauaucggcguggacgggccagauucuaacgcccucauuaagaucaaauacggagaggcuuacaccgacacauaucacuccuacgccaauaacauacugaggacucaagaaucagcaugcaauuguauugguggcgauugcuaucuuaugaucaccgacgggagcgcuaguggaauuucuaagugucgguuccugaaaauccgcgagggcagaaucgucaaggagauuuuuccgacagguaggguggaacauaccgaggaaugcacguguggguucgccuccaacaagacuauagagugcgcgugucgggauaauagcuacacagccaaacgccccuuuguuaaguugaacguggaaaccgacacugcagagauccgacucaugugcacagagaccuaucuggauacgccuagaccagacgauggaucgauuaccggccccugcgaaucuaauggcgacaaaggguccggagguaucaagggcggguucguccaccagaggauggcuucaaaaauaggacggugguacagucguacaaugagcaagacuaaacgcaugggcauggaguuauaugugaaguacgacggugauccuuggaccgacuccgaugcccuggcuccaucugggguaaugguuagcauugaggagcccggcugguacucauucggauuugaaaucaaggacaaaaagugugaugugccgugcaucggcauugagaugguccaugacgggggaaaaacaacuuggcacagugccgcaaccgccaucuauugucucauggguuccggccagcuucugugggauacaauuaccgggguggacauggcuuuguga

SEQ ID NO: 156635 - RNA, 1401 nt, Artificial Sequence
  derived and/or modified CDS sequence (opt3) from neuraminidase__InfluenzaB__AAN39775
augcugcccagcaccauccagacacucacucuuuuccugacguccggcgggguguuguuaucucuguacgucucagcccuacucaguuaucugcuuuacagcgacauucuguugaaguuuuccccuaccaaaauaaucgcuccaacaacuucucucgauucggcaaacgccucaaauuuccaagcgguuaaccacagcgcuaccaaggagaugacauuucugcugccggaacccgaguggaccuauccuagacucaguugccagggauccacuuuccagaaagccuuacugauuucuccacauagguuuggugaagcaaagggcaauagcgcuccccuuaucauucgggagccuuucaucgccugugggccaaaagaaugcaagcacuuugcauugacacauuacgccgcucagcccggaggcuauuacaacgguacccgcgaggaccgaaauaagcugcgucaccuaauauccgugaaccucgggaaaaucccuacgguagaaaauucaauuuuccauauggccgcguggaguggaagcgcaugucacgauggcaaggaauggacuuauaucggcguggacgggccagauucuaacgcccugauuaaaaucaaguacggagaggcuuacaccgacacauaucacuccuacgccaauaacauacuuagaacucaagaaucagcaugcaauuguauugguggcgauugcuaucugaugaucaccgacgggagcgcuaguggaauuucuaaauguagguuuuugaagauccgggagggccgcaucauuaaggagauauucccgacagguagagucgaacauaccgaggaaugcacguguggguuugccuccaacaaaacuaucgagugcgcguguagggauaauagcuacacagccaagcggcccuucgugaaacucaacguugaaaccgacacugcagagauucgccugaugugcacagagaccuauuuagauacgccucgaccagacgauggaucgaucaccggccccugcgaaucuaauggcgacaagggguccggagguauaaaaggcggguuugugcaccagagaauggcuucaaagauuggaaggugguacagucggacaaugagcaaaacuaagcguaugggcauggagcuguaugucaaguacgacggugauccuuggaccgacuccgaugcccucgcuccaucuggggugaugguaagcaucgaggagcccggcugguacucauucggauucgaaaucaaagacaagaaaugugauguuccgugcauuggcaucgagauggugcaugacgggggaaagacaacuuggcacagugccgcaaccgccauuuauugucuuauggguuccggccagcuguugugggauacagucaccgggguggacauggcucuauga

SEQ ID NO: 156636 - RNA, 1401 nt, Artificial Sequence
  derived and/or modified CDS sequence (opt3) from neuraminidase__InfluenzaB__AAN39777
augcugcccagcaccauccagacacucacucuuuuccugacguccggcgggguguuguuaucucuguacgucucagccagucuaagcuaucuccuguacuccgacauucuucugaaguuuucucaaaccgagauaacagcuccuacuaugccauuggauugcgcaaacgccucgaauguucaggcggugaacagaucagcuaccaaaggaguaacacuccugccgcccgaaccugaguggaccuauccaaggcugagcugucccgguaguacuuuccagaaggcccucuuaaucuccccucaccgguuuggcgaaacaaaaggaaauucugcaccacugauuauccgcgagcccuucauugccugcgggccuaaggaauguaaacauuuugcucuuacccacuacgcagcccagccaggcgguuauuacaacgggacgcgagaggaccguaauaaguugagacaucugaucagcgugaagcuaggaaaaauaccgacugucgagaacuccaucuuccacauggcugccuggucaggcagugcgugccaugauggcagggaauggaccuauauugggguggacggacccgauagcaaugcacuccugaagaucaaauacggugaggccuacacagacacuuaucacucuuacgcuaagaacauucuucggacccaagaauccgccuguaauugcaucggcggggauuguuaucugaugauaacagacggaucagcaagcggcauuagugagugccgcuuuuugaaaaucagagaggguaggauuaucaaggaaaucuucccuaccgggcggguuaagcacacggaggaauguacuugcggauuugcuucuaacaaaacaauugagugugccugccgcgauaauuccuacaccgcgaagcgaccauucgugaaacucaacgucgaaacugacacagccgagauaagacugaugugcaccgagacguauuuagauacccccaggccugacgauggcagcaucacaggcccaugugaaucgaaugggaacaagggaucugguggcauuaaagggggauuugugcaucagcggauggcauccaagaucggccguugguacucacgcacuaugaguaaaaccaagagaauggguauggggcuguauguaaaguacgacggcgaccccuggacagauagcgaggcucucgcccuuuccggaguuauggugucuauggaggaaccgggcugguacagcuucggguuugaaauaaaagacaagaaaugcgaugucccuuguauuggaaucgagauggugcacgacgguggcaagacuaccuggcauucagcugccacagcaaucuauugccugauggggaguggacaguugcuaugggauaccgugacuggcgucgacauggcccuguga

SEQ ID NO: 156637 - RNA, 1401 nt, Artificial Sequence; identical to SEQ ID NO: 156632
  derived and/or modified CDS sequence (opt3) from neuraminidase__InfluenzaB__AAN39779

SEQ ID NO: 156638 - RNA, 1401 nt, Artificial Sequence
  derived and/or modified CDS sequence (opt3) from neuraminidase__InfluenzaB__AAN39781
augcugcccagcaccauccagacacucacucuuuuccugacguccggcgggguguuguuaucucuguacgucucagccagucuaagcuaucuccuguacuccgacauucuucugaaguuuucuucgaccgagauaacagcuccuacuaugccauugaacugcgcaaaugccucaaacguucaagcggugaaucacagcgcuaccaaaggaguaacacucccgcugcccgaaccugaguggaccuauccaagacugaguugucccgguuccacuuuccagaaggcccucuuaaucucuccucauagguuuggcgaaacaaaagggaacagcgcaccacugauuauccgggagcccuucauugccugcggaccuaaggaauguaaacacuuugcucuuacccauuacgcagcccagccaggcgguuauuacaaugggacgcgcgaggaucgaaacaaguugcgucaccugaucuccgugaagcuaggaaaaauaccgacugucgaaaauucaaucuuccauauggcugccuggaguggcagcgcgugccacgacggcagagaauggaccuauauugggguggauggacccgacucuaacgcacuccugaagaucaaauacggugaggccuacacagauacuuaucacuccuacgcuaauaacauucuuaggacccaggaaucagccuguaauugcaucggcggggacuguuaucugaugauaacagauggaagcgcaaguggcguuucugagugccgguuuuugaagauucgcgaggguagaaucauuaaagaaaucuucccuaccgggaggguggagcauacggaagaguguacuugcggauuugcuuccaacaagacaaucgaaugugccugccgggacaauagcuacaccgcgaagcgcccauucgucaaacucaacguggagacugauacagccgagauucgacugaugugcaccgaaacguauuuagacacccccagaccugaugacggcucgauaacaggcccaugugagucuaauggggauaagggauccgguggcaucaaagggggauuuguacaccaaaggauggcaucaaagauuggccggugguacagucguacuaugagcaaaaacaagcgcauggguauggggcuguauguuaaauacgacggcgaccccuggaucgauuccgacgcucucacccuuucuggagugauggucagcauggaggagccgggcugguacucauucggguuugaaauaaaggauaagaaaugcgacgugccuuguauuggaaucgagauggugcaugaugguggcaaggagacauggcacagugccgcuacugccaucuauugccugaugggguccggacaguugcuaugggacaccgucacaggcguuaacauggcacuguga

SEQ ID NO: 156639 - RNA, 1401 nt, Artificial Sequence
  derived and/or modified CDS sequence (opt3) from neuraminidase__InfluenzaB__AAN39783
augcugcccagcaccauccagacacucacucuuuuccugacguccggcgggguguuguuaucucuguacgucucagccagucuaagcuaucuccuguacuccgacauucuucugaaguuuucucaaaccgagauaacagcuccuacuaugccauuggauugcgcaaacgccucgaauguucaggcggugaacagaucagcuaccaaaggaguaacacuccugcugccggaacccgaguggaccuauccuaggcucagcuguccagguaguacuuuccagaaggccuuacugaucucuccccaccgguuuggcgaaacaaaaggaaauuccgcaccucuuauuauccgcgagccauucauugccugcgggcccaaggaauguaaacauuuugcuuugacccacuacgcagcccagccuggcgguuauuacaacgggacgcgagaggaccguaauaagcugagacaucuaaucagcgugaagcucggaaaaauaccaacugucgagaacuccaucuuccacauggcugccuggucaggcagugcgugccaugauggcagggaauggaccuauauugggguggacggaccggauagcaaugcacugcuuaagaucaaauacggugaggccuacacagacacuuaucacucuuacgcuaagaacauucugcggacccaagaauccgccuguaauugcaucggcggggauuguuauuugaugauaacagacggaucagcaagcggcauuagugagugccgcuuucucaaaaucagagaggguaggauuaucaaggaaaucuuccccaccgggcggguuaagcacacggaggaauguacuugcggauuugcuucuaacaaaacaauugagugugccugccgcgauaauuccuacaccgcgaagcgaccuuucgugaaacugaacgucgaaacugacacagccgagauaagauuaaugugcaccgagacguaucuggauaccccaaggcccaaugacggcagcaucacaggcccuugugaaucgaacggggauaagggaucugguggcauuaaagggggauuugugcaucagcggauggcauccaagaucggccguugguacucacgcacuaugaguaaaaccaagagaauggguauggggcucuauguaaaguacgacggcgacccauggacagauagcgaggcucuugcccuguccggaguuauggugucuauggaggaacccggcugguacagcuucggguuugaaauaaaagacaagaaaugcgaugucccguguauuggaaucgagauggugcacgacgguggcaagacuaccuggcauucagcugccacagcaaucuauugcuugauggggaguggacagcuacugugggauaccgugacuggcgucgacauggcccucuga

SEQ ID NO: 156640 - RNA, 1401 nt, Artificial Sequence
  derived and/or modified CDS sequence (opt3) from neuraminidase__InfluenzaB__AAN39785
augcugcccagcaccauccagacacucacucuuuuccugacguccggcgggguguuguuaucucuguacgucucagcccuacucaguuaucugcuuuacagcgacauucuguugaaguuuuccccuaccaaaguuauagcuccaacaaugucucucgauuaugcaaacgccucgaaugugcaagcgguaaaccacucagcuacugaggaaaugaccuuccugcugccggagcccgaauggacauacccuagacucagcugccagggaaguaccuuucagaaggccuuacugaucuccccacauagguucggugaggcaaaaggcaauucugcuccccuuauuauccgggaaccuuuuauugcuugugggccaaaggagugcaaacacuucgcauugacucauuaugccgcucagcccggaggcuacuauaacgguacacgcgaggaccgaaauaagcugcgucaccuaaucagcgugaaccucgggaagauaccuaccgucgaaaauuccaucuuucauauggccgcguggucaggaagugcaugucacgauggcagagaguggacguacauuggcguggacgggccagauagcaacgcccugaucaaaauuaaguacggagaagccuauacugacaccuaccacucuuaugccaauaacauccuuaggacacaagaguccgcaugcaauuguauagguggcgauugcuaccugaugauuacugacgggucagcuagcggaaucagucggugucgcuucuugaaaauuagagagggcaggaucaucaaggaaauuuuuccgaccggucggguugagcauacagaagagugcaccuguggguucgccucuaacaaaacgauagaaugcgcgugucgcgauaauuccuauacugccaagcgacccuuugugaagcucaacgucgagacagacaccgcagagaucagacugaugugcacugaaacauacuuagauaccccuaggccagacgauggaagcauuacgggccccugcgagucgaauggcgacaaagggucuggagguaucaagggcggguucgugcaccagcggaugaccucccguauaggacgcugguauucaagaacaaugaguaaaacuaagaggaugggcauggaacuguacguaaaauacgacggugauccuuggaccgacagcgaugcucucgccccauccgggguuauggugucuauggaggaacccggcugguauagcuuuggauucgagauuaaggacaaaaagugugaugucccgugcaucggcaucgagauggugcaugacgggggaaagaaaacauggcacucagcugccacugcaauuuacugucuuauggguaguggccagcuguugugggauaccgugacaggggucgacauggcccuauga

SEQ ID NO: 156641 - RNA, 1401 nt, Artificial Sequence
  derived and/or modified CDS sequence (opt3) from neuraminidase__InfluenzaB__AAN39787
augcugcccagcaccauccagacacucacucuuuuccugacguccggcgggguguuguuaucucuguacgucucagcccuacucaguuaucugcuuuacagcgacauucuguugaaguuuuccccuaccaaaguuauagcuccaacaaugucucucgauuaugcaaacgccucgaaugugcaagcgguaaaccacucagcuacugaggaaaugaccuuccugcugccggagcccgaauggacauacccuagacucagcugccagggaaguaccuuucagaaggccuuacugaucuccccacauagguucggugaggcaaaaggcaauucugcuccccuuauuauccgggaaccuuuuauugcuugugggccaaaggagugcaaacacuucgcauugacucauuaugccgcucagcccggaggcuacuauaacgguacacgcgaggaccgaaauaagcugcgucaccuaaucagcgugaaccucgggaagauaccuaccgucgaaaauuccaucuuucauauggccgcguggucaggaagugcaugucacgauggcagagaguggacguacauuggcguggacgggccagauagcaacgcccugaucaaaauuaaguacggagaagccuauacugacaccuaccacucuuaugccaauaacauccuuaggacacaagaguccgcaugcaauuguauagguggcgauugcuaccugaugauuacugacgggucagcuagcggaaucagucggugucgcuucuugaaaauuagagagggcaggaucaucaaggaaauuuuuccgaccggucggguugagcauacagaagagugcaccuguggguucgccucuaacaaaacgauagaaugcgcgugucgcgauaauuccuauacugccaagcgacccuuugugaagcucaacgucgagacagacaccgcagagaucagacugaugugcacugaaacauacuuagauaccccuaggccagacgauggaagcauuacgggccccugcgagucgaauggcgacaaagggaacggagguaucaagggcggguucgugcaccagcggauggcuucucguauaggacgcugguauuccagaaccaugucaaaaacaaagaggaugggcauggaacuguacguaaaauacgacggugauccuuggacugacagugaugcccucgcuccaagcgggguuaugguguccauggaggaacccggcugguauucuuuuggauucgagauuaaggacaaaaagugugaugucccgugcaucggcaucgagauggugcaugacgggggaaagaaaaccuggcacagcgccgcaacagccauuuacugucuuauggguucaggccagcuguugugggauacugugaccggggucgacauggcucuauga

SEQ ID NO: 156642 - RNA, 1401 nt, Artificial Sequence
  derived and/or modified CDS sequence (opt3) from neuraminidase__InfluenzaB__AAN39795
augcugcccagcaccauccagacacucacucuuuuccugacguccggcgggguguuguuaucucuguacgucucagccagucuaagcuaucuccuguacuccgacauucuucugaaguuuucuccuaccgagauaacagcuccaacuaugccguuggauugcgcaaacgccucgaauguucaagcggugaacagaucagcuaccaaaggaguaacacuccugcugcccgaaccugaguggaccuauccaaggcucagcugucccgguaguacuuuccagaaggccuuacugaucuccccucaccgguuuggcgaaacacgcggaaauucugcaccacuuauuauccgagagcccuucauugccugcgggccuaaagaauguaagcauuuugcuuugacccacuacgcagcccagccaggcgguuauuacaacgggacgcgugaggacagaaauaaacugaggcaucuaaucagcgugaagcucggaaagauaccgacugucgagaacuccaucuuccacauggcugccuggucaggcagugcgugccaugauggccgggaauggaccuauauugggguggacggacccgauagcaaugcacugcuuaaaaucaaguacggugaggccuacacagacacuuaucacucuuacgcuaacaauauucugcgcacccaggaauccgccuguaacugcaucggcggggauuguuauuugaugauaacagacggaucagcaagcggcaccaguaaaugcagauuucucaagauuagggagggucggaucauuaaagagaucuucccuacggggcgcguugaacacacugaggaauguacaugcggauuugcuucuaauaagaccaucgagugugccugccgagauaacaauuacacugcgaagagaccauucgugaaacugaacgucgaaacagacgccgcagagauuagguuaaugugcaccgagacguaucuggauacaccccggccugacgauggcuccauaaccggcccaugugaaagcaauggggacaagggacgugguggcaucaaagggggauuugugcaucaacgcauggcuucgaagauuggcagaugguacucuaggacuauguccaaaaccgagcggauggguauggaacucuauguaaaguacgacggggaucccuggacagacucagaugcccuugcucugaguggcguuauggugagcauggaggaaccgggaugguacuccuucggcuuugagaucaaagacaagaagugcgaugucccuuguauagggauugagauggugcacgacggagguaaaaagacuuggcauucugccgcaaccgccaucuauugcuugaugggcagcgggcagcuacugugggauacagugaccggagucgacauggcucucuga

SEQ ID NO: 156643 - RNA, 1401 nt, Artificial Sequence; identical to SEQ ID NO: 156627
  derived and/or modified CDS sequence (opt3) from neuraminidase__InfluenzaB__AAN39797

SEQ ID NO: 156644 - RNA, 1401 nt, Artificial Sequence
  derived and/or modified CDS sequence (opt3) from neuraminidase__InfluenzaB__AAN39799
augcugcccagcaccauccagacacucacucuuuuccugacguccggcgggguguuguuaucucuguacgucucagcccuacucaguuaucugcuuuacagcgacguucuguugaaguuuuccccuaccaaaauuauagcuccaacaaugucucucgauugcgcaaacgccucgaaugugcaagcgguaaaccacucagcuacugaggaaaugaccuuccugcugccggagcccgaauggacauauccuagacucagcugucagggaaguaccuuucagaaggccuuacugaucuccccacauagguucggugaggcaaaaggcaauucugcuccccuuauuauccgggaaccuuuuauugccugcgggccaaaggaguguaaacacuucgcauugacucauuacgccgcucagcccggaggcuauuacaacgguacacgcgaggaccgaaauaagcugcgucaccuaaucagcgugaaccucgggaagauaccuaccgucgaaaauuccaucuuucauauggccgcguggucaggaagugcaugccacgauggcagagaguggacguauauuggcguggacgggccagauagcaacgcccugaucaaaauugaauacggagaggcuuacacugacaccuaucacucuuacgccuauaauauccuuaggacacaagaguccgcauguaacugcauagguggcgauuguuaccugaugauuacugacgggucagcuagcggaaucaguaagugccgguucuugaaaauucgcgaaggcagaaucaucaaggagauuuuuccgaccgguaggguugaacauacagaggaauguaccugcggguucgccucuaauaaaacgauagagugugcgugccgggauaacuccuauacugccaagcgccccuuugugaagcucaaugucgagacagacaccgcagaaauccgacugaugugcacugagacauacuuagauaccccuagaccagacgauggaagcauuacgggccccugugaaucgaacggcgacaaagggucuggagguaucaagggcggguucgugcaccagaggauggcuuccaaaauaggacggugguauucacguaccaugaguaagacaaaacgcaugggcauggagcuguacguaaaguacgacggugauccuuggacugacagcgaugcccucgcuccauccgggguuauggugucuauggaggaacccggcugguauagcuuuggauucgagauuaaagacaagaagugcgaugucccguguaucggcaucgaaauggugcaugacggggguaaaaagaccuggcacucagccgcaacagccauuuacugccuuaugggaaguggccagcuguugugggauacugugaccggggucgacauggcucuauga

SEQ ID NO: 156645 - RNA, 1401 nt, Artificial Sequence
  derived and/or modified CDS sequence (opt3) from neuraminidase__InfluenzaB__AAN39801
augcugcccagcaccauccagacacucacucuuuuccugacguccggcgggguguuguuaucucuguacgucucagccagucuaagcuaucuccuguacuccgacauucuucugaaguuuucuccuaccgagauaacagcuccaacuaugccguuggauugcgcaaacgccucgaaugcgcaagcuguuaacagaucagccaccaaaggagugacacuccugcugcccgaaccugaguggaccuauccaaggcucagcugucccgguaguacuuuccagaaggcauuacugaucuccccucaccgguuuggcgaaacaaaaggaaauucugccccacuuauuauccgcgagcccuucauugcuugcgggccuaaggaauguaaacauuuugcauugacccacuacgccgcucagccaggcgguuauuacaacgggacgcgagaggaccguaauaagcugagacaucuaaucagcguaaagcucggaaaaauaccgacuguggagaacuccaucuuccacauggccgcguggucaggcagugcaugccaugauggcaaggaauggaccuauauuggggucgacggacccgauagcaaugcccugcuuaaaaucaaguacggugaggcuuacacagacacuuaucacucuuacgccaacaauauucugaggacccaggaauccgcauguaacugcaucggcgggaauuguuauuugaugauaacagauggaucagcuagcggcauuagugagugccgguuucucaaaauccgcgaggguagaauuaucaaggaaaucuucccuaccgggagggugaagcacacggaggaauguacuugcggauuugccucuaacaaaacaauugagugugcgugccgggacaauuccuacaccgccaagcgcccauucguuaaacugaacguggaaacugauacagcagagauacgauuaaugugcaccgagacguaucuggacacccccagaccugaugacggcagcaucacaggcccaugugaaucgaauggggauaagggaucugguggcauuaaagggggauuuguccaucaaaggauggcuuccaagaucggccggugguacucacguacuaugaguaaaaccaagcgcauggguauggggcucuaugugaaguacgacggcgaccccuggacagauagcgacgcccuugcucuguccggaguaaugguuucuauggaggaaccgggcugguacagcuucggguuugagauaaaagauaagaaaugcgacgugccuuguauuggaaucgaaaugguccacgaugguggcaaggagacuuggcauucagccgcaaccgccaucuauugcuugauggggaguggacagcuacugugggacacagugaccggcguggauauggcucucuga

SEQ ID NO: 156646 - RNA, 1401 nt, Artificial Sequence
  derived and/or modified CDS sequence (opt3) from neuraminidase__InfluenzaB__AAN39803
augcugcccagcaccauccagacacucacucuuuuccugacguccggcgggguguuguuaucucuguacgucucagccagucuaagcuaucuccuguacuccgacauucuucugaaguuuucuccuaccgagauaacagcuccaaaaguuccguuggauugcgcaaacgccucgaaugugcaagcgguaaacagaucagcuacuaagggaaugacccuccugcugagcgaacccgaguggacauauccuaggcucaguugucaggguuccaccuuccagaaagccuuacugaucucuccacaccgguuuggcgaaacucgcgggaauagcgcaccccuuauuauccgagagccuuucauugccugcggaccaaaggaauguaaacauuuugcuuugacacacuacgcagcccagcccggcgguuauuacaacgggacccgugaggacagaaauaagcugaggcaucuaaucuccgugaagcucggaaaaauaccuacggucgagaacucaaucuuccacauggcugccuggaguggcagcgcgugccaugauggccgggaauggacuuauauugggcuggacggaccagauucuaaugcacuuaucaagauuaaauacggugaggccuacaccgacacauaucacuccuacgcuaacaauauccugcgcacucaagaaucagccuguaacugcauaggcggggauuguuauuugaugauuaccgacggaagcgcaaguggcaucucuaagugcagauuucucaaaauuagggagggucggaucaucaaggagauuuucccgacagggcgcguggaacacaccgaggaauguacgugcggauuugcuuccaauaagacuauagagugugccugccgagauaacagcuacacagcgaaaagacccuucguuaagcugaauguggaaaccgacacugccgagaucagguuaaugugcacagagaccuaucuggauacgccucggccagacgauggcucgauuaccggccccugugaaucuaacggggacaaaggacgugguggcaucaaagggggauuuguccaucagcgcauggcauccaagauaggcagaugguacucaaggacaaugaguaagacugagcggauggguauggaacucuaugugaaauacgacggggauccuuggaccgacagcgaugcucuugccccauccggcguaaugguuucuaugaaggagcccggaugguacagcuucggcuuugaaauuaaggacaaaaagugcgaugugccguguaucgggaucgagaugguccacgacggagguaaagagacauggcauucagcugccacugcaauuuauugccugaugggcagugggcaguugcuaugggauaccgugacaggaguggacauggcccuguga

SEQ ID NO: 156647 - RNA, 1401 nt, Artificial Sequence
  derived and/or modified CDS sequence (opt3) from neuraminidase__InfluenzaB__ABA02232
augcugcccagcaccauccagacacucacucuuuuccugacguccggcgggguguuguuaucucuguacgucucagccagucuaagcuaucuccuguacuccgacauucuucugaaguuuucuccuaccgagauaacagcuccaacuaugccguuggauugcgcaaacgccucgaauguucaagcggugaacagaucagcuaccaaaggaguaacacuccugcugcccgaaccugaguggaccuauccaaggcucagcugucccgguaguacuuuccagaaggccuuacugaucuccccucaccgguuuggcgaaacaaaaggaaauucugcaccacuuauuauccgcgagcccuucauugccugcgggccuaaggaauguaaacauuuugcuuugacccacuacgcagcccagccaggcgguuauuacaacgggacgcgaggagaccguaauaagcugagacaucuaaucagcgugaagcucggcaaaauaccgacugucgagaacuccaucuuccacauggcugccuggucaggcagugcgugccaugaugggaaggaguggaccuauauuggaguggacggucccgaaaauaacgcacugcuuaaaaucaaguacggcgaggccuacacagauacuuaucacagcuacgcuaauaacauucugaggacccaggaaucugccuguaauugcaucgggggaaacuguuauuugaugauaacagacggcuccgcaucagguauuagcgagugccgguuucucaaaauccgcgaggggagaauuaucaaggaaaucuucccuaccggaaggguuaagcacacggaggaauguacuugcggcuuugcuaguaauaaaacaauugagugugccugccgggauaacucuuacaccgcgaagcgcccauucgugaaacugaaugucgaaacugacacagccgagauacgauuaaugugcaccgagacguaucuggauacccccagaccugacgauggcuccaucacagggccaugugaaagcaacggagacaaggguucgggcgggauuaaaggaggcuuugugcaucaaaggauggcaucuaagaucggucggugguacucccguacuaugucaaaaaccaagcgcauggggaugggccucuauguaaaguacgauggagaccccuggacagacagugaugcucuugcccugagcggcguuaugguguccauggaggaaccggggugguacucuuucggauuugagauaaaagacaagaaaugcgaugucccuuguauugguaucgaaauggugcacgacggcgggaaggagacuuggcauagcgcugccaccgcaaucuauugcuugaugggaucaggccagcuacugugggauacagugaccggugucgacauggcccucuga

SEQ ID NO: 156648 - RNA, 1401 nt, Artificial Sequence
  derived and/or modified CDS sequence (opt3) from neuraminidase__InfluenzaB__ABI84039
augcugcccagcaccauccagacacucacucuuuuccugacguccggcgggguguuguuaucucuguacgucucagccagucuaagcuaucuccuguacuccgacauucuucugaaguuuucuccuaccgagauaacagcuccaacuaugccguuggauugcgcaaacgccucgaauguucaagcggugaacagaucagcuaccaaaggaguaacacuccugcugcccgaaccugaguggaccuauccaaggcucagcugucccgguaguacuuuccagaaggccuuacugaucuccccucaccgguuuggcgaaacaaaaggaaauucugcaccacuuauuauccgcgagcccuucauugccugcgggccuaacgaauguaagcauuuugcuuugacccacuacgcagcccagccaggcgguuauuacaaugggacgcgaggagaccguaacaaacugagacaucuaaucagcgugaagcucggcaagauaccgacugucgaaaauuccaucuuccacauggcugccuggucaggcagugcgugccaugaugggaaagaguggaccuauauuggaguggacggucccgauaacaaugcacugcuuaagaucaaauacggcgaggccuacacagacacuuaucacagcuacgcuaacaauauucugaggacccaggagucugccuguaacugcaucgggggaaauuguuauuugaugauaacagauggcuccgcaucagguguuagcgaaugccgguuucucaagauucgcgaggggagaaucauuaaagagaucuucccuaccggaagggugaaguacacggaagaguguacuugcggcuuugcuaguaacaagacaaucgaaugugccugccgggacaauucuuauaccgcgaaacgcccauucgucaagcugaacguggagacugauacagccgaaauucgauuaaugugcaccgacacguaccuggauacccccagaccugacgauggcuccauaacagggccaugugagagcaacggagacaaagguucgggcgggaucaagggaggcuuuguacaccaaaggauggcaucuaaaauuggucggugguauucccguacuaugucaaagaccgagcgcauggggaugggccucuacguuaaauacgacggagaucccugggcugacagugaugcccuugcuuucagcggcgugauggucuccaugaaggaaccggggugguauucuuuuggauucgagaucaaggacaaaaagugcgaugugccuuguauagguauugaaauggugcaugacggcgggaaagagacauggcacagcgccgcaacugccaucuacugccugaugggaucaggccaguugcuaugggauaccgucacagguguugacauggcucuguga

SEQ ID NO: 156649 - RNA, 1401 nt, Artificial Sequence
  derived and/or modified CDS sequence (opt3) from neuraminidase__InfluenzaB__ABI84051
augcugcccagcaccauccagacacucacucuuuuccugacguccggcgggguguuguuaucucuguacgucucagccagucuaagcuaucuccuguacuccgacauucuucugagauuuucucaaaccgagauaacagcuccuaucaugccauuggauugcgcaaacgccucgaauguucaggcggugaaccacucagcuacuaagggaguaacccuccugcugccggaacccgaguggacauauccuaggcucagcuguccagguaguaccuuccagaaagccuuacugauuucuccccaucgguuuggcgaaacuaagggaaauuccgcaccucuuaucauucgcgagccauucaucgccugcgggcccaaagaauguaagcacuuugcuuugacacauuacgcagcccagccuggcgguuauuacaacgggacccgagaggaccguaauaaacugagacaccuaauaagcgugaagcucggaaagaucccaacggucgagaacuccauuuuccauauggcugccuggucaggcagugcgugccacgauggcagggaauggacuuauaucgggguggacggaccggauagcaaugcacugcuuaaaauuaaguacggugaggccuacaccgacacauaucacucuuacgcuaaaaacauccugcggacucaagaauccgccuguaauugcauaggcggggauuguuauuugaugauuaccgacggacccgcaucaggcaucagcgagugccgcuuucucaagauuagagaggguaggaucaucaaagaaauuuucccuacagggcggguuaagcauaccgaggaauguacgugcggauuugcuaguaacaagacuauagagugugccugccgcgauaauucuuacacagcgaaacgaccauucgugaagcugaacgucgaaaccgacacugccgagaucagauuaaugugcacagagaccuaucuggauacgcccaggccuaaugacggcuccauuaccggcccaugugaaagcaacggggauaaaggaucggguggcaucaaagggggauuugugcaccagcggauggcaucuaagauaggccguugguacucccgcacaaugucaaagacuaaaagaauggguauggggcucuauguaaaguacgacggcgaccccuggaccgauagugaggcucuugcccugagcggaguuaugguguccauggaggaaccgggcugguacucuuucggguuugaaauuaaggacaaaaagugcgaugucccuuguaucggaaucgagauggugcaugacgguggcaaaacaacuuggcacagcgcugccaccgcaauuuauugcuugauggggucaggacagcuacugugggauacagugaccggcgucgacauggcccucuga

SEQ ID NO: 156650 - RNA, 1401 nt, Artificial Sequence
  derived and/or modified CDS sequence (opt3) from neuraminidase__InfluenzaB__ABI84062
augcugcccagcaccauccagacacucacucuuuuccugacguccggcgggguguuguuaucucuguacgucucagccagucuaagcuaucuccuguacuccgacauucuucugaaguuuucuccuaccgagauaaucgcuccaauuaugccguuggauugcgcaaacgccucgaauguucaagcggugaacagaucaacaacuaaaggaguaacccuccugcugcccgaaccugaguggacauauccaaggcucagcugucccgguaguaccuuccagaaggcuuuacugaucuccccucaccgguuuggcgaaacuaaaggaaauucugccccacuuauuauccgcgagcccuucauagcaugcgggccuaaggaauguaaacauuuugccuugacacacuacgcugcacagccaggcgguuauuacaacgggacccgaggagaccguaauaagcugagacaucuaaucagcgugaagcucggcaaaauuccgacggucgagaacuccaucuuccacauggccgcuuggucaggcagugccugccaugaugggaaggaguggacuuauauuggaguggacggucccgauaauaacgcgcugcuuaaaaucaaguacggcgaagcauacaccgacacauaucacagcuacgccaauaacauacugaggacucaggagucugcuuguaauugcauugggggaaacuguuauuugaugaucaccgauggcccugccuccgguauuucagaaugccgguuucucaaaauccgcgaggggagaaucauuaaggagauauucccaacaggaaggguuaagcacaccgaagaguguacgugcggcuuugcaagcaauaaaacuaucgaaugugcuugccgggacaacaguuacacagccaagcgccccuucgugaaacugaaugucgagaccgauacugcggaaauucgauuaaugugcacagagaccuaucuggacacgccuagaccagaugacggcucuaucaccgggcccugugaguccaacggagauaaggguagcggcgggauaaaaggaggcuuugugcaucaaaggauggccucgaagauuggucggugguacucucguacaauguccaaaacugaacgcauggggaugggccucuauguaaaguacgacggagacccgugggcagauucagacgcucuugcccugaguggcguuauggugagcauggaggaaccugggugguacuccuucggauuugagaucaaggauaaaaagugcgacguccccuguaucgguauugaaauggugcacgauggcgggaaagagaccuggcauucugcugccacagcaaucuauugcuugaugggaagcggccagcuacugugggacacugugaccggugucgauauggcccucuga

SEQ ID NO: 156651 - RNA, 1401 nt, Artificial Sequence
  derived and/or modified CDS sequence (opt3) from neuraminidase__InfluenzaB__ABL76280
augcugcccagcaccauccagacacucacucuuuuccugacguccggcgggguguuguuaucucuguacgucucagccagucuaagcuaucuccuguacuccgacauucuucugaaguuuucuccuaccgagauaacagcuccaacuaugccguugaacugcgcaaaugccucgaacguucaagcggugaauagaucagcuaccaaaggaguaacacuccugcugcccgaaccugaguggaccuauccaaggcucagcugucccgguaguacuuuccagaaggccuuacugaucuccccucaccgguuuggcgaaacaaaagggaacucugcaccacuuauuauccgcgagcccuucauugccugcggaccuaaggaauguaaacauuuugcuuugacccacuacgcagcccagccaggcgguuauuacaaugggacgcgagaggaucguaacaagcugagacaucuaaucagcgugaagcucggaaaaauaccgacugucgaaaauuccaucuuccacauggcugccuggucaggcagugcgugccaugacggcagggaauggaccuauauugggguggauggacccgacagcaacgcacugcuuaagaucaaauacggugaggccuacacagauacuuaucacucuuacgcuaauaacauucugcggacccaggaauccgccuguaauugcaucggcggggacuguuauuugaugauaacagauggaucagcaagcggcauuagugagugccgcuuucucaagaucagagaggguaggauuaucaaagaaaucuucccuaccgggcggguugagcacacggaagaguguacuugcggauuugcuucuaacaagacaauugaaugugccugccgcgacaauuccuacaccgcgaagcgaccauucgugaaacugaacgucgagacugauacagccgagauaagauuaaugugcaccgaaacguaucuggacacccccaggccugaugacggcagcaucacaggcccaugugagucgaauggggauaagggaucugguggcauuaaagggggauuugugcaucaacggauggcauccaagaucggccguugguacucacgcacuaugaguaaaaccaagagaauggguauggggcucuauguaaaauacgacggcgaccccuggauagauagcgacgcucuuacacuguccggaguuauggugucuauggaggagccgggcugguacagcuucggguuugaaauuaaggauaagaaaugcgacgucccuuguaucggaaucgagauggugcacgaugguggcaagaaaacuuggcauucagccgcuaccgccauuuauugcuugauggggaguggacagcuacugugggacacagugaccggcgucgauauggcacucuga

SEQ ID NO: 156652 - RNA, 1401 nt, Artificial Sequence
  derived and/or modified CDS sequence (opt3) from neuraminidase__InfluenzaB__ABL76302
augcugcccagcaccauccagacacucacucuuuuccugacguccggcgggguguuguuaucucuguacgucucagccagucuaagcuaucuccuguacuccgacauucuucugaaguuuccuccaaccgagauaacagcuccgacuaugcccuuggauugcgcaaacgccucuaauguucaagcggugaacagaucggcuaccaaaggaguaacacuccugcugccugaaccagaguggaccuaucccaggcucucauguccugguagcacuuuccagaaggccuuacugaucaguccacaccgguuuggcgaaacaaaaggaaauuccgcaccccuuauuauccgcgagccuuucauugccugcgggccaaaggaauguaaacauuuugcuuugacccacuacgcagcccagccgggcgguuauuacaacgggacgcgagaggaccguaauaagcugagacaucuaaucucugugaagcucggaaaaauacccacugucgagaacagcaucuuccacauggcugccugguccggcucagcgugccaugauggcagggaauggaccuauauugggguggacggaccugauaguaaugcacugcuuaagaucaaauacggugaggccuacacagacacuuaucacagcuacgcuaacaauauucugcggacccaggaaucugccuguaacugcaucggcgggaauuguuauuugaugauaacagauggauccgcaucaggcauuagcgagugccgcuuucucaagaucagagaggguaggauuaucaaagaaaucuucccaaccgggcggguuaagcacacggaggaauguacuugcggauuugcuaguaacaagacaauugagugugccugccgcgacaauucuuacaccgcgaaacgacccuucgugaagcugaacgucgaaacugauacagccgagauaagauuaaugugcaccgagacguaucuggacaccccuaggccagaugacggcuccaucacaggccccugugaaagcaauggggauaaaggaucggguggcauuaaagggggauuugugcaucaacggauggcaucuaagaucggccguugguacucccgcacuaugucaaagaccaaaagaauggguauggggcucuauguaaaguacgacggcgacccguggacagauagugacccucuugcucugagcggaguuaugguguccauggaggaacccggcugguacucuuucggguuugagauaaaggauaaaaagugcgacgucccauguauuggaaucgaaauggugcacgaugguggcaaagagacuuggcauagcgccgcuaccgccaucuauugcuugauggggucaggacagaugcuaugggacacagugaccggcgucgauauggcacuguga

SEQ ID NO: 156653 - RNA, 1401 nt, Artificial Sequence
  derived and/or modified CDS sequence (opt3) from neuraminidase__InfluenzaB__ABL76313
augcugcccagcaccauccagacacucacucuuuuccugacguccggcgggguguuguuaucucuguacgucucagccagucuaagcuaucuccuguacuccgacauucuucugaaguuuucuccuaaagagauaaccgcuccaacaaugccguugaacugcgcaaaugccucgaacguucaagcggugaauagaucagcuacuaagggaguaaccuucccccucccugaaccagaguggacauaucccaggcugagcuguccugguaguaccuuucagaaagcccugcucaucuccccacaccgguucggcgaaacuaaggggaacucugcacccuuaauuauccgcgagccuuuuauugccugcggaccaaaagaauguaagcauuucgcucugacacacuacgcagcccagccgggcgguuauuacaaugggacccgagaggaucguaacaaacuuagacauuugaucagcgugaagcugggaaagauacccacggucgaaaauuccaucuuucacauggcugccuggucaggcagugcgugccaugacggcagggaauggacuuauauugggguggauggaccugacagcaacgcacuacucaaaaucaaguacggugaggccuacaccgauacauaucacucuuacgcuaauaacauucugcggacucaggaauccgccuguaauugcaucggcggggacuguuaucuuaugauaaccgauggaucagcaagcggcauuagugagugccgcuuccugaaaaucagagaggguaggauuaucaaggaaaucuuuccaacagggcggguugagcacaccgaagaguguacgugcggauucgcuucuaacaagacuauugaaugugccugccgcgacaauuccuacacagcgaaacgacccuuugugaaguugaacgucgagaccgauacugccgagauaagacucaugugcacagaaaccuaucuggacacgccuaggccagaugacggcagcaucaccggccccugugagucgaauggggauaaaggaucugguggcauuaaagggggauucgugcaucaacggauggcauccaagaucggccguugguacucacgcacaaugaguaagacuaaaagaauggguaugggguuauauguaaaguacgacggcgacccguggauagauagcgacgcucugacccucuccggaguuauggugucugucgaggagccuggcugguacagcuuuggguucgaaauuaaggauaaaaagugcgacgugcccuguaucggaaucgagauggugcacgaugguggcaaaacaacuuggcauucagccgcuaccgccauuuauugccuuauggggaguggacagcuguugugggacacagucaccggcguugauauggcacuauga

SEQ ID NO: 156654 - RNA, 1401 nt, Artificial Sequence
  derived and/or modified CDS sequence (opt3) from neuraminidase__InfluenzaB__ABL76335
augcugcccagcaccauccagacacucacucuuuuccugacguccggcgggguguuguuaucucuguacgucucagccagucuaagcuaucuccuguacuccgacauucuucugaaguuuucuccuaccgagauaacagcuccaacuaugccguugaacugcgcaaaugccucgaacguucaagcggugaauagaucagcuaccaaaggaguaacacucccccugccugaaccagaguggaccuaucccaggcugagcuguccugguaguacuuuccagaaggcccucuuaaucuccccacaccgguuuggcgaaacaaaagggaacucugcaccccugauuauccgcgagccuuucauugccugcggaccaaaggaauguaaacauuuugcucuuacccacuacgcagcccagccgggcgguuauuacaaugggacgcgagaggaucguaacaaguugagacaucugaucagcgugaagcuaggaaaaauacccacugucgaaaauuccaucuuccacauggcugccuggucaggcagugcgugccaugacggcagggaauggaccuauauugggguggauggaccugacagcaacgcacuccugaagaucaaauacggugaggccuacacagauacuuaucacucuuacgcuaauaacauucuucggacccaggaauccgccuguaauugcaucggcggggacuguuaucugaugauaacagauggaucagcaagcggcauuagugagugccgcuuuuugaagaucagagaggguaggauuaucaaagaaaucuucccaaccgggcggguugagcacacggaagaguguacuugcggauuugcuucuaacaagacaauugaaugugccugccgcgacaauuccuacaccgcgaagcgacccuucgugaaacucaacgucgagacugauacagccgagauaagacugaugugcaccgaaacguauuuagacaccccuaggccagaugacggcagcaucacaggccccugugagucgaauggggauaagggaucugguggcauuaaagggggauuugugcaucaacggauggcauccaagaucggccguugguacucacgcacuaugaguaaaaccaagagaauggguauggggcuguauguaaaauacgacggcgacccguggauagauagcgacgcucucacacuuuccggaguuauggugucuauggaggagccuggcugguacagcuucggguuugaaauuaaggauaagaaaugcgacguccccuguaucggaaucgagauggugcacgaugguggcaagacuaccuggcauucagccgcuacagccauuuauugccugauggggaguggacaguugcuaugggacaccgugacuggcgucgauauggcacuguga

SEQ ID NO: 156655 - RNA, 1401 nt, Artificial Sequence
  derived and/or modified CDS sequence (opt3) from neuraminidase__InfluenzaB__ABL76346
augcugcccagcaccauccagacacucacucuuuuccugacguccggcgggguguuguuaucucuguacgucucagccagucuaagcuaucuccuguacuccgacauucuucugaaguuuucuccuaaagagauaaccacaccaacuaugccguugaacugcgcuaaugcaucgaacguucaagccgugaauagaucagcgaccaagggaguaacacuccugcugcccgaaccugaguggaccuauccaaggcucagcugucccgguaguacuuuccagaaggcuuuacugaucuccccucaccgguuuggcgaaacaaaggggaacucugccccacuuauuauccgcgagcccuucauugcaugcggaccuaaagaauguaagcauuuugccuugacccacuacgcugcacagccaggcgguuauuacaaugggacgcgagaggaucguaacaagcugagacaucuaaucagcgugaaacucggaaagauaccgacugucgaaaauuccaucuuccacauggccgcuuggucaggcagugccugccaugacggcagggaauggaccuauauugggguggauggacccgacagcaacgcgcugcuuaaaaucaaguacggugaggcauacacagauacuuaucacucuuacgccaauaacauucugcggacccaggaauccgcuuguaauugcaucggcggggacuguuauuugaugauaacagauggaucagccagcggcauuagugagugccgcuuucucaaaaucagagaggguaggauuaucaaggaaaucuucccuaccgggcggguugagcacacggaagaguguacuugcggauuugcaucuaacaagacaauugaaugugcuugccgcgacaauuccuacaccgccaaacgaccauucgugaagcugaacgucgagacugauacagcggagauaagauuaaugugcaccgaaacguaucuggacacccccaggccugaugacggcagcaucacaggcccaugugagucgaauggggauaaaggaucugguggcauuaaagggggauuugugcaucaacggauggccuccaaaaucggccguugguacucacgcacuaugaguaagaccaaaagaauggguauggggcucuauguaaaguacgacggcgaccccuggauagauagcgacgcacuuacacuguccggaguuauggugucuauggaggagccgggcugguacagcuucggguuugaaauuaaggauaaaaagugcgacgucccuuguaucggaaucgagauggugcacgaugguggcaaaacuaccuggcauucagcugccacagcuauuuauugcuugauggggaguggacagcuacugugggacaccgugacuggcgucgauauggcccucuga

SEQ ID NO: 156656 - RNA, 1401 nt, Artificial Sequence; identical to SEQ ID NO: 156655
  derived and/or modified CDS sequence (opt3) from neuraminidase__InfluenzaB__ABL76357

SEQ ID NO: 156657 - RNA, 1401 nt, Artificial Sequence
  derived and/or modified CDS sequence (opt3) from neuraminidase__InfluenzaB__ABL76368
augcugcccagcaccauccagacacucacucuuuuccugacguccggcgggguguuguuaucucuguacgucucagccagucuaagcuaucuccuguacuccgacauucuucugaaguuuucuccuaccgagauaacagcuccaacuaugccguuggauugcgcaaacgccucgaauguucaagcggugaacagaucagcuaccaaaggaguaacacuccugcugcccgaaccugaguggaccuauccaaggcucagcugucccgguaguacuuuccagaaggccuuacugaucuccccucaccgguuuggcgaaacaaaaggaaauucugcaccacuuauuauccgcgagcccuucauugccugcgggccuaaggaauguaaacauuuugcuuugacccacuacgcagcccagccaggcgguuauuacaacgggacgcgagaggaccguaauaagcugagacaucuaaucagcgugaagcucggaaaaauaccgacugucgagaacuccaucuuccacauggcugccuggucaggcagugcgugccaugauggcaaggaauggaccuauauugggguggacggacccgauagcaaugcacugcuuaaaaucaaguacggugaggccuacacagacacuuaucacucuuacgcuaacaauauucugaggacccaggaauccgccuguaacugcaucggcgggaauuguuauuugaugauaacagauggaucagcaagcggcauuagugagugccgguuucucaaaauccgcgaggguagaauuaucaaggaaaucuucccuaccgggaggguuaagcacacggaggaauguacuugcggauuugcuucuaacaaaacaauugagugugccugccgggacaauuccuacaccgcgaagcgcccauucgugaaacugaacgucgaaacugauacagccgagauacgauuaaugugcaccgagacguaucuggacacccccagaccugaugacggcagcaucacaggcccaugugaaucgaauggggauaagggaucugguggcauuaaagggggauuugugcaucaaaggauggcauccaagaucggccggugguacucacguacuaugaguaaaaccaagcgcauggguauggggcucuauguaaaguacgacggcgaccccuggacagauagcggagcucuugcccuguccggcguuauggugucuauggaggaaccggggugguacagcuucggauuugagauaaaagacaagaaaugcgaugucccuuguauugguaucgaaauggugcacgacggcgggaaggagacuuggcauucagcugccaccgcaaucuauugcuugaugggaaguggccagcuacugugggauacagugaccggugucgacauggcccucuga

SEQ ID NO: 156658 - RNA, 1404 nt, Artificial Sequence
  derived and/or modified CDS sequence (opt3) from neuraminidase__InfluenzaB__ABL76379
augcugcccagcaccauccagacacucacucuuuuccugacguccggcgggguguuguuaucucuguacgucucagccagucuaagcuaucuccuguacuccgacauucuucugaaguuuucuccuaccgagauaacagcuccaacuaugccguuggauugcgcaaacgccucgaauguucaagcggugaacagaucagcuaccaaaggaguaacauuccuccugcugcccgaaccugaguggaccuauccaaggcucagcugucccgguaguacuuuucagaaggccuuacugaucuccccucaccgguucggcgaaacaaaaggaaauucugcaccacuuauuauccgcgagcccuuuauugccugcgggccuaaggaauguaaacauuucgcuuugacccacuacgcagcccagccaggcgguuauuacaacgggacgcgaggagaccguaauaagcugagacaucuaaucagcgugaagcucggcaaaauaccgacugucgagaacuccaucuuucacauggcugccuggucaggcagugcgugccaugaugggaaggaguggaccuauauuggaguggacggucccgauagcaaugcacugcuuaaaaucaaguacggcgaagccuacacagacacuuaucacucuuacgcuaacaauauucugaggacccaggaguccgccuguaacugcaucgggggaaauuguuauuugaugauaacagauggcucagcaagcgguauuagugaaugccgguuccucaaaauccgcgaggggagaauuaucaaggagaucuuuccuaccggaaggguuaagcacacggaagaguguacuugcggcuucgcuucuaacaaaacaauugaaugugccugccgggacaauuccuacaccgcgaagcgcccauuugugaaacugaacgucgagacugauacagccgaaauacgauuaaugugcaccgagacguaucuggacacccccagaccugaugacggcagcaucacagggccaugugagucgaauggagauaaggguucuggcgggauuaaaggaggcuucgugcaucaaaggauggcauccaagaucggucggugguacucacguacuaugaguaaaaccaagcgcauggggaugggccucuauguaaaguacgacggagaccccuggacagauagcgacgcucuugcccuguccggcguuauggugucuauggaggaaccggggugguacagcuuuggauucgaaauaaaagauaagaaaugcgacgucccuuguauugguaucgagauggugcacgauggcgggaaggaaacuuggcauucagcugccaccgcaaucuauugcuugaugggaaguggccagcuacugugggacacagugaccggugucgauauggcccucuga

SEQ ID NO: 156659 - RNA, 1401 nt, Artificial Sequence
  derived and/or modified CDS sequence (opt3) from neuraminidase__InfluenzaB__ABL76390
augcugcccagcaccauccagacacucacucuuuuccugacguccggcgggguguuguuaucucuguacgucucagccagucuaagcuaucuccuguacuccgacauucuucugaaguuuucuccuaccgagauaacagcuccaacuaugccguuggauugcgcaaacgccucgaauguucaagcggugaacagaucaagcaccaaaggaguaacauuccuccugcccgaaccugaguggaccuauccaaggcugaguugucccgguuccacuuuucagaaggcucucuuaaucucuccucaccgguucggcgaaacaaaagggaauagcgccccacugauuauccgcgagcccuuuauugcaugcggaccuaaggaauguaaacauuucgcccuuacccacuacgcugcacagccaggcgguuauuacaacgggacgcgagaggaccguaauaaguugagacaucugaucuccgugaagcuaggaaaaauaccgacugucgagaacucaaucuuucacauggccgcuuggaguggcagcgccugccaugauggcaaggaauggaccuauauugggguggacggacccgauucuaaugcgcuccugaaaaucaaguacggugaggcauacacagacacuuaucacuccuacgccaacaauauucuuaggacccaggaaucagcuuguaacugcaucggcgggaauuguuaucugaugauaacagauggaagcgccaguggcauuucugagugccgguucuugaaaauccgcgaggguagaauuaucaaggaaaucuuuccuaccgggaggguuaagcacacggaggaauguacuugcggauucgcauccaacaaaacaauugagugugcuugccgggacaauagcuacaccgccaagcgcccauuugugaaacucaacgucgaaacugauacagcggagauacgacugaugugcaccgagacguauuuagacacccccagaccugaugacggcucgaucacaggcucuugugaauccgauggggacaagggaucagguggcauuaaagggggauucgugcaucaaaggauggccaguaagaucggccggugguacagccguacuauguccaaaaccaagcgcauggguauggggcuguauguaagauacgacggcgauccauggacagacucuagcgcacucgcucuuucaggaguuauggugaguauggaggaacccggcugguacuccuuuggguucgagauaaaggauaaaaagugcgacgucccguguauuggaaucgaaauggugcacgaugguggcaaagagacuuggcauagcgccgcuaccgccaucuauugccugauggggucuggacaguugcuaugggacacagugaccggcgucgauauggcacuguga

SEQ ID NO: 156660 - RNA, 1401 nt, Artificial Sequence
  derived and/or modified CDS sequence (opt3) from neuraminidase__InfluenzaB__ABL76412
augcugcccagcaccauccagacacucacucuuuuccugacguccggcgggguguuguuaucucuguacgucucagccagucuaagcuaucuccuguacuccgacauucuucugaaguuuucuccuaccgagauaacagcuccaacuaugccguuggauugcgcaaacgccucgaauguucaagcggugaacagaucagcuaccaaaggaguaacacuccugauccccgaaccugaguggaccuauccaaggcugagcugucccgguaguacuuuccagaaggcccucuuaauuuccccucaccgguuuggcgaaacaaaaggaaauucugcaccacugaucauucgcgagcccuucaucgccugcgggccuaaggaauguaaacauuuugcucuuacccacuacacggcacagccaggcgguuauuacaacgggacucgaggagaccguaauaaguugagacaucugauaagcgugaagcuaggcaaaaucccgaccgucgagaacuccauuuuccacauggccgcuuggucaggcagugccugccaugaugggaaggaguggacauauaucggaguggacggucccgauagcaaugcgcuccugaaaauuaaguacggcgaagcauacacugacaccuaucacucuuacgccaacaauauccuuaggacacaggaguccgcuuguaacugcauagggggaaauuguuaucugaugauuaccgauggcucagccagcgguaucagugaaugccgguuuuugaaaauucgcgaggggagaaucaucaaggagauuuucccuacgggaaggguuaagcacacugaagaguguacaugcggcuuugcaucuaacaaaaccauagaaugugcuugccgggacaauuccuacacugccaagcgcccauucgugaaacucaacgucgagacagauaccgcggaaauccgacugaugugcacggagaccuauuuagacacacccagaccugaugacggcagcauuacugggccaugugagucgaauggagauaaggguucuggcgggaucaaaggaggcuuugugcaucaaaggauggccuccaagauaggucggugguacucacguaccaugaguaaaacaaagcgcauggggaugggccuguauguaaaguacgacggagaccccuggacugauagcgacgcacucgcucuuuccggcguuauggugucuauggaggaaccggggugguacagcuucggauuugaaauuaaagauaagaaaugcgacgucccuuguaucgguaucgagauggugcacgauggcgggaaggaaaccuggcauucagccgcuacagccauuuauugccugaugggaaguggccaguugcuaugggacaccgugacuggugucgauauggcacuguga

SEQ ID NO: 156661 - RNA, 1401 nt, Artificial Sequence
  derived and/or modified CDS sequence (opt3) from neuraminidase__InfluenzaB__ABL76423
augcugcccagcaccauccagacacucacucuuuuccugacguccggcgggguguuguuaucucuguacgucucagccagucuaagcuaucuccuguacuccgacauucuucugaaguuuucuccuaccgagauaacagcuccaacuaugccguuggauugcgcaaacgccucgaauguucaagcggugaaccacucagcuaccaaaggaguaacacuccugcugcccgaaccugaguggaccuauccaagacucagcugucccgguaguacuuuccagaaggccuuacugaucuccccucauagguuuggcgaaacaaaaggaaauucugcaccacuuauuauccgggagcccuucauugccugcgggccuaaggaauguaaacacuuugcuuugacccauuacgcagcccagccaggcgguuauuacaacgggacgcgcggagaccgaaauaagcugcgucaccuaaucagcgugaagcucggcaaaauaccgacugucgagaacuccaucuuccauauggcugccuggucaggcagugcgugccacgaugggaaggaguggaccuauauuggaguggacggucccgauagcaaugcacugcuuaaaaucaaguacggcgaagccuacacagacacuuaucacucuuacgcuaacaauauucugagaacccaggaguccgccuguaacugcaucgggggaaauuguuauuugaugauaacagauggcucagcaagcgguauuagugaaugcagguuucucaaaauccgggaggggcgcauuaucaaggagaucuucccuaccggaagaguuaagcauacggaagaguguacuugcggcuuugcuucuaacaaaacaauugaaugugccugcagggacaauuccuacaccgcgaagcggccauucgugaaacugaacgucgagacugauacagccgaaauacgcuuaaugugcaccgagacguaucuggacacaccccgaccugaugacggcagcaucaccgggccaugugagucgaauggagauaaggguucuggcgggauuaaaggaggcuuugugcaccaaagaauggcauccaagaucgguaggugguacucacggacuaugaguaaaaccaagcguauggggaugggccucuauguaaaguacgacggagaccccuggacagauagcgacgcucuugccuucuccggcguuauggugucuauggaggaaccggggugguacagcuuuggauucgaaauaaaagauaagaaaugcgacgucccuuguauugguaucgagauggugcaugauggcgggaaggaaacuuggcacucagcugccaccgcaaucuauugccugaugggaaguggccaguugcuaugggacacagugaccggugucgauauggcccuguga

SEQ ID NO: 156662 - RNA, 1401 nt, Artificial Sequence
  derived and/or modified CDS sequence (opt3) from neuraminidase__InfluenzaB__ABL76434
augcugcccagcaccauccagacacucacucuuuuccugacguccggcgggguguuguuaucucuguacgucucagccagucuaagcuaucuccuguacuccgacauucuucugaaguuuucuccuaccgagauaacagcuccaacuaugccguuggauugcgcaaacgccucgaauguucaagcggugaacagaucagcuaccaaaggaguaacacuccugcugcccgaaccugaguggaccuauccaaggcucagcugucccgguaguacuuuccagaaggccuuacugaucuccccucaccgguuuggcgaaacaaaaggaaauucugcaccacuuauuauccgcgagcccuucauugccugcgggccuaaggaauguaaacauuuugcuuugacccacuacgcagcccagccaggcgguuauuacaacgggacgcgaggagaccguaauaagcugagacaucuaaucagcgugaagcucggcaaaauaccgacugucgagaacuccaucuuccacauggcugccuggucaggcagugcgugccaugaugggaaggaguggaccuauauuggaguggacggucccgauaauaacgcacugcuuaaaaucaaguacggcgaagccuacacagacacuuaucacagcuacgcuaauaacauucugaggacccaggagucugccuguaauugcaucgggggaaacuguuauuugaugauaacagauggcuccgcaucagguauuagcgaaugccgguuucucaaaauccgcgaggggagaauuaucaaggagaucuucccuaccggaaggguuaagcacacggaagaguguacuugcggcuuugcuaguaauaaaacaauugaaugugccugccgggacaacucuuacaccgcgaagcgcccauucgugaaacugaaugucgagacugauacagccgaaauacgauuaaugugcaccgagacguaucuggacacccccagaccugaugacggcuccaucacagggccaugugagagcaacggagauaaggguucgggcgggauuaaaggaggcuuugugcaucaaaggauggcaucuaagaucggucggugguacucccguacuaugucaaaaaccaagcgcauggggaugggccucuauguaaaguacgacggagaccccugggcugauagugacgcccuugcucugagcggcguuaugguguccauggaggaaccggggugguacucuuucggauuugaaauaagagauaaaaagugcgacgucccuuguauugguaucgagauggugcacgauggcgggaaagaaacauggcauagcgccgcaacugccaucuauugcuugaugggaucaggccagcuacugugggacaccgugacaggugucgauauggcucucuga

SEQ ID NO: 156663 - RNA, 1401 nt, Artificial Sequence
  derived and/or modified CDS sequence (opt3) from neuraminidase__InfluenzaB__ABL76456
augcugcccagcaccauccagacacucacucuuuuccugacguccggcgggguguuguuaucucuguacgucucagccagucuaagcuaucuccuguacuccgacauucuucugaaguuuucuccuaccgagauaacagcuccaacuaugccguuggauugcgcaaacgccucgaauguucaagcggugaacagaucagcuaccaaaggaguaaagcuccugcugcccgaaccugaguggacauauccaaggcucagcugucccgguaguaccuuccagaaagccuuacugaucuccccucaccgguuuggcgaaacuaagggaaauucugcaccacuuauuauccgcgagcccuucauugccugcgggccuaaagaauguaagcauuuugcuuugacacacuacgcagcccagccaggcgguuauuacaacgggacccgaggagaccguaauaagcugagacaucuaaucagcgugaaacucggcaagauaccgacggucgagaacuccaucuuccacauggcugccuggucaggcagugcgugccaugaugggaaagaguggacuuauauuggaguggacggucccgauaauaacgcacugcuuaagaucaaauacggcgaagccuacaccgacacauaucacagcuacgcuaauaacauucugaggacucaggagucugccuguaauugcaucgggggaaacuguuauuugaugauaaccgauggcuccgcaucagguguuagcgaaugccgguuucucaagauucgcgaggggagaaucauuaaggagaucuucccuacaggaagggugaaacacaccgaagaguguacgugcggcuuugcuaguaauaagacuaucgaaugugccugccgggacaacucuuacacagcgaaacgcccauucgucaagcugaauguggagaccgauacugccgaaauucgauuaaugugcacagagaccuaucuggacacgcccagaccugaugacggcuccauaaccgggccaugugagagcaacggagauaaagguucgggcgggaucaagggaggcuuuguacaucaaaggauggcaucuaaaauuggucggugguacucccguacaaugucaaagacuaagcgcauggggaugggccucuauguuaaauacgacggagaccccugggcugauagugacgcccuugcucugagcggcgugauggucuccauggaggaaccggggugguacucuuucggauuugaaaucaaggauaaaaagugcgacgugccuuguauagguauugagauggugcacgauggcgggaaagaaaccuggcauagcgccgcaacagccaucuauugcuugaugggaucaggccagcuacugugggacacugucaccgguguugauauggcucucuga

SEQ ID NO: 156664 - RNA, 1401 nt, Artificial Sequence
  derived and/or modified CDS sequence (opt3) from neuraminidase__InfluenzaB__ABL76467
augcugcccagcaccauccagacacucacucuuuuccugacguccggcgggguguuguuaucucuguacgucucagccagucuaagcuaucuccuguacuccgacauucuucugaaguuuucuccuaccgagauaacagcuccaacuaugccguuggauugcgcaaacgccucgaauguucaagcggugaacagaucagcuaccaaaggaguaacacuccugcugcccgaaccugaguggaccuauccaaggcucagcugucccgguaguacuuuccagaaggccuuacugaucuccccucaccgguuuggcgaaacaaaaggaaauucugcaccacuuauuauccgcgagcccuucauugccugcgggccuaaggaauguaaacauuuugcuuugacccacuacgcagcccagccaggcgguuauuacaacgggacgcgaggagaccguaauaagcugagacaucuaaucagcgugaagcucggcaaaauaccgacugucgagaacuccaucuuccacauggcugccuggucaggcagugcgugccaugaugggaaggaguggaccuauauuggaguggacggucccgauaauaacgcacugcuuaaaaucaaguacggcgaagccuacacagacacuuaucacagcuacgcuaauaacauucugaggacccaggagucugccuguaauugcaucgggggaaacuguuauuugaugauaacagauggcuccgcaucagguauuagcgaaugccgguuucucaaaauccgcgaggggagaauuaucaaggagaucuucccuaccggaaggguuaagcacacggaagaguguacuugcggcuuugcuaguaauaaaacaauugaaugugccugccgggacaacucuuacaccgcgaagcgcccauucgugaaacugaaugucgagacugauacagccgaaauacgauuaaugugcaccgagacguaucuggacacccccagaccugaugacggcuccaucacagggccaugugagagcaacggagauaaggguucgggcgggauuaaaggaggcuuugugcaucaaaggauggcaucuaagaucggucggugguacucccguacuaugucaaaaaccaagcgcauggggaugggccucuauguaaaguacgacggagaccccugggcugauagugacgcccuugcucugagcggcguuaugguguccauggaggaaccggggugguacucuuucggauuugaaauaaaagauaagaaaugcgacgucccuuguauugguaucgagauggugcacgauggcgggaaggaaacauggcauagcgccgcaacugccaucuauugcuugaugggaucaggccagcuacugugggacaccgugacaggugucgauauggcucucuga

SEQ ID NO: 156665 - RNA, 1401 nt, Artificial Sequence
  derived and/or modified CDS sequence (opt3) from neuraminidase__InfluenzaB__ABL76478
augcugcccagcaccauccagacacucacucuuuuccugacguccggcgggguguuguuaucucuguacgucucagccagucuaagcuaucuccuguacuccgacauucuucugaaguuuucuccuaccgagauaacagcuccaacuaugccguuggauugcgcaaacgccucgaauguucaagcggugaacagaucagcuaccaaaggaguaaagcuccugcugcccgaaccugaguggacauauccaaggcucagcugucccgguaguaccuuccagaaagccuuacugaucuccccucaccgguuuggcgaaacuaagggaaauucugcaccacuuauuauccgcgagcccuucauugccugcgggccuaaagaauguaagcauuuugcuuugacacacuacgcagcccagccaggcgguuauuacaacgggacccgaggagaccguaauaagcugagacaucuaaucagcgugaaacucggcaagauaccgacggucgagaacuccaucuuccacauggcugccuggucaggcagugcgugccaugaugggaaagaguggacuuauauuggaguggacggucccgauaauaacgcacugcuuaagaucaaauacggcgaagccuacaccgacacauaucacagcuacgcuaauaacauucugaggacucaggagucugccuguaauugcaucgggggaaacuguuauuugaugauaaccgauggcuccgcaucagguguuagcgaaugccgguuucucaagauucgcgaggggagaaucauuaaggagaucuucccuacaggaagggugaaacacaccgaagaguguacgugcggcuuugcuaguaauaagacuaucgaaugugccugccgggacaacucuuacacagcgaaacgcccauucgucaagcugaauguggagaccgauacugccgaaauucgauuaaugugcacaaaaaccuaucuggacacgcccagaccugaugacggcuccauaaccgggccaugugagagcaacggagauaaggguucgggcgggaucaaaggaggcuuuguacaucaaaggauggcaucuaagauuggucggugguacucccguacaaugucaaagacuaaacgcauggggaugggccucuauguuaaguacgacggagaccccugggcugauagugacgcccuugcucugagcggcgugauggucuccauggaggaaccggggugguacucuuucggauuugagaucaaagauaagaaaugcgacgugccuuguauagguauugaaauggugcacgauggcgggaaggagaccuggcauagcgccgcaacagccaucuauugcuugaugggaucaggccagcuacugugggacacugucaccgguguugauauggcucucuga

SEQ ID NO: 156666 - RNA, 1401 nt, Artificial Sequence
  derived and/or modified CDS sequence (opt3) from neuraminidase__InfluenzaB__ABL76522
augcugcccagcaccauccagacacucacucuuuuccugacguccggcgggguguuguuaucucuguacgucucagccagucuaagcuaucuccuguacuccgacauucuucugaaguuuucuccuaccgagauaacagcuccaacuaugccguuggauugcgcaaacgccucgaauguucaagcggugaacagaucagcuaccaaaggaguaacacuccugcugcccgaaccugaguggaccuauccaaggcucagcugucccgguaguacuuuccagaaggccuuacugaucuccccucaccgguuuggcgaaacaaaaggaaauucugcaccacuuauuauccgcgagcccuucauugccugcgggccuaacgaauguaagcauuuugcuuugacccacuacgcagcccagccaggcgguuauuacaaugggacgcgaggagaccguaacaaacugagacaucuaaucagcgugaagcucggcaagauaccgacugucgaaaauuccaucuuccacauggcugccuggucaggcagugcgugccaugaugggaaagaguggaccuauauuggaguggacggucccgauaacaaugcacugcuuaagaucaaauacggcgaggccuacacagacacuuaucacagcuacgcuaacaauauucugaggacccaggagucugccuguaacugcaucgggggaaauuguuauuugaugauaacagauggcuccgcaucagguguuagcgaaugccgguuucucaagauucgcgaggggagaaucauuaaagagaucuucccuaccggaagggugaagcacacggaagaguguacuugcggcuuugcuaguaacaagacaaucgaaugugccugccgggacaauucuuacaccgcgaaacgcccauucgucaagcugaacguggagacugauacagccgaaauucgauuaaugugcaccgagacguaucuggacacccccagaccugaugacggcuccauaacagggccaugugagagcaacggagauaaagguucgggcgggaucaagggaggcuuuguacaucaaaggauggcaucuaaaauuggucggugguacucccguacuaugucaaagaccgaacgcauggggaugggccucuauguuaaauacgacggagaccccugggcugauagugacgcccuugcucugagcggcgugauggucuccauggaggaaccggggugguacucuuucggauuugagaucaaggauaagaaaugcgacgugccuuguauagguauugaaauggugcacgauggcgggaaggagacauggcauagcgccgcaacugccaucuauugcuugaugggaucaggccagcuacugugggacaccgucacagguguugauauggcucucuga

SEQ ID NO: 156667 - RNA, 1401 nt, Artificial Sequence
  derived and/or modified CDS sequence (opt3) from neuraminidase__InfluenzaB__ABL76533
augcugcccagcaccauccagacacucacucuuuuccugacguccggcgggguguuguuaucucuguacgucucagccagucuaagcuaucuccuguacuccgacauucuucugaaguuuucuccuaccgagauaacagcuccaacuaugccguuggauugcgcaaacgccucgaauguucaagcggugaacagaucagcuaccaaaggaguaacacuccugcugcccgaaccugaguggaccuauccaaggcucagcugucccgguaguacuuuccagaaggccuuacugaucuccccucaccgguuuggcgaaacaaaaggaaauucugcaccacuuauuauccgcgagcccuucauugccugcgggccuaacgaauguaagcauuuugcuuugacccacuacgcagcccagccaggcgguuauuacaaugggaaacgaggagaccguaacaagcugagacaucuaaucagcgugaagcucggcaaaauaccgacggucgaaaauuccaucuuccacauggcugccuggucaggcagugcgugccaugaugggaaggaguggacuuauauuggaguggacggucccgauaacaaugcacugcuuaaaaucaaguacggcgaggccuacaccgacacauaucacagcuacgcuaacaauauucugaggacucaggagucugccuguaacugcaucgggggaaauuguuauuugaugauaaccgauggcuccgcaucagguguuagcgaaugccgguuucucaaaauucgcgaggggagaaucauuaaggagaucuucccuacaggaagggugaagcacaccgaagaguguacgugcggcuuugcuaguaacaaaacuaucgaaugugccugccgggacaauucuuacacagcgaagcgcccauucgucaaacugaacguggagaccgauacugccgaaauucgauuaaugugcacagagaccuaucuggacacgcccagaccugaugacggcuccauaaccgggccaugugagagcaacggagauaaggguucgggcgggaucaaaggaggcuuuguacaucaaaggauggcaucuaagauuggucggugguacucccguacaaugucaaaaacugaacgcauggggaugggccucuauguuaaguacgacggagaccccugggcugauagugacgcccuugcucugagcggcgugauggucuccauggaggaaccggggugguacucuuucggauuugagaucaaggauaaaaagugcgacgugccuuguauagguauugaaauggugcacgauggcgggaaagagaccuggcauagcgccgcaacagccaucuauugcuugaugggaucaggccagcuacugugggacacugucaccgguguugauauggcucucuga

SEQ ID NO: 156668 - RNA, 1401 nt, Artificial Sequence
  derived and/or modified CDS sequence (opt3) from neuraminidase__InfluenzaB__ABL76544
augcugcccagcaccauccagacacucacucuuuuccugacguccggcgggguguuguuaucucuguacgucucagccagucuaagcuaucuccuguacuccgacauucuucugaaguuuucuccuaccgagauaacagcuccaacuaugccguuggauugcgcaaacgccucgaauguucaagcggugaacagaucagcuaccaaaggaguaacacuccugcugcccgaaccugaguggaccuauccaaggcucagcugucccgguaguacuuuccagaaggccuuacugaucuccccucaccgguuuggcgaaacaaaaggaaauucugcaccacuuauuauccgcgagcccuucauugccugcgggccuaacgaauguaagcauuuugcuuugacccacuacgcagcccagccaggcgguuauuacaaugggacgcgaggagagcguaacaaacugagacaucuaaucagcgugaagcucggcaagauaccgacugucgaaaauuccaucuuccacauggcugccuggucaggcagugcgugccaugacgggaaagaauggaccuauauuggaguggauggucccgacaacaaugcacugcuuaagaucaaauacggcgaggccuacacagauacuuaucacagcuacgcuaacaauauucugaggacccaggaaucugccuguaacugcaucgggggaaauuguuauuugaugauaacagacggcuccgcaucagguguuagcgagugccgguuucucaagauucgcgaggggagaaucauuaaagaaaucuucccuaccggaagggugaagcacacggaggaauguacuugcggcuuugcuaguaacaagacaaucgagugugccugccgggauaauucuuacaccgcgaaacgcccauucgucaagcugaacguggaaacugacacagccgagauucgauuaaugugcaccgagacguaucuggauacccccagaccugacgauggcuccauaacagggccaugugaaagcaacggagacaaagguucgggcgggaucaagggaggcuuuguacaucaaaggauggcaucuaaaauuggucggugguacucccguacuaugucaaagaccgagcgcauggggaugggccucuauguuaaauacgauggagaccccugggcugacagugaugcccuugcucugagcggcgugauggucuccauggaggagccggggugguacucuuucggauuugaaaucaaggacaagaaaugcgaugugccuuguauagguauugagauggugcacgacggcgggaaggagacauggcauagcgccgcaacugccaucuauugcuugaugggaucaggccagcuacugugggauaccgucacagguguugacauggcucucuga

SEQ ID NO: 156669 - RNA, 1401 nt, Artificial Sequence; identical to SEQ ID NO: 156667
  derived and/or modified CDS sequence (opt3) from neuraminidase__InfluenzaB__ABL76566

SEQ ID NO: 156670 - RNA, 1401 nt, Artificial Sequence
  derived and/or modified CDS sequence (opt3) from neuraminidase__InfluenzaB__ABL76588
augcugcccagcaccauccagacacucacucuuuuccugacguccggcgggguguuguuaucucuguacgucucagccagucuaagcuaucuccuguacuccgacauucuucugaaguuuucuccuaccgagauaacagcuccaacuaugccguuggauuaugcaaacgccucgaauguucaagcggugaacagaucagcuaccaaaggaguaacacuccugcugcccgaaccugaguggaccuacccaaggcucagcugccccgguaguacuuuccagaaggccuuacugaucuccccucaccgguuuggcgaaacaaaaggaaauucugcaccacuuauuauccgcgagcccuucauugccugugggccuaacgaaugcaagcauuuugcuuugacccacuaugcagcccagccaggcgguuacuauaaugggacgcgaggagaccguaacaaacugagacaucuaaucagcgugaagcucggcaagauaccgacugucgaaaauuccaucuuccacauggcugccuggucaggcagugcgugucaugaugggaaagaguggaccuacauuggaguggacggucccgauaacaaugcacugcuuaagaucaaauacggcgaggccuauacagacacuuaccacagcuaugcuaacaauauucugaggacccaggagucugccugcaacuguaucgggggaaauugcuacuugaugauaacagauggcuccgcaucagguguuagcgaaugucgguuucucaagauucgcgaggggagaaucauuaaagagaucuucccuaccggaagggugaagcacacggaagagugcacuuguggcuuugcuaguaacaagacaaucgaaugcgccugucgggacaauucuuauaccgcgaaacgcccauucgucaagcugaacguggagacugauacagccgaaauucgauuaaugugcaccgagacguaccuggacacccccagaccugaugacggcuccauaacagggccaugcgagagcaacggagauaaagguucgggcgggaucaagggaggcuuuguacaucaaaggauggcaucuaaaauuggucggugguauucccguacuaugucaaagaccgaacgcauggggaugggccucuacguuaaauacgacggagaccccugggcugauagugacgcccuugcucugagcggcgugauggucuccauggaggaaccggggugguauucuuucggauuugagaucaaggauaagaaaugugacgugccuugcauagguauugaaauggugcacgauggcgggaaggagacauggcauagcgccgcaacugccaucuacuguuugaugggaucaggccagcuacugugggacaccgucacagguguugauauggcucucuga

SEQ ID NO: 156671 - RNA, 1401 nt, Artificial Sequence; identical to SEQ ID NO: 156666
  derived and/or modified CDS sequence (opt3) from neuraminidase__InfluenzaB__ABL76599

SEQ ID NO: 156672 - RNA, 1401 nt, Artificial Sequence; identical to SEQ ID NO: 156666
  derived and/or modified CDS sequence (opt3) from neuraminidase__InfluenzaB__ABL76610

SEQ ID NO: 156673 - RNA, 1401 nt, Artificial Sequence
  derived and/or modified CDS sequence (opt3) from neuraminidase__InfluenzaB__ABL76621
augcugcccagcaccauccagacacucacucuuuuccugacguccggcgggguguuguuaucucuguacgucucagccagucuaagcuaucuccuguacuccgacauucuucugaaguuuucuccuaccgagauaacagcuccaacuaugccguuggauugcgcaaacgccucgaauguucaagcggugaacagaucagcuaccaaaggaguaacacuccugcugcccgaaccugaguggaccuauccaaggcucagcugucccgguaguacuuuccagaaggccuuacugaucuccccucaccgguuuggcgaaacaaaaggaaauucugcaccacuuauuauccgcgagcccuucauugccugcgggccuaaggaauguaaacauuuugcuuugacccacuacgcagcccagccaggcgguuauuacaacgggacgcgaggagaccguaauaagcugagacaucuaaucagcgugaagcucggcaaaauaccgacugucgagaacuccaucuuccacauggcugccuggucaggcagugcgugccaugaugggaaggaguggaccuauauuggaguggacggucccgauaauaacgcacugcuuaaaaucaaguacggcgaagccuacacagacacuuaucacagcuacgcuaauaacauucugaggacccaggagucugccuguaauugcaucgggggaaacuguuauuugaugauaacagauggcuccgcaucagguguuagcgaaugccgguuucucaaaauucgcgaggggagaaucauuaaggagaucuucccuaccggaagggugaagcacacggaagaguguacuugcggcuuugcuaguaauaaaacaaucgaaugugccugccgggacaacucuuacaccgcgaagcgcccauucgucaaacugaauguggagacugauacagccgaaauucgauuaaugugcaccgagacguaucuggacacccccagaccugaugacggcuccauaacagggccaugugagagcaacggagaaaaggguucgggcgggaucaaaggaggcuuuguacaucaaaggauggcaucuaagauuggucggugguacucccguacuaugucaaaaaccaagcgcauggggaugggccucuauguuaaguacgauggagaccccugggcugacagugaugcccuugcucugagcggcgugauggucuccauggaggaaccggggugguacucuuucggauuugagaucaaagacaagaaaugcgauauaccuuguauugguaucgaaauggugcacgacggcgggaaggagacauggcauagcgccgcaacugccaucuauugcuugaugggaucaggccagcuacugugggauaccgugacaggugucgacauggcucucuga

SEQ ID NO: 156674 - RNA, 1401 nt, Artificial Sequence
  derived and/or modified CDS sequence (opt3) from neuraminidase__InfluenzaB__ABL76632
augcugcccagcaccauccagacacucacucuuuuccugacguccggcgggguguuguuaucucuguacgucucagccagucuaagcuaucuccuguacuccgacauucuucugaaguuuucucaaaccgagauaacagcuccuaucaugccauuggauugcgcaaacgccucgaauguucaggcggugaacagaucagcuacuaaaggaguaacccuccugcugccggaacccgaguggacauauccuaggcucagcuguccagguaguaccuuccagaaggccuuacugauuucuccccaccgguuuggcgaaacuaaaggaaauuccgcaccucuuaucauucgcgagccauucaucgccugcgggcccacagaauguaagcauuuugcuuugacccacuacgcagcccagccuggcgguuauuacaacgggacgcgagaggaccguaauaaaaugagacaucugauaagcgugaagcuaggaaagaucccaacugucgagaacuccauuuuccacauggcugccuggucaggcagugcgugccaugauggcaaagaauggaccuauaucgggguggacggaccggauagcaaugcacuccugaagauuaaauacggugaggccuacacagacacuuaucacucuuacgcuaagaacauccuuaggacccaagaauccgccuguaauugcauaggcggggauuguuaucugaugauuacagacggacccgcaucaggcaucagcgagugccgguuuuugaaaauucgcgaggguagaaucaucaaggaaauuuucccuaccgggaggguuaagcacacggaggaauguacuugcggauuugcuaguaacaaaacaauagagugugccugccgggauaauucuuacaccgcgaagcgcccauucgugaaacucaacgucgaaacugacacagccgagauccgacugaugugcaccgagacguauuuagauacccccagaccuaaugacggcuccauuacaggcccaugugaaagcgauggggacaagggaucggguggcaucaaagggggauuugugcaucagaggauggcaucuaagauaggccggugguacucccguacuaugucaaaaaccaagcgcauggguauggggcuguauguaaaguacgacggcgaucccuggacagacagugaggcucucgcccuuagcggaguuaugguguccauggaggaaccgggcugguacucuuucggguuugaaauuaaagauaagaaaugcgacgucccuuguaucggaaucgagauggugcacgaugguggcaagacuaccuggcauagcgcugccacagcaguguauugccugauggggucaggacaguugcuaugggacaccgucacuggcguugauauggcccuguga

SEQ ID NO: 156675 - RNA, 1401 nt, Artificial Sequence
  derived and/or modified CDS sequence (opt3) from neuraminidase__InfluenzaB__ABL76643
augcugcccagcaccauccagacacucacucuuuuccugacguccggcgggguguuguuaucucuguacgucucagccagucuaagcuaucuccuguacuccgacauucuucugaaguuuucucaaaccgagauaacagcuccuaucaugccauuggauugcgcaaacgccucgaauguucaggcggugaacagaucagcuacuaaaggaguaacccuccugcugccggaacccgaguggacauauccuaggcucagcuguccagguaguaccuuccagaaggccuuacugauuucuccccaccgguuuggcgaaacuaaaggaaauuccgcaccucuuaucauucgcgagccauucaucgccugcgggcccacagaauguaagcauuuugcuuugacccacuacgcagcccagccuggcgguuauuacaacgggacgcgagaggaccguaauaaacugagacaucuaauaagcgugaagcucggaaagaucccaacugucgagaacuccauuuuccacauggcugccuggucaggcagugcgugccaugauggcaaagaauggaccuauaucgggguggacggaccggauagcaaugcacugcuuaagauuaaauacggugaggccuacacagacacuuaucacucuuacgcuaagaacauccugaggacccaagaauccgccuguaauugcauaggcggggauuguuauuugaugauuacagacggacccgcaucaggcaucagcgagugccgguuucucaaaauucgcgaggguagaaucaucaaggaaauuuucccuaccgggaggguuaagcacacggaggaauguacuugcggauuugcuaguaacaaaacaauagagugugccugccgggauaauucuuacaccgcgaagcgcccauucgugaaacugaacgucgaaacugacacagccgagauccgauuaaugugcaccgagacguaucuggauacccccagaccuaaugacggcuccauuacaggcccaugugaaagcgauggggacaagggaucggguggcaucaaagggggauuugugcaucagaggauggcaucuaagauaggccggugguacucccguacuaugucaaaaaccaagcgcauggguauggggcucuauguaaaguacgacggcgaucccuggacagacagugaggcucuugcccugagcggaguuaugguguccauggaggaaccgggcugguacucuuucggguuugaaauuaaagauaagaaaugcgacgucccuuguaucggaaucgagauggugcacgaugguggcaagacuaccuggcauagcgcugccacagcaauuuauugcuugauggggucaggacagcuacugugggacaccgugacuggcgucgauauggcccucuga

SEQ ID NO: 156676 - RNA, 1401 nt, Artificial Sequence
  derived and/or modified CDS sequence (opt3) from neuraminidase__InfluenzaB__ABL76654
augcugcccagcaccauccagacacucacucuuuuccugacguccggcgggguguuguuaucucuguacgucucagccagucuaagcuaucuccuguacuccgacauucuucugaaguuuucucaaaccgagauaacagcuccuaucaugccauuggauugcgcaaacgccucgaauguucaggcggugaacagaucaacuaccaaaggaguaacacuccugcugccggaacccgaguggaccuauccuaggcucagcuguccagguaguacuuuccagaaggcuuuacugauuucuccccaccgguuuggcgaaacaaaaggaaauuccgccccucuuaucauucgcgagccauucaucgcaugcgggcccaccgaauguaagcauuuugccuugacgcacuacgcugcacagccuggcgguuauuacaacgggacucgagaggaccguaauaaacugagacaucuaauaagcgugaagcucggaaagaucccaaccgucgagaacuccauuuuccacauggccgcuuggucaggcagugccugccaugauggcaaagaauggacauauaucgggguggacggaccggauagcaaugcgcugcuuaagauuaaauacggugaggcauacacugacaccuaucacucuuacgccaagaacauccugaggacacaagaauccgcuuguaauugcauaggcggggauuguuauuugaugauuaccgacggacccgccucaggcaucagcgagugccgguuucucaaaauucgcgaggguagaaucaucaaggaaauuuucccuacggggaggguuaagcacacugaggaauguacaugcggauuugcaaguaacaaaaccauagagugugcuugccgggauaauucuuacacugccaagcgcccauucgugaaacugaacgucgaaacagacaccgcggagauccgauuaaugugcacggagaccuaucuggauacacccagaccuaaugacggcuccauuacuggcccaugugaaagcgauggggacaagggaucggguggcaucaaagggggauuugugcaucagaggauggccucuaagauaggccggugguacucccguaccaugucaaaaacaaagcgcauggguauggggcucuauguaaaguacgacggcgaucccuggacugacagugaggcacuugcucugagcggaguuaugguguccauggaggaaccgggcugguacucuuucggguuugaaauuaaagauaagaaaugcgacgucccuuguaucggaaucgagauggugcacgaugguggcaagaccacauggcauagcgccgcuaccgccauuuauugcuugauggggucaggacagcuacugugggacacugugacgggcgucgauauggcacucuga

SEQ ID NO: 156677 - RNA, 1401 nt, Artificial Sequence
  derived and/or modified CDS sequence (opt3) from neuraminidase__InfluenzaB__ABL76665
augcugcccagcaccauccagacacucacucuuuuccugacguccggcgggguguuguuaucucuguacgucucagccagucuaagcuaucuccuguacuccgacauucuucugaaguuuucucaaaccgagauaacagcuccuaucaugccauuggauugcgcaaacgccucgaauguucaggcggugaacagaucagcuacuaaaggaguaacccuccugcugccggaacccgaguggacauauccuaggcucagcuguccagguaguaccuuccagaaggccuuacugauuucuccccaccgguuuggcgaaacuaaaggaaauuccgcaccucuuaucauucgcgagccauucaucgccugcgggcccacagaauguaagcauuuugcuuugacccacuacgcagcccagccuggcgguuauuacaacgggacgcgagaggaccguaauaaacugagacaucuaauaagcgugaagcucggaaagaucccaacugucgagaacuccauuuuccacauggcugccuggucaggcagugcgugccaugauggcaaagaauggaccuauaucgggguggacggaccggauagcaaugcacugcuuaagauuaaauacggugaggccuacacagacacuuaucacucuuacgcuaagaacauccugaggacccaagaauccgccuguaauugcauaggcggggauuguuauuugaugauuacagacggacccgcaucaggcaucagcgagugccgguuucucaaaauucgcgaggguagaaucaucaaggaaauuuucccuaccgggaggguuaagcacacggaggaauguacuugcggauuugcuaguaacaaaacaauagagugugccugccgggauaauucuuacaccgcgaagcgcccauucgugaaacugaacgucgaaacugacacagccgagauccgauuaaugugcaccgagacguaucuggauacccccagaccuaaugacggcuccauuacaggcccaugugaauuugauggggacaagggaagcgguggcaucaaagggggauucgugcaucagaggauggcaucgaagauaggccggugguacucucguacuauguccaaaaccaagcgcauggguauggggcucuauguaaaguacgacggcgaucccuggacagacucagaggcucuugcccugaguggaguuauggugagcauggaggaaccgggcugguacuccuuuggguucgaaauuaaagauaagaaaugcgacgucccuuguaucggaaucgagauggugcacgaugguggcaagacuaccuggcauucugcugccacagcaauuuauugcuugauggggagcggacagcuacugugggacaccgugacuggcgucgauauggcccucuga

SEQ ID NO: 156678 - RNA, 1401 nt, Artificial Sequence
  derived and/or modified CDS sequence (opt3) from neuraminidase__InfluenzaB__ABL76676
augcugcccagcaccauccagacacucacucuuuuccugacguccggcgggguguuguuaucucuguacgucucagccagucuaagcuaucuccuguacuccgacauucuucugaaguuuucucaaaccggaauaacagcuccuaucaugccauuggauugcgcaaacgccucgaauguucaggcggugaacagaucagcuacuaaagguguaacccuccugcugccggagcccgaauggacauauccuaggcucagcuguccaggcaguaccuuccagaaggccuuacugauuucuccccaccgguuuggggagacuaaaggaaauuccgcaccucuuaucauucgcgaaccauucaucgccugcggccccaaggaguguaaacauuuugcuuugacacacuacgcagcccagccugguggguauuacaacggaacccgagaagaccguaauaagcugagacaucuaauaagcgugaagcucggcaaaaucccaacggucgagaacuccauuuuccacauggcugccuggucaggcagugcgugccaugaugggagggaguggacuuauaucggaguggacgguccggauagcaaugcacugcuuaagauuaaauacggcgaagccuacaccgacacauaucacucuuacgcuaagaacauccugcggacucaagaguccgccuguaauugcauagggggagauuguuauuugaugauuaccgacggccccgcaucagguaucagcgaaugccgcuuucucaaaauuagagaggggaggaucaucaaggagauuuucccuacaggacggguuaagcacaccgaagaguguacgugcggcuuugcuaguaacaaaacuauagaaugugccugccgcgauaauucuuacacagcgaagcgaccauucgugaaacugaacgucgagaccgacacugccgaaaucagauuaaugugcacagagaccuaucuggauacgcccaggccuaaugacggcuccauuaccgggccaugugagagcaacggagauaaggguucgggcgggaucaaaggaggcuuugugcaucagcggauggcaucuaagauaggucguugguacucccgcacaaugucaaaaacuaagagaauggggaugggccucuauguaaaguacgacggagaccccuggaccgauagugaagcucuugcccugagcggcguuaugguguccauggaggaaccggggugguacucuuucggauuugagauuaaagacaagaaaugcgaugucccuuguaucgguaucgaaauggugcacgacggcgggaagacaacuuggcauagcgcugccaccgcaauuuauugcuugaugggaucaggccagcuacugugggauacagugaccggugucgacauggcccucuga

SEQ ID NO: 156679 - RNA, 1401 nt, Artificial Sequence
  derived and/or modified CDS sequence (opt3) from neuraminidase__InfluenzaB__ABL76687
augcugcccagcaccauccagacacucacucuuuuccugacguccggcgggguguuguuaucucuguacgucucagccagucuaagcuaucuccuguacuccgacauucuucugaaguuuucucaaaccgagauaacagcuccuaucaugccauuggauugcgcaaacgccucgaauguucaggcggugaacagaucagcuacuaaaggaguaacccuccugcugccggaacccgaguggacauauccuaggcucagcuguccagguaguaccuuccagaaggccuuacugauuucuccccaccgguuuggcgaaacuaaaggaaauuccgcaccucuuaucauucgcgagccauucaucgccugcgggcccacagaauguaagcauuuugcuuugacccacuacgcagcccagccuggcgguuauuacaacgggacgcgagaggaccguaauaaacugagacaucuaauaagcgugaagcucggaaagaucccaacugucgagaacuccauuuuccacauggcugccuggucaggcagugcgugccaugauggcaaagaauggaccuauaucgggguggacggaccggauagcaaugcacugcuuaagauuaaauacggugaggccuacacagacacuuaucacucuuacgcuaagaacauccugaggacccaagaauccgccuguaauugcauaggcggggauuguuauuugaugauuacagacggacccgcaucaggcaucagcgagugccgguuucucaaaauucgcgaggguagaaucaucaaggaaauuuucccuaccgggaggguuaagcacacggaggaauguacuugcggauuugcuaguaacaaaacaauagagugugccugccgggauaauucuuacaccgcgaagcgcccauucgugaaacugaacgucgaaacugacacagccgagauccgauuaaugugcaccgagacguaucuggauacccccagaccuaaugacggcuccauuacaggcccaugugaauuugauggggacaagggaagcgguggcaucaaagggggauucgugcaucagaggauggcaucgaagauaggccggugguacucucguacuauguccaaaaccaagcgcauggguauggggcucuauguaaaguacgacggcgaucccuggacagacucagaggcucuugcccugaguggaguuauggugccgauggaggaaccuggcugguacagcuuuggguucgaaauuaaagauaagaaaugcgacguccccuguaucggaaucgagauggugcacgaugguggcaagacuaccuggcauuccgcugccacagcaauuuauugcuugauggggucuggacagcuacugugggacaccgugacuggcgucgauauggcccucuga

SEQ ID NO: 156680 - RNA, 1401 nt, Artificial Sequence
  derived and/or modified CDS sequence (opt3) from neuraminidase__InfluenzaB__ABL76698
augcugcccagcaccauccagacacucacucuuuuccugacguccggcgggguguuguuaucucuguacgucucagccagucuaagcuaucuccuguacuccgacauucuucugaaguuuucuccuaccgagauaacagcuccaacuaugccguuggauugcgcaaacgccucgaauguucaagcggugaacagaucagcuaccaaaggaaugacacuccugcugcccgaaccugaguggaccuauccaaggcucagcugucccgguaguacuuuccagaaggccuuacugaucuccccucaccgguuuggcgaaacacgcggaaauucugcaccacuuaccauucgagagcccuucaucgccugcgggccuaaagaauguaagcauuuugcuuugacgcacuacgcagcccagccaggcgguuauuacaacgggacucgugaggacagaaauaaacugaggcaucuaauuagcguaaagcucggaaagaucccgaccguggagaacuccauauuccacauggcugccuggucaggcagugcgugccaugauggccgggaauggacauauaucggggucgacggacccgauagcaaugcacugauuaaaaucaaguacggugaggccuacacugacaccuaucacucuuacgcuaacaauauucuucgcacacaggaauccgccuguaacugcaucggcggggauuguuaucugaugauaaccgacggaucagcaagcggcauuaguaaaugcagauuuuugaagaucagggagggucggauuaucaaagagaucuucccuacggggcgcguggaacacacugaggaauguacaugcggauuugcuucuaauaagaccauugagugugccugccgagauaacuccuacacugcgaagagaccauucguuaaacucaauguggaaacagacaccgccgagauaaggcugaugugcacggagaccuauuuagauacaccccggccugacgauggcagcaucacuggcccaugugaaucgaacggggacaagggacgugguggcauuaaagggggauuuguccaucaacgcauggcaucuaagaucggcagaugguacuccaggaccaugucaaaaacagagcggauggguauggaacuguaugugaaguacgacggggaucccuggacugacagugaggcucucgccccgagcggcguaaugguuuccauggaggaaccuggaugguacucuuucggcuuugagauaaaagauaagaagugcgacgugcccuguauugggaucgaaaugguccacgauggagguaaaaagaccuggcauagcgcugccacagcaaucuauugccuuaugggcucagggcagcuguugugggacaccgugacuggaguggauauggcccuauga

SEQ ID NO: 156681 - RNA, 1401 nt, Artificial Sequence
  derived and/or modified CDS sequence (opt3) from neuraminidase__InfluenzaB__ABL76720
augcugcccagcaccauccagacacucacucuuuuccugacguccggcgggguguuguuaucucuguacgucucagccagucuaagcuaucuccuguacuccgacauucuucugaaguuuucuccuaccgagauaacagcuccaacuaugccguuggauugcgcaaacgccucgaauguucaagcggugaacagaucagcuaccaaaggaguaacacuccugcugcccgaaccugaguggaccuauccaaggcucagcugucccgguaguacuuuccagaaggccuuacugaucuccccucaccgguuuggcgaaacaaaaggaaauucugcaccacuuauuauccgcgagcccuucauugccugcgggccuaacgaauguaagcauuuugcuuugacccacuacgcagcccagccaggcgguuauuacaaugggacgcgaggagaccguaacaaacugagacaucuaaucagcgugaagcucggcaagauaccgacugucgaaaauuccaucuuccacauggcugccuggucaggcagugcgugccaugaugggaaagaguggaccuauauuggaguggacggucccgauaacaaugcacugcuuaagaucaaauacggcgaggccuacacagacacuuaucacagcuacgcuaacaagauucugaggacccaggagucugccuguaauugcaucgggggaaacuguuauuugaugauaacagauggcuccgcaucagguguuagcgaaugccgguuucucaaaauucgcgaggggagaaucauuaaggagaucuucccuaccggaagggugaagcacacggaagaguguacuugcggcuuugcuaguaauaaaacaaucgaaugugccugccgggacaacucuuacaccgcgaagcgcccauucgucaaacugaauguggagacugauacagccgaaauucgauuaaugugcaccgacacguaucuggauacccccagaccugacgauggcuccauaacagggccaugugagagcaacggagacaaggguucgggcgggaucaaaggaggcuuuguacaucaaaggauggcaucuaagauuggucggugguacucccguacuaugucaaaaaccgagcgcauggggaugggccucuauguuaaguacgacggagaucccugggcugacagugaugcccuugcuuucagcggcgugauggucuccaugaaggaaccggggugguacucuuuuggauucgagaucaaagacaagaaaugcgaugugccuuguauagguauugaaauggugcacgacggcgggaaggagacauggagaagcgccgcaacugccaucuauugccugaugggaucaggccaguugcuaugggauaccgucacagguguugacauggcucuguga

SEQ ID NO: 156682 - RNA, 1401 nt, Artificial Sequence
  derived and/or modified CDS sequence (opt3) from neuraminidase__InfluenzaB__ABL76731
augcugcccagcaccauccagacacucacucuuuuccugacguccggcgggguguuguuaucucuguacgucucagccagucuaagcuaucuccuguacuccgacauucuucugaaguuuucuccuaccgagauaacagcuccaacuaugccguuggauugcgcaaacgccucgaauguucacgcggugaacagaucagcuaccaaaggaguaacacuccugcugcccgaaccugaguggaccuauccaaggcucagcugucccgguaguacuuuccaaaaggccuuacugaucuccccucaucgguuuggcgaaacaaaaggaaauucugcaccacuuauuauccgcgagcccuucauugccugcgggccuaacgaauguaagcacuuugcuaucacccauuacgcagcccagccaggcgguuauuacaaugggacgcgaggagaccguaacaaauugagacaccugauaagcgugaagcuaggcaagaucccgacugucgaaaauuccauuuuccauauggcugccuggucaggcagugcgugccacgaugggaaagaguggaccuauaucggaguggacggucccgauaacaaugcacuccugaagauuaaauacggcgaggccuacacagacacuuaucacagcuacgcuaacaauauccuuaggacccaggagucugccuguaacugcauagggggaaauuguuaucugaugauuacagauggcuccgcaucagguguuagcgaaugccgguuuuugaagauccgcgaggggagaauuaucaaagagaucuucccuaccggaagggugaagcauacggaagaguguacuugcggcuuugcuaguaacaagacaauugaaugugccugccgggacaauucuuacaccgcgaaacgcccauucgucaagcucaacguggagacugauacagccgaaauacgacugaugugcaccgacacguauuuagauacccccagaccugacgauggcuccaucacagggccaugugagagcaacggagacaaagguucgggcgggauuaagggaggcuuuguacaccagaggauggcaucuaaaaucggucggugguacucccguacuaugucaaagaccgagcgcauggggaugggccuguauguuaaauacgacggagaucccugggcugacagugaugcccucgcuuucagcggcgugauggucuccaugaaggaaccggggugguacucuuuuggauucgagauaaaggacaaaaagugcgaugugccuuguauugguaucgaaauggugcaugacggcgggaaagagacauggcacagcgccgcaacugccaucuauugccuuaugggaucaggccaacuguugugggauaccgucacagguguugacauggcucuauga

SEQ ID NO: 156683 - RNA, 1401 nt, Artificial Sequence
  derived and/or modified CDS sequence (opt3) from neuraminidase__InfluenzaB__ABL76742
augcugcccagcaccauccagacacucacucuuuuccugacguccggcgggguguuguuaucucuguacgucucagccagucuaagcuaucuccuguacuccgacauucuucugaaguuuucuccuaccgagauaacagcuccaacuaugccguuggauugcgcaaacgccucgaauguucaagcggugaacagaucagcuaccaaaggaguaacacuccugcugcccgaaccugaguggaccuauccaaggcucagcugucccgguaguacuuuccagaaggccuuacugaucuccccucaccgguuuggcgaaacaaaaggaaauucugcaccacuuauuauccgcgagcccuucauugccugcgggccuaacgaauguaagcauuuugcuuugacccacuacgcagcccagccaggcgguuauuacaaugggacgcgaggagaccguaacaaacugagacaucuaaucagcgugaagcucggcaagauaccgacugucgaaaauuccaucuuccacauggcugccuggucaggcagugcgugccaugaugggaaagaguggaccuauauuggaguggacggucccgauaacaaugcacugcuuaagaucaaauacggcgaggccuacacagacacuuaucacagcuacgcuaacaagauucugaggacccaggagucugccuguaauugcaucgggggaaacuguuauuugaugauaacagauggcuccgcaucagguguuagcgaaugccgguuucucaaaauucgcgaggggagaaucauuaaggagaucuucccuaccggaagggugaagcacacggaagaguguacuugcggcuuugcuaguaauaaaacaaucgaaugugccugccgggacaacucuuacaccgcgaagcgcccauucgucaaacugaauguggagacugauacagccgaaauucgauuaaugugcaccgacacguaucuggauacccccagaccugacgauggcuccauaacagggccaugugagagcaacggagacaaggguucgggcgggaucaaaggaggcuuuguacaucaaaggauggcaucuaagauuggucggugguacucccguacuaugucaaaaaccgagcgcauggggaugggccucuauguuaaguacgacggagaucccugggcugacagugaugcccuugcuuucagcggcgugauggucuccaugaaggaaccggggugguacucuuuuggauucgagaucaaagacaagaaaugcgaugugccuuguauagguauugaaauggugcacgacggcgggaaggagacauggcauagcgccgcaacugccaucuauugccugaugggaucaggccaguugcuaugggauaccgucacagguguugacauggcucuguga

SEQ ID NO: 156684 - RNA, 1401 nt, Artificial Sequence
  derived and/or modified CDS sequence (opt3) from neuraminidase__InfluenzaB__ABL76753
augcugcccagcaccauccagacacucacucuuuuccugacguccggcgggguguuguuaucucuguacgucucagccagucuaagcuaucuccuguacuccgacauucuucugaaguuuucucaaaccgagauaacagcuccuaucaugccauuggauugcgcaaacgccucgaauguucaggcggugaacagaucagcuacuaaaggaguaacccuccugcugccggaacccgaguggacauauccuaggcucagcuguccagguaguaccuuccagaaggccuuacugauuucuccccaccgguuuggcgaaacuacaggaaauuccgcaccucuuaucauucgcgagccauucaucgccugcgggcccaaagaauguaagcauuuugcuuugacccacuacgcagcccagccuggcgguuauuacaacgggacgcgagaggaccguaauaaacugagacaucuaauaagcgugaagcucggaaagaucccaacugucgagaacuccauuuuccacauggcugccuggucaggcagugcgugccaugauggcagggaauggaccuauaucgggguggacggaccggauaauaacgcacugcuuaaaauuaaguacggugaggccuacacagacacuuaucacagcuacgcuaaaaauauccugcggacccaagaaucugccuguaacugcauaggcggggauuguuauuugaugauuacagacggacccgcauccggcaucucagagugccgcuuucucaagauuagagaggguaggaucaucaaagaaauuuucccuaccgggcggguuaagcacacggaggaauguacuugcggauuugcuagcaauaagacaauagagugugccugccgcgauaacaguuacaccgcgaaacgaccauucgugaagcugaaugucgaaacugacacagccgagaucagauuaaugugcaccgagacguaucuggauacccccaggccuaacgacggcucuauuacaggcccaugugaauccaauggggauaaaggaagcgguggcaucaaagggggauuugugcaucagcggauggcaucgaagauaggccguugguacucucgcacuauguccaagaccaaaagaauggguauggggcucuauguaaaguacgacggcgaccccuggacagauucagaggcucuugcccugaguggaguuauggugagcauggaggaaccgggcugguacuccuucggguuugaaauuaaggacaaaaagugcgaugucccuuguaucggaaucgagauggugcacgacgguggcaaaacuaccuggcauucugcugccacagcaauuuauugcuugauggggagcggacagcuacugugggauaccgugacuggcgucgacauggcccucuga

SEQ ID NO: 156685 - RNA, 1401 nt, Artificial Sequence; identical to SEQ ID NO: 156654
  derived and/or modified CDS sequence (opt3) from neuraminidase__InfluenzaB__ABL76764

SEQ ID NO: 156686 - RNA, 1401 nt, Artificial Sequence; identical to SEQ ID NO: 156654
  derived and/or modified CDS sequence (opt3) from neuraminidase__InfluenzaB__ABL76775

SEQ ID NO: 156687 - RNA, 1401 nt, Artificial Sequence
  derived and/or modified CDS sequence (opt3) from neuraminidase__InfluenzaB__ABL76797
augcugcccagcaccauccagacacucacucuuuuccugacguccggcgggguguuguuaucucuguacgucucagccagucuaagcuaucuccuguacuccgacauucuucugaaguuuucuccuaccgagauaacagcuccaacuaugccguuggauugcgcaaacgccucgaauguucaagcggugaacagaucagcuaccaaaggaguaacacuccugcugcccgaaccugaguggaccuauccaaggcucagcugucccgguaguacuuuccagaaggccuuacugaucuccccucaccgguuuggcgaaacaaaaggaaauucugcaccacuuauuauccgcgagcccuucauugccugcgggccuaaggaauguaaacauuuugcuuugacccacuacgcagcccagccaggcgguuauuacaacgggacgcgagaggaccguaauaagcugagacaucuaaucagcgugaagcucggaaaaauaccgacugucgagaacuccaucuuccacauggcugccuggucaggcagugcgugccaugauggcaaggaauggaccuauauugggguggacggacccgauagcaaugcacugcuuaaaaucaaguacggugaggccuacacagacacuuaucacucuuacgcuaacaauauucugaggacccaggaauccgccuguaacugcaucggcgggaauuguuauuugaugauaacagauggaucagcaagcggcauuagugagugccgguuucucaaaauccgcgaggguagaauuaucaaggaaaucuucccuaccgggaggguugagcacacggaagaguguacuugcggauuugcuucuaacaagacaauugaaugugccugccgggacaauuccuacaccgcgaaacgcccauucgugaagcugaacgucgagacugauacagccgagauacgauuaaugugcaccgaaacguaucuggacacccccagaccugaugacggcagcaucacaggcccaugugagucgaauggggauaaaggaucugguggcauuaaagggggauuugugcaucaaaggauggcauccaagaucggccggugguacucacguacuaugaguaagaccaaacgcauggguauggggcucuauguaaaguacgacggcgaccccuggacagauagcgacgcucuugcccuguccggaguuauggugucuauggaggaaccgggcugguacagcuucggguuugaaauaaaggauaaaaagugcgacgucccuuguauuggaaucgagauggugcacgaugguggcaaagagacuuggcauucagcugccaccgcaaucuauugcuugauggggaguggacagcuacugugggacacagugaccggcgucaacauggcccucuga

SEQ ID NO: 156688 - RNA, 1401 nt, Artificial Sequence
  derived and/or modified CDS sequence (opt3) from neuraminidase__InfluenzaB__ABL76819
augcugcccagcaccauccagacacucacucuuuuccugacguccggcgggguguuguuaucucuguacgucucagccagucuaagcuaucuccuguacuccgacauucuucugaaguuuucuccuaccgagauaacagcuccaacuaugccguuggauugcgcaaacgccucgaauguucaagcggugaacagaucagcuaccaaaggaguaacacuccugcugcccgaaccugaguggaccuauccaaggcucagcugucccgguaguacuuuccagaaggccuuacugaucuccccucaccgguuuggcgaaacaaaaggaaauucugcaccacuuauuauccgcgagcccuucauugccugcgggccuaaggaauguaaacauuuugcuuugacccacuacgcagcccagccaggcgguuauuacaacgggacgcgagaggaccguaauaagcugagacaucuaaucagcgugaagcucggaaaaauaccgacugucgagaacuccaucuuccacauggcugccuggucaggcagugcgugccaugauggcaaggaauggaccuauauugggguggacggacccgauagcaaugcacugcuuaaaaucaaguacggugaggccuacacagacacuuaucacucuuacgcuaacaauauucugaggacccaggaauccgccuguaacugcaucggcgggaauuguuauuugaugauaacagauggaucagcaagcggcauuagugagugccgguuucucaaaauccgcgaggguagaauuaucaaggaaaucuucccuaccgggaggguuaagcacacggaggaauguacuugcggauuugcuucuaacaaaacaauugagugugccugccgggacaauuccuacaccgcgaagcgcccauucgugaaacugaacgucgaaacugauacagccgagauacgauuaaugugcaccgagacguaucuggacacccccagaccugaugacggcagcaucacaggcccaugugaaucgaauggggauaagggaucugguggcauuaaagggggauuugugcaucaaaggauggcauccaagaucggccggugguacucacguacuaugaguaaaaccaagcgcauggguauggggcucuauguaaaguacgacggcgaccccuggacagauagcgacgcucuugcccuguccggaguuauggugucuauggaggaaccgggcugguacagcuucggguuugagauaaaagauaagaaaugcgacgucccuuguauuggaaucgaaauggugcacgaugguggcaaggagacuuggcauucagcugccaccgcaaucuauugcuugauggggaguggacagcuacugugggacacagugaccggcgucgauauggcccucuga

SEQ ID NO: 156689 - RNA, 1401 nt, Artificial Sequence
  derived and/or modified CDS sequence (opt3) from neuraminidase__InfluenzaB__ABL76830
augcugcccagcaccauccagacacucacucuuuuccugacguccggcgggguguuguuaucucuguacgucucagccagucuaagcuaucuccuguacuccgacauucuucugaaguuuucuccuaccaaaauaacagcuccaacuaugccguuggauugcgcaaacgccucgaauguucaagcggugaacagaucagcuaccaagggaguaacacuccugcugcccgagccugaauggaccuauccaaggcucagcugucccgguaguacuuuccagaaagccuuacugaucuccccucaccgguuuggcgagacaaagggaaauucugcaccacuuauuauccgcgaacccuucauugccugcgggccuaaagaguguaagcauuuugcuuugacccacuacgcagcccagccaggcgguuauuacaacgggacgcgaggagaccguaauaagcugagacaucuaaucagcgugaaacucggcaagauaccgacugucgaaaacuccaucuuccacauggcugccuggucaggcagugcgugccaugaugggaaagaguggaccuauauuggaguggacggucccgauaauaacgcacugcuuaagaucaaauacggcgaggccuacacagacacuuaucacagcuacgcuaauaacauucugaggacccaggaaucugccuguaauugcaucgggggaaacuguuauuugaugauaacagauggcuccgcaucagguguuagcgagugccgguuucucaagauucgcgaagggagaaucauuaaggagaucuucccuaccggaagggugaaacacacggaggaauguacuugcggcuuugcuaguaauaagacaaucgagugugccugccgggacaacucuuacaccgcgaaacgcccauucgucaagcugaauguggaaacugauacagccgagauucgauuaaugugcaccaaaacguaucuggacacccccagaccugaugacggcuccauaacagggccaugugaaagcaacggagauaaggguucgggcgggaucaaaggaggcuuuguacaucaaaggauggcaucuaagauuggucggugguacucccguacuaugucaaagaccaaacgcauggggaugggccucuauguuaaguacgacggagaccccugggcugauagugacgcccuugcucugagcggcgugauggucuccauggaggagccggggugguacucuuucggauuugaaaucaaagauaagaaaugcgacgugccuuguauagguauugagauggugcacgauggcgggaaggaaacauggcauagcgccgcaacugccaucuauugcuugaugggaucaggccagcuacugugggacaccgucacagguguugauauggcucucuga

SEQ ID NO: 156690 - RNA, 1401 nt, Artificial Sequence
  derived and/or modified CDS sequence (opt3) from neuraminidase__InfluenzaB__ABL76852
augcugcccagcaccauccagacacucacucuuuuccugacguccggcgggguguuguuaucucuguacgucucagccagucuaagcuaucuccuguacuccgacauucuucugaaguuuucuccuaccgagauaacagcuccaacuaugccguuggauugcgcaaacgccucgaauguucaagcggugaacagaucagcuaccaaaggaguaacacuccugcugcccgaaccugaguggaccuauccaaggcucagcugucccgguaguacuuuccagaaggccuuacugaucuccccucaccgguuuggcgaaacaaaaggaaauucugcaccacuuauuauccgcgagcccuucauugccugcgggccuaaggaauguaaacauuuugcuuugacccacuacgcagcccagccaggcgguuauuacaacgggacgcgagaggaccguaauaagcugagacaucuaaucagcgugaagcucggaaaaauaccgacugucgagaacuccaucuuccacauggcugccuggucaggcagugcgugccaugauggcaaggaauggaccuauauugggguggacggacccgauagcaaugcacugcuuaaaaucaaguacggugaggccuacacagacacuuaucacucuuacgcuaacaauauucugaggacccaggaauccgccuguaacugcaucggcgggaauuguuauuugaugauaacagauggaucagcaagcggcauuagugagugccgguuucucaaaauccgcgaggguagaauuaucaaggaaaucuucccuaccgggaggguuaagcacacggaggaauguacuugcggauuugcuucuaacaaaacaauugagugugccugccgggacaauuccuacaccgcgaagcgcccauucgugaaacugaacgucgaaacugauacagccgagauacgauuaaugugcaccgagacguaucuggacacccccagaccugaugacggcagcaucacaggcccaugugaaucgaauggggauaagggaucugguggcauuaaagggggauuugugcaucaaaggauggaguccaagaucggccggugguacucacguacuaugaguaaaaccaagcgcauggguauggggcucuauguaaaguacgacggcgaccccuggacagauagcgacgcacuugcucuguccggaguuauggugucuauagaggaaccgggcugguacagcuucggguuugaaauuaaagauaagaaaugcgacgucccuuguaucggaaucgagauggugcacgaugguggcaaggagacuuggcauucagccgcuaccgccauuuauugcuugauggggaguggacagcuacugugggacacagugaccggcgucgauauggcacucuga

SEQ ID NO: 156691 - RNA, 1401 nt, Artificial Sequence
  derived and/or modified CDS sequence (opt3) from neuraminidase__InfluenzaB__ABL76863
augcugcccagcaccauccagacacucacucuuuuccugacguccggcgggguguuguuaucucuguacgucucagccagucuaagcuaucuccuguacuccgacauucuucugaaguuuucuccuaccgagauaacagcuccaacuaugccguuggauugcgcaaacgccucgaauguucaagcggugaacagaucagcuaccaaaggaguaacacuccugcugcccgaaccugaguggaccuauccaaggcucagcugucccgguaguacuuuccagaaggccuuacugaucuccccucaccgguuuggcgaaacaaaaggaaauucugcaccacuuauuauccgcgagcccuucauugccugcgggccuaaggaauguaaacauuuugcuuugacccacuacgcagcccagccaggcgguuauuacaacgggacgcgagaggaccguaauaagcugagacaucuaaucagcgugaagcucggaaaaauaccgacugucgagaacuccaucuuccacauggcugccuggucaggcagugcgugccaugauggcaaggaauggaccuauauugggguggacggacccgauagcaaugcacugcuuaaaaucaaguacggugaggccuacacagacacuuaucacucuuacgcuaacaauauucugaggacccaggaauccgccuguaacugcaucggcgggaauuguuauuugaugauaacagauggaucagcaagcggcauuagugagugccgguuucucaaaauccgcgaggguagaauuaucaaggaaaucuucccuaccgggaggguuaagcacacggaggaauguacuugcggauuugcuucuaacaaaacaauugagugugccugccgggacaauuccuacaccgcgaagcgcccauucgugaaacugaacgucgaaacugauacagccgagauacgauuaaugugcaccgagacguaucuggacacccccagaccugaugacggcagcaucacaggcccaugugaaucgaauggggauaagggaucugguggcauuaaagggggauuugugcaucaaaggauggcauccaagaucggccggugguacucacguacuaugaguaaaaccaagcgcauggguauggggcucuauguaaaguacgacggcgaccccuggacagauagcgacgcucuugcccuguccggaguuauggugucuauggaggaaccgggcugguacagcuucggguuugagauaaaagauaagaaaugcgacgucccuuguauuggaaucgaaauggugcacgaugguggcaaggagacuuggcauucagcugccaccgcaaucuauugcuugauggggaguggacagcuacugugggacacagugaccggcgucgauauggccauguga

SEQ ID NO: 156692 - RNA, 1401 nt, Artificial Sequence
  derived and/or modified CDS sequence (opt3) from neuraminidase__InfluenzaB__ABL76874
augcugcccagcaccauccagacacucacucuuuuccugacguccggcgggguguuguuaucucuguacgucucagccagucuaagcuaucuccuguacuccgacauucuucugaaguuuucuccuaccgagauaacagcuccaacuaugccguuggauugcgcaaacgccucgaauguucaagcggugaacucaagcgcuaccaaaggaguaacacuccugcugcccgaaccugaguggaccuauccaagacucaguugucccgguuccacuuuccagaaggccuuacugaucucuccucacagguuuggcgaaacaaaagggaauagcgcaccacuuauuauccgggagcccuucauugccugcggaccuaaggaauguaaacauuuugcuuugacccacuacgcagcccagccaggcgguuauuacaacgggacgcgcggagaccgaaauaagcugcgucaucuaaucuccgugaagcucggcaaaauaccgacugucgagaacucaaucuuccacauggcugccuggaguggcagcgcgugccaugaugggaaggaguggaccuauauuggaguggacggucccgauucuaaugcacugcuuaaaaucaaguacggcgaagccuacacagacacuuaucacuccuacgcuaacaauauucugagaacccaggagucagccuguaacugcaucgggggaaauuguuauuugaugauaacagauggcagcgcaagugguauuucugaaugcagguuucucaaaauccgggaggggcgcauuaucaaggagaucuucccuaccggaagaguuaagcacacggaagaguguacuugcggcuuugcuuccaacaaaacaauugaaugugccugcagggacaauagcuacaccgcgaagcggccauucgugaaacugaacgucgagacugauacagccgaaauaaaguuaaugugcaccgagacguaucuggacacaccccgcccugaugacggcucgaucaccgggccaugugagucuaauggagauaaagguuccggcgggauuaagggaggcuuugugcaucaacgaauggcaucaaaaaucgguagaugguacaguaggacuaugagcaagaccaagcggauggggaugggccucuauguaaaauacgacggagaccccuggacagauuccgacgcucuugcccugucuggcguuauggugagcauggaggaaccggggugguacucauucggauuugaaauaaaggauaaaaagugcgacgucccuuguauugguaucgagauggugcacgauggcgggaaagaaacuuggcauagugcugccaccgcaaucuauugcuugaugggauccggccagcuacugugggacacagugaccggugucgauauggcccucuga

SEQ ID NO: 156693 - RNA, 1401 nt, Artificial Sequence
  derived and/or modified CDS sequence (opt3) from neuraminidase__InfluenzaB__ABL76885
augcugcccagcaccauccagacacucacucuuuuccugacguccggcgggguguuguuaucucuguacgucucagccagucuaagcuaucuccuguacuccgacauucuucugaaguuuucucaaaccgagauaacagcuccuacuaugccauuggauuaugcaaacgccucgaauguucaggcggugaacagaucagcuaccaaaggaguaacacuccugcugccggaacccgaguggaccuacccuaggcucagcugcccagguaguacuuuccagaaggccuuacugaucucuccccaccgguuuggcgaaacaaaaggaaauuccgcaccucuuauuauccgcgagccauucauugccugugggcccaaggaaugcaaacauuuugcuuugacccacuaugcagcccagccuggcgguuacuauaacgggacgcgagaggaccguaauaagcugagacaucuaaucagcgugaagcucggaaaaauaccaacugucgagaacuccaucuuccacauggcugccuggucaggcagugcgugucaugauggcagggaauggaccuacauugggguggacggaccggauagcaaugcacugcuuaagaucaaauacggugaggccuauacagacacuuaccacucuuaugcuaagaacauucugcggacccaagaauccgccugcaauuguaucggcggggauugcuacuugaugauaacagacggaucagcaagcggcauuagugagugucgcuuucucaaaaucagagaggguaggauuaucaaggaaaucuuccccaccgggcggguuaagcacacggaggaaugcacuuguggauuugcuucuaacaaaacaauugagugcgccugucgcgauaauuccuauaccgcgaagcgaccuuucgugaaacugaacgucgaaacugacacagccgagauaagauuaaugugcaccgagacguaccuggauaccccaaggcccgacgauggcagcaucacaggcccuugcgaaucgaauggggacaagggaucugguggcauuaaagggggauuugugcaucagcggauggcauccaagaucggccguugguauucacgcacuaugaguaaaaccaagagaauggguauggggcucuacguaaaguacgacggcgauccauggacagacagcgaggcucuugcccuguccggaguuauggugucuauggaggaacccggcugguauagcuucggguuugaaauaaaagauaagaaaugugacgucccgugcauuggaaucgagauggugcacgaugguggcaagacuaccuggcauucagcugccacagcaaucuacuguuugauggggaguggacagcuacugugggacaccgugacuggcgucgauauggcccucuga

SEQ ID NO: 156694 - RNA, 1401 nt, Artificial Sequence
  derived and/or modified CDS sequence (opt3) from neuraminidase__InfluenzaB__ABL76896
augcugcccagcaccauccagacacucacucuuuuccugacguccggcgggguguuguuaucucuguacgucucagccagucuaagcuaucuccuguacuccgacauucuucugaaguuuucucaaaccgagauaacagcuccuacuaugccauuggauugcgcaaacgccucgaauguucaggcggugaacagaucagcuaccaaaggaguaacacuccugcugccggaacccgaguggauguauccuaggcucagcuguccagguaguaccuuccagaaggccuuacugaucucuccccaccgguuuggcgaaacuaaaggaaauuccgcaccucuuauuauccgcgagccauucauugccugcgggcccaaggaauguaaacauuuugcuuugacacacuacgcagcccagccuggcgguuauuacaacgggacccgagaggaccguaauaagcugagacaucuaaucagcgugaagcucggaaaaauaccaacggucgagaacuccaucuuccacauggcugccuggucaggcagugcgugccaugauggcagggaauggacuuauauugggguggacggaccggauagcaaugcacugcuuaagaucaaauacggugaggccuacaccgacacauaucacucuuacgcuaagaacauucugcggacucaagaauccgccuguaauugcaucggcggggauuguuauuugaugauaaccgacggaucagcaagcggcauuagugagugccgcuuucucaaaaucagagaggguaggauuaucaaggaaaucuuccccacagggcggguuaagcacaccgaggaauguacgugcggauuugcuucuaacaaaacuauugagugugccugccgcgauaauuccuacacagcgaagcgaccuuucgugaaacugaacgucgaaaccgacacugccgagauaagauuaaugugcacagagaccuaucuggauacgccaaggcccgacgauggcagcaucaccggcccuugugaaucgaauggggacaagggaucugguggcauuaaagggggauuugugcaucagcggauggcauccaagaucggccguugguacucacgcacaaugaguaaaacuaagagaauggguauggggcucuauguaaaguacgacggcgauccauggaccgacagcgaggcucuugcccuguccggaguuauggugucuauggaggaacccggcugguacagcuucggguuugaaauaaaagauaagaaaugcgacgucccguguauuggaaucgagauggugcacgaugguggcaagacaacuuggcauucagcugccaccgcaaucuauugcuugauggggaguggacagcuacugugggacgccgugacaggcgucgauauggcucucuga

SEQ ID NO: 156695 - RNA, 1401 nt, Artificial Sequence
  derived and/or modified CDS sequence (opt3) from neuraminidase__InfluenzaB__ABL76918
augcugcccagcaccauccagacacucacucuuuuccugacguccggcgggguguuguuaucucuguacgucucagccagucuaagcuaucuccuguacuccgacauucuucugaaguuuucuccuaccgagauaacagcuccaacuaugccguuggauugcgcaaacgccucgaauguucaagcggugaacagaucagcuaccaaaggaguaacacuccugcugcccgaaccugaguggaccuauccaaggcucagcugucccgguaguacuuuccagaaggccuuacugaucuccccucaccgguuuggcgaaacaaaaggaaauucugcaccacuuauuauccgcgagcccuucauugccugcgggccuaacgaauguaagcauuuugcuuugacccacuacgcagcccagccaggcgguuauuacaaugggacgcgaggagaccguaacaaacugagacaucuaaucagcgugaagcucggcaagauaccgacugucgaaaauuccaucuuccacauggcugccuggucaggcagugcgugccaugaugggaaagaguggaccuauauuggaguggacggucccgauaacaaugcacugcuuaagaucaaauacggcgaggccuacacagacacuuaucacagcuacgcuaacaauauucugaggacccaggagucugccuguaacugcaucgggggaaauuguuauuugaugauaacagauggcuccgcaucagguguuagcgaaugccgguuucucaagauucgcgaggggagaaucauuaaagagaucuucccuaccggaagggugaagcacacggaagaguguacuugcggcuuugcuaguaacaagacaaucgaaugugccugccgggacaauucuuacaccgcgaaacgcccauucgucaagcugaacguggagacugauacagccgaaauucgauuaaugugcaccgagacguaucuggacacccccagaccugaugacggcuccauaacagggccaugugagagcaacggagauaaagguucgggcgggaucaagggaggcuuuguacaucaaaggauggcaucuaaaauuggucggugguacucccguacuaugucaaagaccgaacgcauggggaugggccucuauguuaaauacgacggagaccccugggcugauagugacgcccuugcucugaucggcgugauggucagcauggaggaaccggggugguacuccuucggauuugagauaaaggauaagaaaugcgacgugccuuguauugguaucgaaauggugcacgauggcgggaaggagacauggcauucugccgcaacugccaucuauugcuugaugggaagcggccagcuacugugggacaccgucacagguguuaauauggcucucuga

SEQ ID NO: 156696 - RNA, 1401 nt, Artificial Sequence
  derived and/or modified CDS sequence (opt3) from neuraminidase__InfluenzaB__ABL76962
augcugcccagcaccauccagacacucacucuuuuccugacguccggcgggguguuguuaucucuguacgucucagcccuacucaguuaucugcuuuacagcgacauucuguugaaguuuuccccuaccaaaauaaucgcuccaacaaugucucucgauugcgcaaacgccucgaauguucaagcggugaaccacucagcuacugaggaaaugaccuuccugcugccggagcccgaauggacauauccuagacucagcugucagggaaguaccuuucagaaggccuuacugauuuccccacauagguucggugaggcaaaaggcaauucugcuccccuuaucauucgggaaccuuuuaucgcuugcgggccaaaggaguguaaacacuucgcauugacucauuacgccgcucagcccggaggcuauuacaacgguacacgcgaggaccgaaauaagcugcgucaccuaauaagcguaaaccucgggaagaucccuaccguggaaaauuccauuuuucauauggccgcguggucaggaagugcaugccacgauggcagagaguggacguauaucggcgucgacgggccagauagcaacgcccugauuaaaaucaaguacggagaagccuacacugacaccuaucacucuuacgccaauaacauacuuaggacacaagaguccgcauguaauugcauugguggcgauuguuaucugaugaucacugacgggucagcuagcggaauuaguaaaugccgguucuugaagauccgcgagggcagaaucauuaaagaaauauuuccgaccgguaggguggagcauacagaagaguguaccugcggguucgccucuaacaagacgaucgaaugugcgugccgggauaauuccuacacugccaagcgccccuuuguuaaacucaacguggagacagacaccgcagagauucgacugaugugcacugaaacauauuuagauaccccuagaccagacgauggaagcaucacgggccccugugagucgaauggcgacaaggggucuggagguauaaaaggcggguucguccaccagaggauggcuuccaagauuggacggugguacucacguaccaugaguaaaacaaagcgcaugggcauggaacuguaugugaaauacgacggugauccuuggacugacagcgaugcccucgcuccauccgggguaaugguuucuauggaggaacccggcugguacagcuuuggauucgagaucaaggacaagaaaugcgaugugccguguaucggcauugagaugguccaugacgggggaaagaaaaccuggcacucagccgcaacagccaucuauugccuuauggguaguggccagcuguugugggauacugugaccgggguggacauggcucuauga

SEQ ID NO: 156697 - RNA, 1401 nt, Artificial Sequence; identical to SEQ ID NO: 156627
  derived and/or modified CDS sequence (opt3) from neuraminidase__InfluenzaB__ABL76973

SEQ ID NO: 156698 - RNA, 1401 nt, Artificial Sequence
  derived and/or modified CDS sequence (opt3) from neuraminidase__InfluenzaB__ABL76984
augcugcccagcaccauccagacacucacucuuuuccugacguccggcgggguguuguuaucucuguacgucucagccagucuaagcuaucuccuguacuccgacauucuucugaaguuuucucaaaccgagauaacagcuccuacuaugccauuggauugcgcaaacgccucgaauguucaggcggugaaccucucagcuaccaaaggaguaacacugcugcucccggaacccgaguggaccuauccuagauuaagcuguccagguaguacuuuccagaaggcccugcuuaucucuccccacagguuuggcgaaacaaaaggaaauuccgcaccuuugauuauccgggagccauucauugccugcgggcccaaggaauguaaacauuuugcucugacccacuacgcagcccagccuggcgguuauuacaacgggacgcgcgaggaccgaaauaagcuacgucaucucaucagcgugaagcugggaaaaauaccaacugucgagaacuccaucuuccacauggcugccuggucaggcagugcgugccaugauggcagagaauggaccuauauugggguggacggaccggauagcaaugcacuucugaagaucaaauacggugaggccuacacagacacuuaucacucuuacgcuaacaauauuuugaggacccaagaauccgccuguaacugcaucggcgggaauuguuaucucaugauaacagauggaucagcaagcggcauuagugagugccgguuucugaagauccgcgaggguagaauuaucaaagaaaucuuccccaccgggaggguugagcacacggaagaguguacuugcggauuugcuucuaacaagacaauugaaugugccugccgggacaauuccuacaccgcgaagcgcccuuucgugaaauuaaacgucgagacugauacagccgagauacgacugaugugcaccgaaacguaucucgacaccccaagacccgaugacggcagcaucacaggcccuugugagucgaauggggauaagggaucugguggcauuaaagggggauuugugcaucagaggauggcauccaagaucggccggugguacucacguacuaugaguaaaaccaagcgcauggguauggggcuuuauguaaaauacgacggcgacccauggacagauagcgacgcucuggccuuguccggaguuauggugucuauggaggaacccggcugguacagcuucggguuugaaauaaaggauaagaaaugcgacgucccguguauuggaaucgagauggugcacgaugguggcaagagaacuuggcauucagcugccaccgcaaucuauugccuaauggggaguggacagcugcucugggacacagugaccggcgucgauauggcccuguga

SEQ ID NO: 156699 - RNA, 1401 nt, Artificial Sequence; identical to SEQ ID NO: 156654
  derived and/or modified CDS sequence (opt3) from neuraminidase__InfluenzaB__ABL77006

SEQ ID NO: 156700 - RNA, 1401 nt, Artificial Sequence; identical to SEQ ID NO: 156698
  derived and/or modified CDS sequence (opt3) from neuraminidase__InfluenzaB__ABL77017

SEQ ID NO: 156701 - RNA, 1401 nt, Artificial Sequence
  derived and/or modified CDS sequence (opt3) from neuraminidase__InfluenzaB__ABL77028
augcugcccagcaccauccagacacucacucuuuuccugacguccggcgggguguuguuaucucuguacgucucagccagucuaagcuaucuccuguacuccgacauucuucugaaguuuucuccuaccgagauaacagcuccaacuaugccguuggauugcgcaaacgccucgaauguucaagcggugaacagaucagcuaccaaaggaguaacacuccugcugcccgaaccugaguggaccuauccaaggcucagcugucccgguaguacuuuccagaaggccuuacugaucuccccucaccgguuuggcgaaacaaaaggaaauucugcaccacuuauuauccgcgagcccuucauugccugcgggccuaaggaauguaaacauuuugcuuugacccacuacgcagcccagccaggcgguuauuacaacgggacgcgagaggaccguaauaagcugagacaucuaaucagcgugaagcucggaaaaauaccgacugucgagaacuccaucuuccacauggcugccuggucaggcagugcgugccaugauggcaaggaauggaccuauauugggguggacggacccgauagcaaugcacugcuuaaaaucaaguacggugaggccuacacagacacuuaucacucuuacgcuaacaauauucugaggacccaggaauccgccuguaacugcaucggcgggaauuguuauuugaugauaacagauggaucagcaagcggcauuagugagugccgguuucucaaaauccgcgaggguagaauuaucaaggaaaucuucccuaccgggaggguugagcacacggaagaguguacuugcggauuugcuucuaacaagacaauugaaugugccugccgggacaauuccuacaccgcgaaacgcccauucgugaagcugaacgucgagacugauacagccgagauacgauuaaugugcaccgaaacguaucuggacacccccagaccugaugacggcagcaucacaggcccaugugagucgaauggggauaaaggaucugguggcauuaaagggggauuugugcaucaaaggauggcauccaagaucggccggugguacucacguacuaugaguaagaccaaacgcauggguauggggcucuauguaaaguacgacggcgaccccuggacagauagcgacgcucuugcccuguccggaguuauggugucuauggaggaaccgggcugguacagcuucggguuugaaauaaaggauaaaaagugcgacgucccuuguauuggaaucgagauggugcacgaugguggcaaagagacuuggcauucagcugccaccgcaaucuauugcuugauggggaguggacagcuacugugggacacagugaccggcgucgauauggcccucuga

SEQ ID NO: 156702 - RNA, 1401 nt, Artificial Sequence
  derived and/or modified CDS sequence (opt3) from neuraminidase__InfluenzaB__ABL77039
augcugcccagcaccauccagacacucacucuuuuccugacguccggcgggguguuguuaucucuguacgucucagccagucuaagcuaucuccuguacuccgacauucuucugaaguuuucuccuaccgagacaacugcuccaaccaugccguuggauugcgcaaacgccucgaauguucaagcggugaacuguucagcuacaaaaggaguaacccuccugcugcccgaaccugaguggacuuauccaagacucagcugccccgguaguacauuccagaaggccuuacugauauccccucacagguuuggcgaaaccaaaggcaauucugcaccacuuaucauucgggagcccuucaucgccuguggaccuaaggaaugcaaacauuuugcuuugacgcacuacgcagcccagccaggcgguuauuacaacgggacucgcgaggaccgaaauaagcugcgucaucuaauuagcgugaagcucggaaaaaucccgaccgucgagaacuccauauuccacauggcugccuggucaggcagugcgugucaugauggcaaggaauggacauauaucgggguggacggacccgauagcaaugcacugcuuaaaauuaaguacggugaggccuacacugacaccuaucacucuuacgcuaacaauauccugagaacacaggaauccgccugcaacuguauuggcgggaauugcuauuugaugaucaccgauggaucagcaagcggcauaagugaguguagguuucucaaaauucgggagggucgcaucauuaaggaaaucuucccuacggggagaguugagcacacugaagagugcacauguggauuugcuucuaacaagaccaucgaaugcgccugcagggacaauuccuacacugcgaaacggccauucgugaagcugaacgucgagacagauaccgccgagauucgcuuaauguguacggaaaccuaucuggacacaccccgaccugaugacggcagcauaacuggcccaugcgagucgaauggggauaaaggaucugguggcaucaaagggggauuugugcaucaaagaauggcauccaagauugggaggugguacucacggaccaugaguaagacaaaacguauggguauggggcucuauguaaaguacgacggcgaccccuggacugauagcgacgcucuugcccuguccggaguuauggugucuauggaggaaccgggcugguacagcuucggguuugaaaucaaggauaaaaagugugacgucccuugcauaggaauugagauggugcacgaugguggcaaagagaccuggcauucagcugccacagcaaucuauuguuugauggggaguggacagcuacugugggacaccgugacuggcgucgauauggcccucuga

SEQ ID NO: 156703 - RNA, 1401 nt, Artificial Sequence
  derived and/or modified CDS sequence (opt3) from neuraminidase__InfluenzaB__ABL77050
augcugcccagcaccauccagacacucacucuuuuccugacguccggcgggguguuguuaucucuguacgucucagccagucuaagcuaucuccuguacuccgacauucuucugaaguuuucuccuaccgagauaacagcuccagcaaugccguuggauugcgccaacgcgucgaauguucaagcugugaacagaucagccacuaaaggaguaacccuccugcugcccgaaccugaguggacauauccaaggcucagcugucccgguaguaccuuccagaaggcauuacugaucuccccucaccgguuuggcgaaacuaaaggaaauucugccccacuuauuauccgcgagcccuucauugcuugcgggccuaaggaauguaaacauuuugcauugacacacuacgccgcucagccaggcgguuauuacaacgggacccgagaggaccguaauaagcugagacaucuaaucagcgugaagcucggaaaaauaccgacggucgagaacuccaucuuccacauggccgcguggucaggcagugcaugccaugauggcaaggaauggacuuauauugggguggacggacccgauagcaaugcccugcuuaaaaucaaguacggugaggcuuacaccgacacauaucacucuuacgccaacaauauucugaggacucaggaauccgcauguaacugcaucggcgggaauuguuauuugaugauaaccgauggaucagcuagcggcauuagugagugccgguuucucaaaauccgcgaggguagaauuaucaaggaaaucuucccuacagggaggguuaagcacaccgaggaauguacgugcggauuugccucuaacaaaacuauugagugugcgugccgggacaauuccuacacagccaagcgcccauucgugaaacugaacgucgaaaccgauacugcagagauacgauuaaugugcacagagaccuaucuggacacgcccagaccugaugacggcagcaucaccggcccaugugaaucgaauggggauaagggaucugguggcauuaaagggggauuugugcaucaaaggauggcuuccaagaucggccggugguacucacguacaaugaguaaaacuaagcgcauggguauggggcucuauguaaaguacgacggcgaccccuggaccgauagcgacgcccuugcucuguccggaguuauggugucuauggaggaaccgggcugguacagcuucggguuugagauaaaagauaagaaaugcgacgucccuuguauuggaaucgaaauggugcacgaugguggcaaggagacauggcauucagccgcaacugccaucuauugcuugauggggaguggacagcuacugugggacaccgugacaggcgucgauauggcucucuga

SEQ ID NO: 156704 - RNA, 1401 nt, Artificial Sequence
  derived and/or modified CDS sequence (opt3) from neuraminidase__InfluenzaB__ABL77072
augcugcccagcaccauccagacacucacucuuuuccugacguccggcgggguguuguuaucucuguacgucucagcccuacucaguuaucugcuuuacagcgacauucuguugaaguuuuccccuaccaaaauaaucgcuccaacaacuucucucgauucggcaaacgccucaaauuuccaagcgguuaaccacagcgcuaccaaggagaugacauuucugcugccggaacccgaguggaccuauccuagacucaguugccagggauccacuuuccagaaagccuuacugauuucuccacauagguuuggugaagcaaagggcaauagcgcuccccuuaucauucgggagccuuucaucgccugugggccaaaagaaugcaagcacuuugcauugacacauuacgccgcucagcccggaggcuauuacaacgguacccgcgaggaccgaaauaagcugcgucaccuaauauccgugaaccucgggaaaaucccuacgguagaaaauucaauuuuccauauggccgcguggaguggaagcgcaugucacgauggcagagaguggacuuauaucggcguggacgggccagauucuaacgcccugauuaagaucaaauacggagaggcuuacaccgacacauaucacuccuacgccaauaacauacuuaggacucaagaaucagcaugcaauuguauugguggcgauugcuaucugaugaucaccgacgggagcgcuaguggaauuucuaagugucgguuuuugaaaauccgcgagggcagaaucauuaaggagauauucccgacagguagggucgaacauaccgaggaaugcacguguggguuugccuccaacaagacuaucgagugcgcgugucgggauaauagcuacacagccaaacgccccuucgugaagcucaacguugaaaccgacacugcagagauucgacugaugugcacagagaccuauuuagauacgccuagaccagacgauggaucgaucaccggccccugcgaaucuaauggcgacaaaggguccggagguauaaagggcggguuugugcaccagaggauggcuucaaaaauuggacggugguacagucguacaaugagcaagacuaaacgcaugggcauggagcuguaugucaaguacgacggugauccuuggaccgacuccgaugcccucgcuccaucuggggugaugguaagcaucaaggaaucaggcugguacaguuucggauucgagaucaaagacaagaaaugugauguucccugcauuggcaucgaaauggugcaugacgggggaaagacaacuuggcacuccgccgcaaccgccauuuauugucuuauggguagcggccagcuguugugggauacagucaccgggguggacauggcucuauga

SEQ ID NO: 156705 - RNA, 1401 nt, Artificial Sequence; identical to SEQ ID NO: 156632
  derived and/or modified CDS sequence (opt3) from neuraminidase__InfluenzaB__ABL77083

SEQ ID NO: 156706 - RNA, 1401 nt, Artificial Sequence; identical to SEQ ID NO: 156632
  derived and/or modified CDS sequence (opt3) from neuraminidase__InfluenzaB__ABL77094

SEQ ID NO: 156707 - RNA, 1401 nt, Artificial Sequence
  derived and/or modified CDS sequence (opt3) from neuraminidase__InfluenzaB__ABL77105
augcugcccagcaccauccagacacucacucuuuuccugacguccggcgggguguuguuaucucuguacgucucagccagucuaagcuaucuccuguacuccgacauucuucugaaguuuucuucgaccgagauaacagcuccuacuaugccauuggauugcgcaaacgccucaaauguucaagcggugaacagaagcgcuaccgaaggaguaacacuccugcugccggagcccgaauggaccuauccuaggcucaguuguccagguuccacuuuccagaaagccuuacugaucucuccccaccgguuuggcgagacaaaggggaauagcgcaccucuuauuauccgcgaaccauucauugccugcggacccaaagaguguaagcauuuugcuuugacccacuacgcagcccagccuggcgguuauuacaacgggacgcgagaggaccguaauaaacugagacaucuaaucuccgugaagcucggaaagauaccaacugucgaaaacucaaucuuccacauggcugccuggaguggcagcgcgugccaugauggcaaagaguggaccuauauugggguggacggaccggauucuaaugcacugcuuaagaucaaauacggugaagccuacacagacacuuaucacuccuacgcuaacaauauucugaggacccaggagucagccuguaacugcaucggcgggaauuguuauuugaugauaacagauggaagcgcaaguggcauuucugagugccgguuucucaagauccgcgaagguagaauuaucaaagagaucuuccccaccgggaggguugaacacacggaggaauguacuugcggauuugcuuccaacaagacaauugagugugccugccgggacaauagcuacaccgcgaagcgcccuuucgugaaacugaacgucgagacugauacagccgaaauacgauuaaugugcaccgagacguaucuggacaccccaagacccgaugacggcucgaucacaggcccuugugaaucuaauggggauaagggauccgguggcauuaaagggggauuugugcaucaaaggauggcaucaaagaucggccggugguacagucguacuaugagcaaaaccaagcgcauggguauggggcucuauguaaaauacgacggcgacccauggacagauuccgacgcucuugcccugucuggaguuauggugagcauggaggaacccggcugguacucauucggguuugagauaaaggauaagaaaugcgacgucccguguauuggaaucgagauggugcacgaugguggcaaggaaacuuggcauagugcugccaccgcaaucuauugcuugaugggguccggacagcuacugugggacacagugaccggcgucgauauggcccucuga

SEQ ID NO: 156708 - RNA, 1401 nt, Artificial Sequence; identical to SEQ ID NO: 156632
  derived and/or modified CDS sequence (opt3) from neuraminidase__InfluenzaB__ABL77127

SEQ ID NO: 156709 - RNA, 1401 nt, Artificial Sequence
  derived and/or modified CDS sequence (opt3) from neuraminidase__InfluenzaB__ABL77138
augcugcccagcaccauccagacacucacucuuuuccugacguccggcgggguguuguuaucucuguacgucucagcccuacucaguuaucugcuuuacagcgacauucuguugaaguuuuccccuaccaaaauaaucgcuccaacaacuucucucgauucggcaaacgccucaaauuuccaagcgguuaaccacagcgcuaccaaggagaugacauuucugcugccggaacccgaguggaccuauccuagacucaguugccagggauccacuuuccagaaagccuuacugauuucuccacauagguuuggugaagcaaagggcaauagcgcuccccuuaucauucgggagccuuucaucgccugugggccaaaagaaugcaagcacuuugcauugacacauuacgccgcucagcccggaggcuauuacaacgguacccgcgaggaccgaaauaagcugcgucaccuaauauccgugaaccucgggaaaaucccuacgguagaaaauucaauuuuccauauggccgcguggaguggaagcgcaugucacgauggcagagaauggacuuauaucggcguggacgggccagauucuaacgcccugauuaagaucaaauacggagaggcuuacaccgacacauaucacuccuacgccaauaacauacuuaggacucaagaaucagcaugcaauuguauugguggcgauugcuaucugaugaucaccgacgggagcgcuaguggaauuucuaagugucgguuuuugaaaauccgcgagggcagaaucauuaaggagauauucccgacagguagggucgaacauaccgaggaaugcacguguggguuugccuccaacaagacuaucgagugcgcgugucgggauaauagcuacacagccaaacgccccuucgugaagcucaacguugaaaccgacacugcagagauucgacugaugugcacagagaccuauuuagauacgccuagaccagacgauggaucgaucaccggccccugcgaaucuaauggcgacaaaggguccggagguauaaagggcggguuugugcaccagaggauggcuucaaaaauuggacggugguacagucguacaaugagcaagacuaaacgcaugggcauggagcuguaugucaaguacgacggugauccuuggaccgacuccgaugcccucgcuccaucuggggugaugguaagcaucgaggagcccggcugguacucauucggauucgaaaucaaggacaaaaagugugauguuccgugcauuggcaucgagauggugcaugacgggggaaaaacaacuugguauagugccgcaaccgccauuuacugucuuauggguuccggccagcuguugugggauacagucaccgggguggacauggcucuauga

SEQ ID NO: 156710 - RNA, 1401 nt, Artificial Sequence; identical to SEQ ID NO: 156632
  derived and/or modified CDS sequence (opt3) from neuraminidase__InfluenzaB__ABL77149

SEQ ID NO: 156711 - RNA, 1401 nt, Artificial Sequence
  derived and/or modified CDS sequence (opt3) from neuraminidase__InfluenzaB__ABL77160
augcugcccagcaccauccagacacucacucuuuuccugacguccggcgggguguuguuaucucuguacgucucagccagucuaagcuaucuccuguacuccgacauucuucugaaguuuucucaaaccaaaauaacagcuccuacuaugccauuggauugcgcaaacgccucgaauguucaggcggugaacagaucagcuaccaagggaguaacacuccugcugccggagcccgaauggaccuauccuaggcucagcuguccagguaguacuuuccagaaagccuuacugaucucuccccaccgguuuggcgagacaaagggaaauuccgcaccucuuauuauccgcgaaccauucauugccugcgggcccaaagaguguaagcauuuugcuuugacccacuacgcagcccagccuggcgguuauuacaacgggacgcgagaagaccguaauaagcugagacaucuaaucagcgugaaacucggaaagauaccaacugucgagaacuccaucuuccacauggcugccuggucaggcagugcgugccaugauggcagggaguggaccuauauugggguggacggaccggauagcaaugcacugcuuaaaaucaaguacggugaagccuacacagacacuuaucacucuuacgcuaaaaacauucugcggacccaagaguccgccuguaauugcaucggcggggauuguuauuugaugauaacagacggaucagcaagcggcauuagugaaugccgcuuucucaagaucagagaggguaggauuaucaaggagaucuuccccaccgggcggguuaaacacacggaagaguguacuugcggauuugcuucuaacaagacaauugaaugugccugccgcgauaauuccuacaccgcgaaacgaccuuucgugaagcugaacgucgagacugacacagccgaaauaagauuaaugugcaccgagacguaucuggauaccccaaggcccaaugacggcagcaucacaggcccuugugagucggauggggaccggggaucugguggcauuaaagggggauuugugcaucagcguauggaauccaagaucggccgcugguacucaagaacuaugaguaaaaccaagaggauggguauggggcucuauguaaaguacgacggcgauccauggacagacagcgaggcacuugcucuguccggaguuauggugucuauggaggaacccggcugguacagcuucggguuugaaauaaaagauaagaaaugcgacgucccguguauuggaaucgagauggugcacgaugguggcaagacuaccuggcauucagccgcuacaaccaucuauugcuugauggggaguggacagcuacugugggacacugugacgggcgucgauauggcccucuga

SEQ ID NO: 156712 - RNA, 1401 nt, Artificial Sequence; identical to SEQ ID NO: 156664
  derived and/or modified CDS sequence (opt3) from neuraminidase__InfluenzaB__ABL77171

SEQ ID NO: 156713 - RNA, 1401 nt, Artificial Sequence
  derived and/or modified CDS sequence (opt3) from neuraminidase__InfluenzaB__ABL77182
augcugcccagcaccauccagacacucacucuuuuccugacguccggcgggguguuguuaucucuguacgucucagcccuacucaguuaucugcuuuacagcgacauucuguugaaguuuuccccuaccaaaauaaucgcuccaacaacuucucucgauucggcaaacgccucaaauuuccaagcgguuaaccacagcgcuaccaaggagaugacauuucugcugccggaacccgaguggaccuauccuagacucaguugccagggauccacuuuccagaaagccuuacugauuucuccacauagguuuggugaagcaaagggcaauagcgcuccccuuaucauucgggagccuuucaucgccugugggccaaaagaaugcaagcacuuugcauugacacauuacgccgcucagcccggaggcuauuacaacgguacccgcgaggaccgaaauaagcugcgucaccuaauauccgugaaccucgggaaaaucccuacgguagaaaauucaauuuuccauauggccgcguggaguggaagcgcaugucacgauggcagagaauggacuuauaucggcguggacgggccagauucuaacgcccugauuaagaucaaauacggagaggcuuacaccgacacauaucacuccuacgccaauaacauacuuaggacucaagaaucagcaugcaauuguauugguggcgauugcuaucugaugaucaccgacgggagcgcuaguggaauuucuaagugucgguuuuugaaaauccgcgagggcagaaucgucaaggagauuuucccgacagguaggguggaacauaccgaggaaugcacguguggguuugccuccaacaagacuauagagugcgcgugucgggauaauagcuacacagccaaacgccccuucguuaagcucaacguggaaaccgacacugcagagauccgacugaugugcacagagaccuauuuagauacgccuagaccagacgauggaucgauuaccggccccugcgaaucuaauggcgacaaaggguccggagguaucaagggcggguuuguccaccagaggauggcuucaaaaauaggacggugguacagucguacaaugagcaagacuaaacgcaugggcauggagcuguaugugaaguacgacggugauccuuggaccgacuccgaugcccucgcuccaucugggguaaugguuagcauugaggagcccggcugguacucauucggauucgaaaucaaggacaaaaagugugaugugccgugcaucggcauugagaugguccaugacgggggaaaaacaacuuggcacagugccgcaaccgccaucuauugucuuauggguuccggccagcuguugugggauacaauuaccgggguggacauggcucuauga

SEQ ID NO: 156714 - RNA, 1401 nt, Artificial Sequence; identical to SEQ ID NO: 156639
  derived and/or modified CDS sequence (opt3) from neuraminidase__InfluenzaB__ABL77193

SEQ ID NO: 156715 - RNA, 1401 nt, Artificial Sequence
  derived and/or modified CDS sequence (opt3) from neuraminidase__InfluenzaB__ABL77204
augcugcccagcaccauccagacacucacucuuuuccugacguccggcgggguguuguuaucucuguacgucucagccagucuaagcuaucuccuguacuccgacauucuucugaaguuuucuccuaccgagauaacagcuccaacuaugccguuggauugcgcaaacgccucgaauguucaagcggugaacagaucagcuaccaaaggaguaacacuccugauccccgaaccugaguggaccuauccaaggcugagcugucccgguaguacuuuccagaaggcccucuuaauuuccccucaccgguuuggcgaaacaaaaggaaauucugcaccacugaucauucgcgagcccuucaucgccugcgggccuaaggaauguaaacauuuugcucuuacccacuacgcagcccagccaggcgguuauuacaacgggacgcgaggagaccguaauaaguugagacaucugauaagcgugaagcuaggcaaaaucccgacugucgagaacuccauuuuccacauggcugccuggucaggcagugcgugccaugaugggaaggaguggaccuauaucggaguggacggucccgauaauagcgcacuccugaaaauuaaguacggcgaagccuacacagacacuuaucacucuuacgcuaacaauauccuuaggacccaggaguccgccuguaacugcauagggggaaauuguuaucugaugauuacagauggcucagcaagcgguguuagugaaugccgguuuuugaaaauccgcgaggggagaauuaucaaggagaucuucccuaccggaagggugaagcacacggaagaguguacuugcggcuuugcuucuaacaaaacaauugaaugugccugccgggacaauuccuacaccgcgaagcgcccauucgucaaacucaacguggagacugauacagccgaaauacgacugaugugcaccgagacguauuuagacacccccagaccugaugacggcagcaucacagggccaugugagucgaauggagauaaggguucuggcgggauuaaaggaggcuuuguacaucaaaggauggcauccaagaucggucggugguacucacguacuaugaguaaaaccaagcgcauggggaugggccuguauguuaaguacgacggagaccccugggcugauagcgacgcccucgcucuuuccggcgugauggucucuauggaggaaccggggugguacagcuucggauuugaaauaaaagauaagaaaugcgacgugccuuguauugguaucgagauggugcacgauggcgggaaggaaacauggcauucagccgcaacugccaucuauugccugaugggaaguggccaguugcuaugggacaccgucacagguguugauauggcucuguga

SEQ ID NO: 156716 - RNA, 1401 nt, Artificial Sequence
  derived and/or modified CDS sequence (opt3) from neuraminidase__InfluenzaB__ABL77215
augcugcccagcaccauccagacacucacucuuuuccugacguccggcgggguguuguuaucucuguacgucucagccagucuaagcuaucuccuguacuccgacauucuucugaaguuuccuucuaccgagauaacagcuccaacuaugccguuggauugcgcaaacgccucgaauguucaagcggugaacagaucagcuaccaaaggaguaacacuccugcugcccgaaccugaguggaccuauccaaggcucagcugucccgguaguacuuuccagaaggccuuacugaucuccccucaccgguuuggcgaaacaaaaggaaauucugcaccacuuauuauccgcgagcccuucauugccugcgggccuaaggaauguaaacauuuugcuuugacccacuacgcagcccagccaggcgguuauuacaacgggacgcgaggagaccguaauaagcugagacaucuaaucagcgugaagcucggcaaaauaccgacugucgagaacuccaucuuccacauggcugccuggucaggcagugcgugccaugaugggaaggaguggaccuauauuggaguggacggucccgauaauaacgcacugcuuaaaaucaaguacggcgaagccuacacagacacuuaucacagcuacgcuaauaacauucugaggacccaggagucugccuguaauugcaucgggggaaacuguuauuugaugauaacagauggcuccgcaucagguguuagcgaaugccgguuucucaaaauucgcgaggggagaaucauuaaggagaucuucccuaccggaaggaucaagcacacggaagaguguacuugcggcuuugcuaguaauaaaacaauugaaugugccugccgggacaacucuuacaccgcgaagcgcccauucgugaaacugaaugucgagacugauacagccgaaauacgauuaaugugcaccgagacguaucuggacacccccagaccugaugacggcuccaucacagggccaugugagagcaacggagauaaggguucgggcgggauuaaaggaggcuuugugcaucaaaggauggcaucuaagaucggucggugguacucccguacuaugucaaaaaccaagcgcauggggaugggccucuauguaaaguacgacggagaccccugggcugauagugacgcccuugcuuucagcggcguuaugguguccauggaggaaccggggugguacucuuuuggauucgaaauaaaagauaagaaaugcgacgucccuuguauugguaucgagauggugcacgauggcgggaaggaaacauggcauagcgccgcaacugccaucuauugccugaugggaucaggccaguugcuaugggacaccgugacaggugucaacauggcucuguga

SEQ ID NO: 156717 - RNA, 1401 nt, Artificial Sequence; identical to SEQ ID NO: 156675
  derived and/or modified CDS sequence (opt3) from neuraminidase__InfluenzaB__ABL77226

SEQ ID NO: 156718 - RNA, 1401 nt, Artificial Sequence
  derived and/or modified CDS sequence (opt3) from neuraminidase__InfluenzaB__ABL77237
augcugcccagcaccauccagacacucacucuuuuccugacguccggcgggguguuguuaucucuguacgucucagccagucuaagcuaucuccuguacuccgacauucuucugaaguuuucuccuaccgagauaacagcuccaacuaugccguuggauugcgcaaacgccucgaauguucaagcggugaacagaucagcuaccaaaggaguaacacuccugcugcccgaaccugaguggaccuauccaaggcucagcugucccgguaguacuuuccagaaggccuuacugaucuccccucaccgguuuggcgaaacaaaaggaaauucugcaccacuuauuauccgcgagcccuucauugccugcgggccuaacgaauguaagcauuuugcuuugacccacuacgcagcccagccaggcgguuauuacaaugggacgcgaggagaccguaacaaacugagacaucuaaucagcgugaagcucggcaagauaccgacugucgaaaauuccaucuuccacauggcugccuggucaggcagugcgugccaugaugggaaagaguggaccuauauuggaguggacggucccgauaacaaugcacugcuuaagaucaaauacggcgaggccuacacagacacuuaucacagcuacgcuaacaauauucugaggacccaggagucugccuguaacugcaucgggggaaauuguuauuugaugauaacagauggcuccgcaucagguguuagcgaaugccgguuucucaagauucgcgaggggagaaucauuaaagagaucuucccuaccggaagggugaagcacacggaagaguguacuugcggcuuugcuaguaacaagacaaucgaaugugccugccgggacaauucuuacaccgcgaaacgcccauucgucaagcugaacguggagacugauacagccgaaauucgauuaaugugcaccgacacguaucuggauacccccagaccugacgauggcuccauaacagggccaugugagagcaacggagacaaagguucgggcgggaucaagggaggcuuuguacaucaaaggauggcaucuaaaauuggucggugguacucccguacuaugucaaagaccgagcgcauggggaugggccucuauguuaaauacgacggagaucccugggcugacagugaugcccuugcuuucagcggcgugauggucuccaugaaggaaccggggugguacucuuuuggauucgagaucaaggacaaaaagugcgaugugccuuguauagguauugaaauggugcacgacggcgggaaagagacauggcauagcgccgcaacugccaucuauugccugaugggaucaggccaguugcuaugggauaccgucacagguguugacauggcucuguga

SEQ ID NO: 156719 - RNA, 1401 nt, Artificial Sequence
  derived and/or modified CDS sequence (opt3) from neuraminidase__InfluenzaB__ABL77248
augcugcccagcaccauccagacacucacucuuuuccugacguccggcgggguguuguuaucucuguacgucucagcccuacucaguuaucugcuuuacagcgacauucuguugaaguuuuccccuaccaaaauaaucgcuccaacaaugucucucgauugcgcaaacgccucgaauguucaagcggcuaaccacucagccacuaaggagaugaccuuccugcugccggaacccgaguggacauauccuagacucagcugucagggaaguaccuuucagaaagcauuacugauuuccccacauagguucggugaagccaagggcaauucugcuccccuuaucauucgggagccuuuuaucgcaugcgggccaaaagaauguaagcacuucgccuugacucauuacgcugcccagcccggaggcuauuacaacgguacacgcgaggaccgaaauaagcugcgucaccuaauaagcgugaaccucgggaaaaucccuaccguagaaaauuccauuuuucauauggcggcauggucaggaagugccugccacgauggcagagaguggacguauaucggcguggacgggccagauagcaacgcucugauuaagaucaaauacggagaggccuacacugacaccuaucacucuuacgcaaauaacauacuuaggacacaagaauccgcuuguaauugcauugguggcgauuguuaucugaugaucacugacgggucagccagcggaauuaguaagugccgguucuugaaaauccgcgagggcagaaucauuaaggagauauuuccgaccgguagggucgaacauacagaggaauguaccugcggguucgcgucuaacaagacgaucgagugugccugccgggauaauuccuacacugcaaaacgccccuuugugaagcucaacguugaaacagacaccgcugagauucgacugaugugcacugagacauauuuagauaccccuagaccagacgauggaagcaucacgggccccugugaaucgaauggcgagaaagggaggggagguauaaagggcggguucgugcaccagcggauggccucuaaaauuggacguugguacucccgcaccaugucaaagacagaaagaaugggcauggagcuguaugucaaauacgacggugacccuuggacugauagugacgcucucgccccaagcggggugaugguauccaugaaggaacccggcugguacucuuuuggauucgagaucaaggauaaaaagugcgacguuccguguaucggcauugagauggugcaugauggggguaaaaagaccuggcacagcgcagccacagcuaucuauugccuuaugggaucaggccagcuguugugggacacugucaccgggguggauauggcgcuauga

SEQ ID NO: 156720 - RNA, 1401 nt, Artificial Sequence
  derived and/or modified CDS sequence (opt3) from neuraminidase__InfluenzaB__ABL77259
augcugcccagcaccauccagacacucacucuuuuccugacguccggcgggguguuguuaucucuguacgucucagccagucuaagcuaucuccuguacuccgacauucuucugaaguuuucuccuaccgagauaacagcuccaaaaguuccguuggauugcgcaaacgccucgaaugugcaagcgguaaacagaucagcuacuaagggaaugacccuccugcugagcgaacccgaguggacauauccuaggcucaguugucaggguuccaccuuccagaaagccuuacugaucucuccacaccgguuuggcgaaacucgcgggaauagcgcaccccuuauuauccgagagccuuucauugccugcggaccaaaggaauguaaacauuuugcuuugacacacuacgcagcccagcccggcgguuauuacaacgggacccgugaggacagaaauaagcugaggcaucuaaucuccgugaagcucggaaaaauaccuacggucgagaacucaaucuuccacauggcugccuggaguggcagcgcgugccaugauggccgggaauggacuuauauugggguggacggaccagauucuaaugcacugaucaagauuaaauacggugaggccuacaccgacacauaucacuccuacgcuaacaauauccuucgcacucaagaaucagccuguaacugcauaggcggggauuguuaucugaugauuaccgacggaagcgcaaguggcaucucuaagugcagauuuuugaaaauuagggagggucggaucaucaaggagauuuucccgacagggcgcguugaacacaccgaggaauguacgugcggauuugcuuccaauaagacuauagagugugccugccgagauaacagcuacacagcgaaaagacccuucgugaagcucaaugucgaaaccgacacugccgagaucaggcugaugugcacagagaccuauuuagauacgccucggccagacgauggcucgauuaccggccccugugaaucuaacggggacaaaggacgugguggcaucaaagggggauuugugcaucagcgcauggcauccaagauaggcagaugguacucaaggacaaugaguaagacugagcggauggguauggaacuguauguaaaauacgacggggauccuuggaccgacagcgaugcucucgccccauccggcguuauggugucuaugaaggagcccggaugguacagcuucggcuuugaaauuaaggacaaaaagugcgaugucccguguaucgggaucgagauggugcacgacggagguaaaaagacauggcauucagcugccacugcaauuuauugccuuaugggcagugggcagcuguugugggauaccgugacaggagucgacauggcccuauga

SEQ ID NO: 156721 - RNA, 1401 nt, Artificial Sequence
  derived and/or modified CDS sequence (opt3) from neuraminidase__InfluenzaB__ABL77270
augcugcccagcaccauccagacacucacucuuuuccugacguccggcgggguguuguuaucucuguacgucucagccagucuaagcuaucuccuguacuccgacauucuucugaaguuuucuccuaccgagauaacagcuccaacuaugccguuggauugcgcaaacgccucgaauguucaagcggugaacagaucagcuaccaaaggaaugacacuccugcugcccgaaccugaguggaccuauccaaggcucagcugucccgguaguacuuuccagaaggccuuacugaucuccccucaccgguuuggcgaaacacgcggaaauucugcaccacuuauuauccgagagcccuucauugccugcgggccuaaagaauguaagcauuuugcuuugacccacuacgcagcccagccaggcgguuauuacaacgggacgcgugaggacagaaauaaacugaggcaucuaaucagcguaaagcucggaaagauaccgacuguggagaacuccaucuuccacauggcugccuggucaggcagugcgugccaugauggccgggaauggaccuauauuggggucgacggacccgauagcaaugcacugaucaaaauuaaguacggugaggccuacacagacacuuaucacucuuacgcuaacaauauccuucgcacccaggaauccgccuguaacugcauaggcggggauuguuaucugaugauuacagacggaucagcaagcggcaucaguaaaugcagauuuuugaagauuagggagggucggaucaucaaagagauuuucccuaccgggcgcguggaacacacggaggaauguacuugcggauuugcuucuaauaagacaauagagugugccugccgagauaacuccuacaccgcgaagagaccauucguuaaacucaauguggaaacugacacagccgagaucaggcugaugugcaccgagacguauuuagauacaccccggccugacgauggcagcauuaccggcccaugugaaucgaacggggacaagggacgugguggcaucaaagggggauuuguccaucaacgcauggcaucuaagauaggcagaugguacuccaggacuaugucaaaaaccgagcggauggguauggaacuguaugugaaguacgacggggaucccuggacagacagugaggcucucgccccgagcggcguaaugguuuccauggaggaaccuggaugguacucuuucggcuuugagauuaaagauaagaagugcgacgugcccuguaucgggaucgaaaugguccacgauggagguaaaaagacuuggcauagcgcugccaccgcaauuuauugccuuaugggcucagggcagcuguugugggacacagugaccggaguggauauggcccuauga

SEQ ID NO: 156722 - RNA, 1401 nt, Artificial Sequence
  derived and/or modified CDS sequence (opt3) from neuraminidase__InfluenzaB__ABL77281
augcugcccagcaccauccagacacucacucuuuuccugacguccggcgggguguuguuaucucuguacgucucaguuagucuaagcuaucuccuguacuccgacauucuucugagauuuucuccuaccgagauaacagccccaacuaugccguuggauugcgcuaacgcaucgaaugugcaagccguaaacaggucagcgaccaagggaaugacacuccggcugcccgaaccugaguggaccuauccacgccugagcugucccgguaguacuuuccagaaagcucucuuaaucuccccucaccgauuuggcgaaacacguggaaauucugccccacugauuaucagagagcccuucauugcaugcgggccuaaggaauguaaacauuuugcccuuacccacuacgcugcacagccaggcgguuauuacaacgggacgagggaggaccggaauaaguugcgccaucugaucagcgugaaacuaggaaagauaccgacugucgagaacuccaucuuccacauggccgcuuggucaggcagugccugccaugauggcagagaauggaccuauauugggguggacggacccgauagcaaugcgcucaucaagauuaaauacggugaggcauacacagacacuuaucacucuuacgccaacaauauccugaggacccaggaauccgcuuguaacugcauaggcggggauuguuaucuuaugauuacagacggaucagccagcgagaucaguaagugccgguuucugaaaauucgcgagggccgaaucaucaaggaaauuuucccuaccgguagaguugagcacacggaagaguguacuugcggguuugcaucuaauaaaacaauagaaugugcuugcagggauaacuccuacaccgccaagcggccauucgugaaguugaaugucgagacugacacagcggagauccgucucaugugcaccgaaacguaucuggauacaccccgcccugacgauggaagcauuaccggcccaugugagucgaacggcgacaaagggagaggagguaucaagggcggguuugugcaucaaaggauggccucuaaaauaggacggugguacucccgaacuaugucaaagaccgaacgcaugggcauggaguuauauguaaaauacgacggugaucccuggacagacagugaagcacuggcuccgagcgggguuaugguguccauggaggagccuggcugguacucuuucggauuugaaauuaaggauaaaaagugcgacguccccuguaucggcaucgagauggugcacgaugggggaaagaaaacuuggcauagcgccgcuaccgccauuuauugccucauggguucaggccagcuucugugggacacagugaccggggucgauauggcauuguga

SEQ ID NO: 156723 - RNA, 1401 nt, Artificial Sequence
  derived and/or modified CDS sequence (opt3) from neuraminidase__InfluenzaB__ABL77292
augcugcccagcaccauccagacacucacucuuuuccugacguccggcgggguguuguuaucucuguacgucucagccagucuaagcuaucuccuguacuccggaguucuucugaaguuuucuccuaccgagauuacagcuccaacuaugccguuggacugcgcaaacgccucgaaugugcaagcgguaaacagaucagcuaccaaaggugugacacuccugcugcccgaaccugaguggaccuauccaaggcucagcugucccggcaguacuuuccagaaggccuuacugauauccccucaccgguuuggggaaacacgcggaaauucugcaccacuuaucauucgagagcccuucaucgccugcggcccuaaagaauguaagcauuuugcuuugacccacuacgcagcccagccagguggguauuacaacggaacgcgugaggauagaaauaaaaugaggcaucugauuagcgucaagcuaggcaagaucccgacuguggagaacuccauauuccacauggcugccuggucaggcagugcgugccaugacgggcgggaauggaccuauaucggaguugauggucccgacagcaaugcacucauuaaaaucaaguacggcgaggccuacacagauacuuaucacucuuacgcuaacaauauucugcgcacccaggaauccgccuguaacugcaucgggggagacuguuaucuuaugauaacagauggcucagcaagcgguauuaguaaaugcagauuucugaagaucagggaggggcggauuaucaaagagaucuucccuaccggacgcguggaacacacggaggaauguacuugcggcuuugcuucuaauaagacaauugagugugccugccgagacaacuccuacaccgcgaagagaccauucgucaaauugaauguggaaacugauacagccgagauaaggcucaugugcaccgagacguaucuggacacaccccggccugaugacggcagcaucaccgggccaugugaaucgaacggagauaaggguuuaggcgggauuaaaggaggcuuuguacaucaacguauggcaucuaagaucggucgcugguacuccagaacuaugucaaaaaccgagaggauggggauggaacuguauguuaaguacgacggcgaccccuggacagauagugacgcucucgcccuuagcggagugauggucuccauggaggaaccgggcugguacucuuucggguuugagauaaaagauaagaagugcgacgugccuuguauuggaaucgagauggugcacgaugguggcaaaaagacuuggcauagcgcugccaccgcaaucuauugccugauggggucaggacaguugcuaugggacacagucaccggcguugauauggcccuguga

SEQ ID NO: 156724 - RNA, 1398 nt, Artificial Sequence
  derived and/or modified CDS sequence (opt3) from neuraminidase__InfluenzaB__ABL77303
augcugcccagcaccauccagacacucacucuuuuccugacguccggcgggguguuguuaucucuguacgucucagcccuacucaguuaucugcuuuacagcgacauucuguugaaguuuuccccuaaaauaaucgcuccaaccauuucucucgauugcgcaaacgccucgaauguucaagcggugaaccacucagcuacaaaggagaugacuuuccugcugccggaacccgaguggaccuauccuagacucagcugucagggaaguaucuuucagaaagccuuacugauuuccccacauagguucggugaagcaaagggcaauucugcuccccuuaucauacgggagccuuuuaucgccugcgggccaaaagaauguaagcacuucgcauugacacauuacgccgcucagcccggaggcuauuacaacgguacccgcgaggaccgaaauaagcugcgucaccuaauuagcguaaaccucgggaaaaucccuacuguggaaaauuccauuuuucauauggccgcguggucaggaagugcaugccacgauggcagagaguggacauauaucggcgucgacgggccagauagcaacgcccugauaaagauuaaauacggagaggcuuacaccgacacguaucacucuuacgccaauaacauccuuaggacucaagaauccgcauguaauugcauugguggcgauuguuaucugaugaucaccgacgggucagcuagcggaaucaguaagugccgguucuugaaaauucgcgagggcagaauaaucaaggagauuuuuccgacagguaggguggaacauacugaggaauguaccugcggguucgccucuaacaagacaaucgagugugcgugccgggauaauuccuacaccgccaaacgccccuuuguuaagcucaacguggaaacggacacugcagagauacgacugaugugcacagagaccuauuuagauacuccuagaccagacgauggaagcauuacaggccccugugaaucgaauggcgacaaagggaggggaggugucaagggcggguucgugcaccagcggaucgcuucuaaaaucggacguugguacucccgcaccaugucaaagacggagagaaugggcauggaacuguauguaaaauacgacggugauccuuggaccgacagugaugcccucgcuccaagcgggguuaugguguccauggaggaacccggcugguacucuuuuggauucgagauuaaggacaagaaaugcgaugucccguguaucggcauugagauggugcaugacgggggaaagaaaacauggcacagcgccgcaacugccauauauugccuuauggguucaggccagcuguugugggauaccgugacaggggucgacauggcucuauga

SEQ ID NO: 156725 - RNA, 1398 nt, Artificial Sequence
  derived and/or modified CDS sequence (opt3) from neuraminidase__InfluenzaB__ABL77314
augcugcccagcaccauccagacacucacucuuuuccugacguccggcgggguguuguuaucucuguacgucucagcccuacucaguuaucugcuuuacagcgacguucuguugaaguuuuccccuaaaauuauagcuccaaccaugucucucgauugcgcaaacgccucgaaugugcaagcgguaaaccacucagcuacagaggaaaugacuuuccugcugccggagcccgaauggaccuauccuagacucagcugucagggaaguacauuucagaaggccuuacugaucuccccacauagguucggugaggcaaaaggcaauucugcuccccuuauuauccgggaaccuuuuauugcuugcgggccaaaggaguguaaacacuucgcauugacccauuacgccgcucagcccggaggcuauuacaacgguacucgcgaggaccgaaauaagcugcgucaccuaaucagcgugaaccucgggaagauaccuacagucgaaaauuccaucuuucauauggccgcguggucaggaagugcaugccacgauggcagagaguggaccuauauuggcguggacgggccagauagcaacgcccugaucaaaauuaaguacggagaagccuacacggacacuuaucacucuuacgccaauaacauccuuaggacccaagaguccgcauguaauugcauagguggcgauuguuaucugaugauuacagacgggucagcuagcggaaucaguaaaugccgguucuugaagauucgcgagggcagaaucaucaaagaaauuuuuccgacugguaggguugagcauaccgaagaguguacaugcggguucgccucuaacaagaccauagaaugugcgugccgggauaauuccuacacggccaagcgccccuuugugaaacucaacgucgagacugacacagcagagauccgacugaugugcaccgaaacuuauuuagauacaccuagaccagacgauggaagcauuaccggccccugugagucgaauggcgacaaggggcacggagguaucaaaggcggguucgugcaucagaggauggcuucuaagauaggacggugguacucccguacgaugucaaaaaccaagcgcaugggcauggaacuguauguaaaauacgacggugauccuuggacagacagugaugcccucgcuccaagcgggguuaugguguccauggaggaacccggcugguacucuuuuggauucgagauuagagacaagaagugcgaugucccguguaucggcaucgagauggugcacgacggggguaaaaagacuuggcacagcgccgcaaccgccauuuauugccuuaugggaucaggccagcuguugugggauacagugacuggggucgacauggcucuauga

SEQ ID NO: 156726 - RNA, 1401 nt, Artificial Sequence
  derived and/or modified CDS sequence (opt3) from neuraminidase__InfluenzaB__ABL77325
augcugcccagcaccauccagacacucacucuuuuccugacguccggcgggguguuguuaucucuguacgucucagcccuacucaguuauagccuguacuccgacauucuucugaaguuuucuccuaccaaaacaauagcuccaacuaugucguuggauugcgcaaacgccucaaauguucaagcggugaaccacagcgcuaccaagggaaugacacuccugcugccggagcccgaauggaccuauccuagacucaguugucaggguuccacuuuccagaaagccuuacugaucucuccacauagguuuggcgagacaaaggggaauagcgcaccccuuauuauccgggaaccuuucauugccugcggaccaaaagaguguaagcacuuugcuuugacccauuacgcagcccagcccggcgguuauuacaacgggacgcgcgaagaccgaaauaagcugcgucaccuaaucuccguaucacucggaaaaauaccuacuguggagaacaguaucuuccauauggcugccuggagcggcucugcgugccacgauggcagagaguggaccuauauuggggucgacggaccagauuccaaugcacugaucaagauuaaauacggugaagccuacacagacacuuaucacucauacgcuaacaauauccuuaggacccaagagagcgccuguaacugcauaggcggggauuguuaucugaugauuacagacggaagugcaucuggcaucuccaagugccgguuuuugaaaauucgcgaagguagaaucaucaaggagauuuucccgaccgggaggguggaucauacggaggaauguacuugcggauuugcuagcaauaagacaauagagugugccugccgggacaacucguacaccgcgaaacgccccuucguuaagcucaauguggaaacugauacagccgagauccgacugaugugcaccgaaacguauuuagacaccccuagaccagaugacggcucuauuacaggccccugugaguccaacggggacaaaggaagggguggcaucaaagggggauuuguccaccagcggauggcaucaaagauaggccguugguacagucgcacuaugagcaagaccgagagacuggguauggaacucuaugugaaauacgauggggacccuuggacagauuccgacgcucuugccccaucuggcguaaugguuagcgcugaggaacccggaugguacucauucggcuuugagauuaaggauaagaaaugcgacgugccguguaucgggaucgaaaugguccaugauggagguaagaaaacuuggcacagugccgcaaccgccauuuauugccugaugggcuccgggcaguugcuaugggacacagugaccggaguggauauggcucuguga

SEQ ID NO: 156727 - RNA, 1401 nt, Artificial Sequence
  derived and/or modified CDS sequence (opt3) from neuraminidase__InfluenzaB__ABL77336
augcugcccagcaccauccagacacucacucuuuuccugacguccggcgggguguuguuaucucuguacgucucagccagucuaagcuaucuccuguacuccgacauucuucugaaguuuucuccuaccgagauaacagcuccaccgaugcccuuggauugcgcaaacgccucgaauguucaagcggugaacagaucagcuacuaaaggaguaacccuccugcugccugaaccagaguggacauaucccaggcucagcuguccugguaguaccuuccagaaggccuuacugaucuccccacaccgguuuggcgaaacucgcggaaauucugcaccccuuauuauccgagagccuuucauugccugcgggccaaaagaauguaagcauuuugcuaucacacacuacgcagcccagccgggcgguuauuacaacgggacccgugaggacagaaauaaauugaggcaucugauaagcgugaagcuaggaaagauccccacggucgagaacuccauuuuccacauggcugccuggucaggcagugcgugccaugauggccgggaauggacuuauaucgggguggacggaccugauagcaaugcacuccugaaaauuaaguacggugaggccuacaccgacacauaucacucuuacgcuaacaauauccuucgcacucaggaauccgccuguaacugcauaggcggggauuguuaucugaugauuaccgacggaucagcaagcggcaucaguaaaugcagauuuuugaagauuagggagggucggaucaucaaagagauuuucccaacagggcgcguugaacacaccgaggaauguacgugcggauuugcuucuaauaagacuauagagugugccugccgagauaacuccuacacagcgaagagacccuucgugaaacucaaugucgaaaccgacacugccgagaucaggcugaugugcacagagaccuauuuagauacgccucggccagacgauggcagcauuaccggccccugugaaucgaacggggacaagggacgugguggcaucaaagggggauuugugcaucaacgcauggcaucuaagauaggcagaugguacuccaggacaaugucaaaaacugaccggauggguauggagcuguauguaaaguacgauggggacccguggaccgauagugacgcucucgcccuuagcggcguuaugguguccauggaggaaccuggaugguacucuuucggcuuugaaauuaaagauaagaagugcgacguccccuguaucgggaucgagauggugcacgauggagguaaaaagacauggcauagcgcugccacuaccauuuauugccugaugggcucagggcaguugcuaugggacacagugaccggagucgauauggcacuguga

SEQ ID NO: 156728 - RNA, 1401 nt, Artificial Sequence
  derived and/or modified CDS sequence (opt3) from neuraminidase__InfluenzaB__ABL77347
augcugcccagcaccauccagacacucacucuuuuccugacguccggcgggguguuguuaucucuguacgucucagccagucuaagcuaucuccuguacuccgacauucuucugaaguuuucuccuaccaaaauaacagcuccaacuaugccguuggauugcgcaaacgccucgaauguucaagcggugaaccacucagcuaccaagggaguaacacuccugcugcccgagccugaauggaccuauccaagacucagcugucccgguaguacuuuccagaaagccuuacugaucuccccucauagguuuggcgagacacggggaaauucugcaccacuuauuauccgcgaacccuucauugccugcgggccuaaggaguguaaacacuuugcuuugacccauuacgcagcccagccaggcgguuauuacaacgggacgcgagaagaccguaauaagcugagacaccuaaucagcgugaagcucggaaaaauaccgacugucgagaacuccaucuuccauauggcugccuggucaggcagugcgugccacgauggcagggaguggaccuauauugggguggacggacccgauagcaaugcacugcuuaagaucaaauacggugaagccuacacagacacuuaucacucuuacgcuaacaauauucugcggacccaggaguccgccuguaacugcaucggcggggauuguuauuugaugauaacagacggaucagcaagcggcauuagugaaugccgcuuucucaagaucagagaggguaggauuaucaaagagaucuucccuaccgggcggguugaacauacggaggaauguacuugcggauuugcuucuaauaagacaauugagugugccugccgcgauaacuccuacaccgcgaagcgaccauucgugaaacugaaugucgaaacugacacagccgagauaagauuaaugugcaccgagacguaucuggauacccccaggccugacgauggcagcaucacaggcccaugugaaucgaacggggacaagggaucugguggcauuaaagggggauuugugcaccaacggauggcauccaagaucggccguugguacucacgcacuaugaguaaaaccaagagaauggguauggggcucuauguaaaauacgacggcgaucccuggacagacagcgaugcucuugcccuguccggaguuauggugucuauggaggaaccgggcugguacagcuucggguuugagauaaaggacaagaaaugcgaugucccuuguauuggaaucgaaauggugcaugacgguggcaagaaaacuuggcacucagcugccaccgcaaucuauugcuugauggggaguggacagcuacugugggauacagugaccggcgucgacauggcccucuga

SEQ ID NO: 156729 - RNA, 1398 nt, Artificial Sequence
  derived and/or modified CDS sequence (opt3) from neuraminidase__InfluenzaB__ABL77380
augcugcccagcaccauccagacacucacucuuuuccugacguccggcgggguguuguuaucucuguacgucucagcccuacucaguuaucugcuuuacagcgacauucuguugaaguuuuccccuaaaauaaucgcuccaaccacaucucucgauugcgcaaacgccucgaauguucaagcggugaaccacucagcuacuaaggagaugaaauuccugccgcccgaaccugaguggaccuauccaagacugagcugucagggaaguacauuucagaaggcccucuuaauuucuccccauagguucggugaagcaaaaggcaauuccgccccucugaucauucgggagccauuuaucgcuugcgggcccaaggaauguaagcacuucgcacuuacccauuacgccgcucagccuggaggcuauuacaacgguacucgcgaggaccgaaauaaauugcgucaccugauaagcguaaaccuagggaagaucccaacaguggaaaauuccauuuuucauauggccgcguggucaggaagugcaugccacgauggcagagaauggaccuauaucggcgucgacgggccggauagcaacgcccucauuaaaaucaaguacggagaggcuuacacggacacuuaucacucuuacgccaauaacauacugaggacccaagaauccgcauguaauugcauugguggcgauuguuaucuuaugaucacagacgggucagcuagcggaauuaguaaaugccgguuccugaagauccgcgagggcagaaucauuaaggagauauuucccacugguaggguggaacauaccgaggaauguacaugcggguucgccucuaacaaaaccaucgagugugcgugccgggauaauuccuacacggccaagcgcccuuuuguuaaauugaacguggaaacugacacagcagagauucgacucaugugcaccgagacuuaucuggauacaccaagacccgacgauggaagcaucaccggcccuugugaaucgaauggcgacaaggggucuggaggugucaaaggcggguucgugcaccagaggauggcuuccaagauaggacggugguacucacguacgaugaguaaaaccaagcgcaugggcauggaguuauauguaaaguacgacggugauccauggacagacagcgaugcccuggcucccuccgggguuauggugucuauggaggagccgggcugguacagcuuuggauucgaaauuaaagacaagaaaugcgaugucccuuguaucggcaucgagauggugcaugacgggggaaagagaacuuggcacucagccgcaaccgccauuuauugccucauggguaguggccagcuucugugggauacagugacuggggucaacauggcuuuguga

SEQ ID NO: 156730 - RNA, 1401 nt, Artificial Sequence
  derived and/or modified CDS sequence (opt3) from neuraminidase__InfluenzaB__ABL77391
augcugcccagcaccauccagacacucacucuuuuccugacguccggcgggguguuguuaucucuguacgucucagccagucuaagcuaucuccuguacuccgacauucuucugaaguuuucuccuaccgagauaacagcuccaacuaugccguuggauugcgcaaacgccucgaauguucaagcggugaacagaucagcuaccaaaggaguaacacuccugcugcccgaaccugaguggaccuauccaaggcucagcugucccgguaguacuuuccagaaggccuuacugaucuccccucaccgguuuggcgaaacaaaaggaaauucugcaccacuuauuauccgcgagcccuucauugccugcgggccuaaggaauguaaacauuuugcuuugacccacuacgcagcccagccaggcgguuauuacaacgggacgcgaggagaccguaauaagcugagacaucuaaucagcgugaagcucggcaaaauaccgacugucgagaacuccaucuuccacauggcugccuggucaggcagugcgugccaugaugggaaggaguggaccuauauuggaguggacggucccgauaauaacgcacugcuuaaaaucaaguacggcgaagccuacacagacacuuaucacagcuacgcuaauaacauucugaggacccaggagucugccuguaauugcaucgggggaaacuguuauuugaugauaacagauggcuccgcaucagguguuagcgaaugccgguuucucaaaauucgcgaggggagaaucauuaaggagaucuucccuaccggaagggugaagcacacggaagaguguacuugcggcuuugcuaguaauaaaacaaucgaaugugccugccgggacaacucuuacaccgcgaagcgcccauucgucaaacugaauguggagacugauacagccgaaauucgauuaaugugcaccgagacguaucuggacacccccagaccugaugacggcuccauaacagggccaugugagagcaacggagauaaggguucgggcgggaucaaaggaggcuuuguacaucaaaggauggcaucuaagauuggucggugguacucccguacuaugucaaaaaccaagcgcauggggaugggccucuauguuaaguacgacggagaccccugggcugauagugacgcccuugcucugagcggcgugauggucuccauggaggaaccggggugguacucuuucggauuugaaaucaaagauaagaaaugcgacgugccuuguauagguauugagauggugcacgauggcgggaaggaaacauggcauagcgccgcaacugccaucuauugcuugaugggaucaggccagcuacugugggacaccgucacagguguugauauggcucucuga

SEQ ID NO: 156731 - RNA, 1401 nt, Artificial Sequence
  derived and/or modified CDS sequence (opt3) from neuraminidase__InfluenzaB__ABL84344
augcugcccagcaccauccagacacucacucuuuuccugacguccggcgggguguuguuaucucuguacgucucagccagucuaagcuaucuccuguacuccgacauucuucugaaguuuucuucgaccgagauaacagcuccuacuaugccauugaacugcgcaaaugccucaaacguucaagcggugaaucacagcgcuaccaaaggaguaacacucccgcugcccgaaccugaguggaccuauccaagacugaguugucccgguuccacuuuccagaaggcccucuuaaucucuccucauagguuuggcgaaacaaaagggaacagcgcaccacugauuauccgggagcccuucauugccugcggaccuaaggaauguaaacacuuugcucuuacccauuacgcagcccagccaggcgguuauuacaaugggacgcgcgaggaucgaaacaaguugcgucaccugaucuccgugaagcuaggaaaaauaccgacugucgaaaauucaaucuuccauauggcugccuggaguggcagcgcgugccacgacggcagagaauggaccuauauugggguggauggacccgacucuaacgcacuccugaagaucaaauacggugaggccuacacagauacuuaucacuccuacgcuaauaacauucuuaggacccaggaaucagccuguaauugcaucggcggggacuguuaucugaugauaacagauggaagcgcaaguggcguuucugagugccgguuuuugaagauucgcgaggguagaaucauuaaagaaaucuucccuaccgggaggguggagcauacggaagaguguacuugcggauuugcuuccaacaagacaaucgaaugugccugccgggacaauagcuacaccgcgaagcgcccauucgucaaacucaacguggagacugauacagccgagauucgacugaugugcaccgaaacguauuuagacacccccagaccugaugacggcucgauaacaggcccaugugagucuaauggggauaagggauccgguggcaucaaagggggauuuguacaccaaaggauggcaucaaagauuggccggugguacagucguacuaugagcaaaaccaagcgcauggguauggggcuguauguuaaauacgacggcgaccccuggaucgauuccgacgcucucacacuuucuggagugauggucagcauggaggagccgggcugguacucauucggguuugaaauaaaggauaagaaaugcgacgugccuuguauuggaaucgagauggugcaugaugguggcaaggagacuuggcacagugccgcuaccgccaucuauugccugaugggguccggacaguugcuaugggacacagucaccggcguugauauggcacuguga

SEQ ID NO: 156732 - RNA, 1401 nt, Artificial Sequence
  derived and/or modified CDS sequence (opt3) from neuraminidase__InfluenzaB__ABN50397
augcugcccagcaccauccagacacucacucuuuuccugacguccggcgggguguuguuaucucuguacgucucagccagucuaagcuaucuccuguacuccgacauucuucugaaguuuucuccuaccgagauaacagcuccaacuaugccguugaacugcgcaaaugccucgaacguucaagcggugaauagaucagcuaccaaaggaguaacacuccugcugcccgaaccugaguggaccuauccaaggcucagcugucccgguaguacuuuccagaaggccuuacugaucuccccucaccgguuuggcgaaacaaaagggaacucugcaccacuuauuauccgcgagcccuucauugccugcggaccuaaggaauguaaacauuuugcuuugacccacuacgcagcccagccaggcgguuauuacaaugggacgcgagaggaucguaacaagcugagacaucuaaucagcgugaagcucggaaaaauaccgacugucgaaaauuccaucuuccacauggcugccuggucaggcagugcgugccaugacggcagggaauggaccuauauugggguggauggacccgacagcaacgcacugcuuaagaucaaauacggugaggccuacacagauacuuaucacucuuacgcuaauaacauucugcggacccaggaauccgccuguaauugcaucggcggggacuguuauuugaugauaacagauggaucagcaagcggcauuagugagugccgcuuucucaagaucagagaggguaggauuaucaaagaaaucuucccuaccgggcggguugagcacacggaagaguguacuugcggauuugcuucuaacaagacaauugaaugugccugccgcgacaauuccuacaccgcgaagcgaccauucgugaaacugaacgucgagacugauacagccgagauaagauuaaugugcaccgaaacguaucuggacacccccaggccugaugacggcagcaucacaggcccaugugagucgaauggggauaagggaucugguggcauuaaagggggauuugugcaucaacggauggcauccaagaucggccguugguacucacgcacuaugaguaaaaccaagagaauggguauggggcucuauguaaaauacgacggcgaccccuggauagauagcgacgcucuuacacuguccggaguuauggugucuauggaggagccgggcugguacagcuucggguuugaaauuaaggauaagaaaugcgacgucccuuguaucggaaucgagauggugcacgaugguggcaagaaaacuuggcauucagccgcuaccgccauuuauugcuugauggggaguggacagcuacugugggacacagugaccggcgucgauauggaccucuga

SEQ ID NO: 156733 - RNA, 1401 nt, Artificial Sequence
  derived and/or modified CDS sequence (opt3) from neuraminidase__InfluenzaB__ABN50408
augcugcccagcaccauccagacacucacucuuuuccugacguccggcgggguguuguuaucucuguacgucucagccagucuaagcuaucuccuguacuccgacauucuucugaaguuuucuccuaccgagauaacagcuccaacuaugccguugaacugcgcaaaugccucgaacguucaagcggugaauagaucagcuaccaaaggaguaacacucccccugccugaaccagaguggaccuaucccaggcugagcuguccugguaguacuuuccagaaggcccucuuaaucuccccacaccgguuuggcgaaacaaaagggaacucugcaccccugauuauccgcgagccuuucauugccugcggaccaaaggaauguaaacauuuugcucuuacccacuacgcagcccagccgggcgguuauuacaaugggacgcgagaggaucguaacaaguugagacaucugaucagcgugaagcuaggaaaaauacccacugucgaaaauuccaucuuccacauggcugccuggucaggcagugcgugccaugacggcagggaauggaccuauauugggguggauggaccugacagcaacgcacuccugaagaucaaauacggugaggccuacacagauacuuaucacucuuacgcuaauaacauucuucggacccaggaauccgccuguaauugcaucggcggggacuguuaucugaugauaacagauggaucagcaagcggcauuagugagugccgcuuuuugaagaucagagaggguaggauuaucaaagaaaucuucccaaccgggcggguugagcacacggaagaguguacuugcggauuugcuucuaacaagacaauugaaugugccugccgcgacaauuccuacaccgcgaagcgacccuucgugaaacucaacgucgagacugauacagccgagauaagacugaugugcaccgaaacguauuuagacaccccuaggccagaugacggcagcaucacaggccccugugagucgaauggggauaagggaucugguggcauuaaagggggauuugugcaucaacggauggcauccaagaucggccguugguacucacgcacuaugaguaaaaccaagagaauggguauggggcuguauguaaaauacgacggcgacccguggauagauagcgacgcucucacacuuuccggaguuauggugucuauggaggagccuggcugguacagcuucggguuugaaauuaaggauaagaaaugcgacguccccuguaucggaaucgagauggugcacgaugguggcaagaaaacuuggcauucagccgcuaccgccauuuauugccugauggggaguggacaguugcuaugggacacagugaccggcgucgauauggcacuguga

SEQ ID NO: 156734 - RNA, 1401 nt, Artificial Sequence
  derived and/or modified CDS sequence (opt3) from neuraminidase__InfluenzaB__ABN50419
augcugcccagcaccauccagacacucacucuuuuccugacguccggcgggguguuguuaucucuguacgucucagccagucuaagcuaucuccuguacuccgacauucuucugaaguuuucuccuaccgagauaacagcuccaacuaugccguuggauugcgcaaacgccucgaauguucaagcggugaacagaucagcuaccaaaggaguaacacuccugcugcccgaaccugaguggaccuauccaaggcucagcugucccgguaguacuuuccagaaggccuuacugaucuccccucaccgguuuggcgaaacaaaaggaaauucugcaccacuuauuauccgcgagcccuucauugccugcgggccuaaggaauguaaacauuuugcuuugacccacuacgcagcccagccaggcgguuauuacaacgggacgcgaggagaccguaauaagcugagacaucuaaucagcgugaagcucggcaaaauaccgacugucgagaacuccaucuuccacauggcugccuggucaggcagugcgugccaugaugggaaggaguggaccuauauuggaguggacggucccgauagcaaugcacugcuuaaaaucaaguacggcgaagccuacacagacacuuaucacucuuacgcuaacaauauucugaggacccaggaguccgccuguaacugcaucgggggaaauuguuauuugaugauaacagauggcucagcaagcgguauuagugaaugccgguuucucaaaauccgcgaggggagaauuaucaaggagaucuucccuaccggaaggguuaagcacacggaagaguguacuugcggcuuugcuucuaacaaaacaauugaaugugccugccgggacaauuccuacaccgcgaagcgcccauucgugaaacugaacgucgagacugauacagccgaaauacgauuaaugugcaccgagacguaucuggacacccccagaccugaugacggcagcaucacagggcucugugagucgaauggagauaaggguucuggcgggauuaaaggaggcuuugugcaucaaaggauggcauccaagaucggucggugguacucacguacuaugaguaaaaccaagcgcauggggaugggccuuuauguaaaguacgacggagacccauggacagauagcgacgcucuggccuuguccggcguuauggugucuauggaggaacccgggugguacagcuucggauuugaaauaaaagauaagaaaugcgacgucccguguauugguaucgagauggugcacgauggcgggaaggaaacuuggcauucagcugccaccgcaaucuauugccuaaugggaaguggccagcugcucugggacacagugaccggugucgauauggcccuguga

SEQ ID NO: 156735 - RNA, 1401 nt, Artificial Sequence
  derived and/or modified CDS sequence (opt3) from neuraminidase__InfluenzaB__ABN50430
augcugcccagcaccauccagacacucacucuuuuccugacguccggcgggguguuguuaucucuguacgucucagccagucuaagcuaucuccuguacuccgacauucuucugaaguuuucuccuaccgagauaacagcuccaacuaugccguuggauugcgcaaacgccucgaauguucaagcggugaacagaucagcuaccaaaggaguaacacuccugcugcccgaaccugaguggaccuauccaaggcucagcugucccgguaguacuuuccagaaggccuuacugaucuccccucaccgguuuggcgaaacaaaaggaaauucugcaccacuuauuauccgcgagcccuucauugccugcgggccuaaggaauguaaacauuuugcuuugacccacuacgcagcccagccaggcgguuauuacaacgggacgcgaggagaccguaauaagcugagacaucuaaucagcgugaagcucggcaaaauaccgacugucgagaacuccaucuuccacauggcugccuggucaggcagugcgugccaugaugggaaggaguggaccuauauuggaguggacggucccgauagcaaugcacugcuuaaaaucaaguacggcgaagccuacacagacacuuaucacucuuacgcuaacaauauucugaggacccaggaguccgccuguaacugcaucgggggaaauuguuauuugaugauaacagauggcucagcaagcgguauuagugaaugccgguuucucaaaauccgcgaggggagaauuaucaaggagaucuucccuaccggaaggguuaagcacacggaagaguguacuugcggcuuugcuucuaacaaaacaauugaaugugccugccgggacaauuccuacaccgcgaagcgcccauucgugaaacugaacgucgagacugauacagccgaaauacgauuaaugugcaccgagacguaucuggacacccccagaccugaugacggcagcaucacagggccaugugagucgaauggagauaaggguucuggcgggauuaaaggaggcuuugugcaucaaaggauggcauccaagaucggucggugguacucacguacuaugaguaaaaccaagcgcauggggaugggccucuauguaaaguacgacggagaccccuggacagauagcgacgcucuugcccuguccggcguuauggugucuauggaggaaccggggugguacagcuucggauuugaaauaaaagauaagaaaugcgacgucccuuguauugguaucgagauggugcacgauggcgggaaggaaacuuggcauucagcugccaccgcaaucuauugcuugaugggaaguggccagcuacugugggacacagugaccggugucgauauggcccucuga

SEQ ID NO: 156736 - RNA, 1401 nt, Artificial Sequence; identical to SEQ ID NO: 156718
  derived and/or modified CDS sequence (opt3) from neuraminidase__InfluenzaB__ABN50463

SEQ ID NO: 156737 - RNA, 1401 nt, Artificial Sequence; identical to SEQ ID NO: 156632
  derived and/or modified CDS sequence (opt3) from neuraminidase__InfluenzaB__ABN50474

SEQ ID NO: 156738 - RNA, 1401 nt, Artificial Sequence
  derived and/or modified CDS sequence (opt3) from neuraminidase__InfluenzaB__ABN50485
augcugcccagcaccauccagacacucacucuuuuccugacguccggcgggguguuguuaucucuguacgucucagccagucuaagcuaucuccuguacuccgacauucuucugaaguuuucuccuaccgagauaacagcuccaacuaugccguuggauugcgcaaacgccucgaauguucaagcggugaacagaucagcuaccaaaggaguaacacuccugcugcccgaaccugaguggaccuauccaaggcucagcugucccgguaguacuuuccagaaggccuuacugaucuccccucaccgguuuggcgaaacaaaaggaaauucugcaccacuuauuauccgcgagcccuucauugccugcgggccuaaggaauguaaacauuuugcuuugacccacuacgcagcccagccaggcgguuauuacaacgggacgcgaggagaccguaauaagcugagacaucuaaucagcgugaagcucggcaaaauaccgacugucgagaacuccaucuuccacauggcugccuggucaggcagugcgugccaugaugggaaggaguggaccuauauuggaguggacggucccgauagcaaugcacugcuuaaaaucaaguacggcgaagccuacacagacacuuaucacucuuacgcuaacaauauucugaggacccaggaguccgccuguaacugcaucgggggaaauuguuauuugaugauaacagauggcucagcaagcgguauuagugaaugccgguuucucaaaauccgcgaggggagaauuaucaaggagaucuucccuaccggaaggguuaagcacacggaagaguguacuugcggcuuugcuucuaacaaaacaauugaaugugccugccgggacaauuccuacaccgcgaagcgcccauucgugaaacugaacgucgagacugauacagccgaaauacgauuaaugugcaccgagacguaucuggacacccccagaccugaugacggcagcaucacagggccaugugaguuuaauggagauaaggguucgggcgggauuaaaggaggcuucgugcaucaaaggauggcaucuaagaucggucggugguacucccguacuaugucaaaaaccaagcgcauggggaugggccucuauguaaaguacgacggagaccccuggacagauagugacgcucuugcccugagcggcguuaugguguccauggaggaaccggggugguacucuuuuggauucgaaauaaaagauaagaaaugcgacgucccuuguauugguaucgagauggugcacgauggcgggaaggaaacuuggcauagcgcugccaccgcaaucuauugcuugaugggaucaggccagcuacugugggacacagugaccggugucgauauggcccucuga

SEQ ID NO: 156739 - RNA, 1401 nt, Artificial Sequence
  derived and/or modified CDS sequence (opt3) from neuraminidase__InfluenzaB__ABN50496
augcugcccagcaccauccagacacucacucuuuuccugacguccggcgggguguuguuaucucuguacgucucagccagucuaagcuaucuccuguacuccgacauucuucugaaguuuccuucuaccgagauaacagcuccaacuaugccguuggauugcgcaaacgccucgaauguucaagcggugaacagaucagcuaccaaaaggguaacacuccugcugcccgaaccugaguggaccuauccacggcucagcugucccggaaguacuuuccagaaggccuuacugaucuccccucaccgcuuuggugaaacaaaaggcaauucugcaccacuuauuauccgagagcccuucauugccugcgggccuaaggaauguaaacauuuugcuuugacccacuacgcagcccagccaggaggcuauuacaacgguacgcguggggacagaaauaagcugaggcaucuaaucagcgugaagcucggaaaaauaccgacugucgagaacuccaucuuccacauggcugccuggucaggcagugcgugccaugauggcaaggaguggaccuauauugggguggacggacccgauaauaacgcacugcuuaaaaucaaguacggugaagccuacacagacacuuaucacagcuacgcuaauaacauucugcggacccaggagucugccuguaauugcaucggcgggaacuguuauuugaugauaacagauggauccgcaucaggcguuagcgaaugccgcuuucucaaaauuagagaggguaggaucauuaaggagaucuucccuaccgggcggaucaagcacacggaagaguguacuugcggauuugcuaguaauaaaacaauugaaugugccugccgcgacaacucuuacaccgcgaagcgaccauucgugaaacugaaugucgagacugauacagccgaaauaagauuaaugugcaccgagacguaucuggacacccccaggccugaugacggcuccaucacaggcccaugugagagcaacggggauaagggaucggguggcauuaaagggggauuugugcaucaacggauggcaucuaagaucggccguugguacucccgcacuaugucaaaaaccaagagaauggguauggggcucuauguaaaguacgacggcgaccccugggcugauagugacgcccuugcuuucagcggaguuaugguguccauggaggaaccgggcugguacucuuuuggguucgaaauaaaagauaagaaaugcgacgucccuuguauuggaaucgagauggugcacgaugguggcaaggaaacauggcauagcgccgcaacugccaucuauugccugauggggucaggacaguugcuaugggacaccgugacaggcgucaacauggcucuguga

SEQ ID NO: 156740 - RNA, 1401 nt, Artificial Sequence
  derived and/or modified CDS sequence (opt3) from neuraminidase__InfluenzaB__ABN50507
augcugcccagcaccauccagacacucacucuuuuccugacguccggcgggguguuguuaucucuguacgucucagccagucuaagcuaucuccuguacuccgacauucuucugaaguuuucuccuaccgagauaacagcuccaacuaugccguugaacugcgcaaaugccucgaacguucaagcggugaauagaucagcuaccaaaggaguaacacucccccugccugaaccagaguggaccuaucccaggcugagcuguccugguaguacuuuccagaaggcccucuuaaucuccccacaccgguuuggcgaaacaaaagggaacucugcaccccugauuauccgcgagccuuucauugccugcggaccaaaggaaugucgacauuuugcucuuacccacuacgcagcccagccgggcgguuauuacaaugggacgcgugaggauagaaacaaauugaggcaucugaucagcgugaagcuaggaaagauacccacugucgaaaauuccaucuuccacauggcugccuggucaggcagugcgugccaugacggccgggaauggaccuauauugggguggauggaccugacagcaacgcacuccugaaaaucaaguacggugaggccuacacagauacuuaucacucuuacgcuaauaacauucuucgcacccaggaauccgccuguaauugcaucggcggggacuguuaucugaugauaacagauggaucagcaagcggcauuagugagugcagauuuuugaaaaucagggagggucggauuaucaaggaaaucuucccaaccgggcgcguugagcacacggaagaguguacuugcggauuugcuucuaacaaaacaauugaaugugccugccgagacaauuccuacaccgcgaagagacccuucgugaagcucaacgucgagacugauacagccgagauaaggcugaugugcaccgaaacguauuuagacaccccucggccagaugacggcagcaucacaggccccugugagucgaauggggauaaaggaucugguggcauuaaagggggauuugugcaucaacguauggcauccaagaucggccgcugguacucaagaacuaugaguaagaccaaaaggauggguauggggcuguauguaaaguacgacggcgacccguggauagauagcgacgcucucacacuuuccggaguuauggugucuauggaggagccuggcugguacagcuucggguuugaaauuaaagauaagaagugcgacguccccuguaucggaaucgagauggugcacgaugguggcaaaaagacuuggcauucagccgcuaccgccauuuauugccugauggggaguggacaguugcuaugggacacagugaccggcgucgauauggcacuguga

SEQ ID NO: 156741 - RNA, 1401 nt, Artificial Sequence; identical to SEQ ID NO: 156639
  derived and/or modified CDS sequence (opt3) from neuraminidase__InfluenzaB__ABN50518

SEQ ID NO: 156742 - RNA, 1401 nt, Artificial Sequence; identical to SEQ ID NO: 156639
  derived and/or modified CDS sequence (opt3) from neuraminidase__InfluenzaB__ABN50529

SEQ ID NO: 156743 - RNA, 1401 nt, Artificial Sequence; identical to SEQ ID NO: 156632
  derived and/or modified CDS sequence (opt3) from neuraminidase__InfluenzaB__ABN50540

SEQ ID NO: 156744 - RNA, 1401 nt, Artificial Sequence; identical to SEQ ID NO: 156664
  derived and/or modified CDS sequence (opt3) from neuraminidase__InfluenzaB__ABN50551

SEQ ID NO: 156745 - RNA, 1401 nt, Artificial Sequence
  derived and/or modified CDS sequence (opt3) from neuraminidase__InfluenzaB__ABN50562
augcugcccagcaccauccagacacucacucuuuuccugacguccggcggggccuuguuaucucuguacgugucagcucuacucaguuaucugcuuuacagcgacauucuguugaaguuuuccccuaccaaagucauagcaccaacaaugucucucgauuauacuaacgccucgaauguucaagcggugaaccacucagcuaccgaggaaaugacauuccugcugccggagcccgaauggaccuacccuagacucagcugccagggaaguacuuuucagaaggccuuacugaucuccccacauagguucggugaggcaaaaggcaauucugcuccccuuauuauccgggaaccuuuuauugcuugugggccaaaggagugcaaacacuucgcauugacacauuaugccgcucagcccggaggcuacuauaacgguacccgcgaggaccgaaauaagcugcgucaccuaaucagcguaaaccucgggaagauaccuacgguggaaaauuccaucuuucauauggccgcguggucaggaagugcaugucacgauggcagagaguggacuuacauuggcgucgacgggccagauagcaacgcccugaucaaaauuaaguacggagaagccuauaccgacacauaccacucuuaugccaauaacauccuuaggacucaagaguccgcaugcaauuguauagguggcgauugcuaccugaugauuaccgacgggucagcuagcggaaucagucggugucgcuucuugaaaauuagagagggcaggaucaucaaggaaauuuuuccgacaggucggguggagcauaccgaagagugcacguguggguucgccucuaacaaaacuauagaaugcgcgugucgcgauaauuccuauacagccaagcgacccuuuguuaagcucaacguggagaccgacacugcagagaucagacugaugugcacagaaaccuacuuagauacgccuaggccagacgauggaagcauuaccggccccugcgagucgaauggcgacaaagggaacggagguaucaagggcggguucguccaccagcggauggcuucucguauaggacgcugguauuccagaacaaugucaaaaacuaagaggaugggcauggaacuguacgugaaauacgacggugauccuuggaccgacagugaugcccucgcuccaagcgggguaaugguuuccauggaggaacccggcugguauucuuuuggauucgagauuaaggacaaaaagugugaugugccgugcaucggcaucgagaugguccaugacgggggaaagaaaacauggcacagcgccgcaacugccauuuacugucuuauggguucaggccagcuguugugggauaccgugacagggguggacauggcucuauga

SEQ ID NO: 156746 - RNA, 1401 nt, Artificial Sequence; identical to SEQ ID NO: 156735
  derived and/or modified CDS sequence (opt3) from neuraminidase__InfluenzaB__ABN50573

SEQ ID NO: 156747 - RNA, 1401 nt, Artificial Sequence
  derived and/or modified CDS sequence (opt3) from neuraminidase__InfluenzaB__ABN50584
augcugcccagcaccauccagacacucacucuuuuccugacguccggcgggguguuguuaucucuguacgucucagccagucuaagcuaucuccuguacuccgacauucuucugaaguuuucuccuaccgagauaacagcuucgacuaugccauuggauugcgcaaacgccucaaauguucaagcggugaacagaagcgcuaccaaaggaguaacacuccugcugccggaacccgaguggaccuauccuaggcucaguuguccagguuccacuuuccagaaggccuuacugaucucuccccaccgguuuggcgaaacaaaagggaauagcgcaccucuuauuauccgcgagccauucauugccugcggacccaacgaauguaagcauuuugcuuugacccacuacgcagcccagccuggcgguuauuacaaugggacgcgaggagaccguaacaaacugagacaucuaaucuccgugaagcucggcaagauaccaacugucgaaaauucaaucuuccacauggcugccuggaguggcagcgcgugccaugaugggaaagaguggaccuauauuggaguggacgguccggauaacaaugcacugcuuaagaucaaauacggcgaggccuacacagacacuuaucacucuuacgcuaacaauauucugaggacccaggaguccgccuguaacugcaucgggggaaauuguuauuugaugauaacagauggcucagcaagcgguguuagugaaugccgguuucucaagauucgcgaggggagaaucauuaaagagaucuuccccaccggaagggugaagcacacggaagaguguacuugcggcuuugcuucuaacaagacaaucgaaugugccugccgggacaauuccuacaccgcgaaacgcccuuucgucaagcugaacguggagagcgauacugccgaaauucgauuaaugugcacagagaccuaucuggacacgccaagacccgaugacggcucgauaaccgggccuugugagucuaacggagauaaagguuccggcgggaucaagggaggcuuuguacaucaaaggauggcaucaaaaauuggucggugguacagucguacaaugagcaagacugaacgcauggggaugggccucuauguuaaauacgacggagacccaugggcugauuccgacgcccuugcucugucuggcgugauggucagcauggaggaacccgggugguacucauucggauuugagaucaaggauaagaaaugcgacgugccguguauagguauugaaauggugcacgauggcgggaaggagaccuggcauagugccgcaacagccaucuauugcuugaugggauccggccagcuacugugggacacugucaccgguguugauauggcucucuga

SEQ ID NO: 156748 - RNA, 1401 nt, Artificial Sequence; identical to SEQ ID NO: 156632
  derived and/or modified CDS sequence (opt3) from neuraminidase__InfluenzaB__ABN50595

SEQ ID NO: 156749 - RNA, 1398 nt, Artificial Sequence
  derived and/or modified CDS sequence (opt3) from neuraminidase__InfluenzaB__ABN50606
augcugcccagcaccauccagacacucacucuuuuccugacguccggcgggguguuguuaucucuguacgucucagccagucuaagcuaucuccuguacuccgacauucuucugagauuuucuucgaagauaaccgcuccuacaaugacuuuggauugcgcaaacgccucaaauguucaagcggugaacaggagcgcuaccaaagagaugacauuccuccugccagaaccggaguggaccuauccccggcugaguugucagggauccacuuuucagaaggcccucuuaaucucuccucaccgcuucggugaagcacgaggcaauagcgccccacugauuauccgugagcccuuuauugcuugcgggccuaaagaauguaagcauuucgcacuuacacacuacgccgcucagccaggaggcuauuacaacgguaccagagaggacaggaauaaauugcggcaucugaucuccguaaagcuagggaagauacccacgguggagaacucaaucuuucacauggccgcguggaguggaagcgcaugccaugauggccgcgaauggacuuauauuggcgucgacgggccugauucuaaugcccucaucaaaauuaaguacggagaggcuuacaccgacacauaucacuccuacgccaacaauauccugagaacucaagaaucagcauguaacugcauagguggcgauuguuaucuuaugauuaccgacgggagcgcuaguggaaucucugagugcagguuccugaaaauucgggagggccgcaucaucaaggaaauuuuuccaacaggucgaguggagcacaccgaagaguguacgugcggguucgccuccaauaaaacuauagaaugugcgugcagagauaacagcuacacagccaagaggccguuuguuaaguugaauguggagaccgacacugcagagauccggcucaugugcacagaaaccuaucuggauacgccccguccugacgauggaucgauuaccggcccaugugagucugacggcgacaaagggcgcggagguaucaagggcggguucguccaucagagaauggcuuccaaaauaggaaggugguacucacggacaaugaguaagacugaacgaaugggcauggaguuauaugugaaauacgauggugaccccuggaccgauagcgacgcccuggcuccuuccgggguaaugguuucuaugaaggaaccaggcugguacagcuuuggauucgagauuaaagauaagaagugcgacgugcccuguaucggcaucgagaugguccacgauggggguaaaaagacauggcauucagccgcaacugccauuuauugccucaugggaaguggccagcuucugugggacaccgugacagggguggauauggcuuuguga

SEQ ID NO: 156750 - RNA, 1398 nt, Artificial Sequence
  derived and/or modified CDS sequence (opt3) from neuraminidase__InfluenzaB__ABN50628
augcugcccagcaccauccagacacucacucuuuuccugacguccggcgggguguuguuaucucuguacgucucagcccuacucaguuaucugcuuuacagcgacauucuguugaaguuuuccccuaaaauaaucgcuccaaccaugucucucgauugcgcaaacgccucgaauguucaagcggugaaccacucagcuacaaaggagaugacuuuccugcugccggaacccgaguggaccuauccuagacucagcugucagggaaguacauuucagaaagccuuacugauuuccccacauagguucggugaagcaaagggcaauucugcuccccuuaucauucgggagccuuuuaucgccugcgggccaaaagaauguaagcacuucgcauugacccauuacgccgcucagcccggaggcuauuacaacgguacucgcgaggaccgaaauaagcugcgucaccuaauaagcguaaaccucgggaaaaucccuacaguggaaaauuccauuuuucauauggccgcguggucaggaagugcaugccacgauggcagagaguggaccuauaucggcgucgacgggccagauagcaacgcccugauuaagaucaaauacggagaggcuuacacggacacuuaucacucuuacgccaauaacauacuuaggacccaagaauccgcauguaauugcauugguggcgauuguuaucugaugaucacagacgggucagcuagcggaauuaguaagugccgguucuugaaaauccgcgagggcagaaucauuaaggagauauuuccgacugguaggguggaacauaccgaggaauguacaugcggguucgccucuaacaagaccaucgagugugcgugccgggauaauuccuacacggccaaacgccccuuuguuaagcucaacguggaaacugacacagcagagauucgacugaugugcaccgagacuuauuuagauacaccuagaccagacgauggaagcaucaccggccccugugaaucgaauggcgacaaagggaggggaggugucaagggcggguucgugcaccagcggauggcuucuaaaauaggacguugguacucccgcacgaugucaaagaccgagagaaugggcauggaacuguauguaaaauacgacggugauccuuggacagacagugaugcccucgcuccaagcgggguuaugguguccauggaggaacccggcugguacucuuuuggauucgagauuaaggacaagaaaugcgaugucccguguaucggcaucgagauggugcaugacgggggaaagaaaacuuggcacagcgccgcaaccgccauuuauugccuuauggguucaggccagcuguugugggauacagugacuggggucgacauggcucuauga

SEQ ID NO: 156751 - RNA, 1398 nt, Artificial Sequence
  derived and/or modified CDS sequence (opt3) from neuraminidase__InfluenzaB__ABN50639
augcugcccagcaccauccagacacucacucuuuuccugacguccggcgggguguuguuaucucuguacgucucagcccuacucaguuaucugcuuuacagcgacauucuguugaaguuuuccccuaaaauaaucgcuccaaccaugucucucgauugcgcaaacgccucgaauguucaagcggugaaccacucagcuacaaaggagaugacuuuccugcugccggaacccgaguggaccuauccuagacucagcugucagggaaguacauuucagaaagccuuacugauuuccccacauagguucggugaagcaaagggcaauucugcuccccuuaucauucgggagccuuuuaucgccugcgggccaaaagaauguaagcacuucgcauugacccauuacgccgcucagcccggaggcuauuacaacgguacucgcgaggaccgaaauaagcugcgucaccuaauaagcguaaaacucgggaagaucccuacaguggagaacuccauuuuucauauggccgcguggucaggaagugcaugccacgauggcagagaauggaccuauaucggcgucgacgggccagauagcaaugcccuggugaaaauuaaguacggagaggcuuacacggacacuuaucacucuuacgccaacaauauccuuaggacccaagaauccgcauguaacugcauagguggcgauuguuaucugaugauuacagacgggucagcuagcggaaucaguaaaugccgguucuugaagauucgcgagggcagaaucaucaaggagauuuuuccgacugguaggguugaacauaccgaggaauguacaugcggguucgccucuaauaaaaccauagagugugcgugccgggauaacuccuacacggccaagcgccccuuugugaaacucaaugucgaaacugacacagcagagauccgacugaugugcaccgagacuuauuuagauacaccuagaccagacgauggaagcauuaccggccccugugaaucgaacggcgacaaggggaggggaggugugaaaggcggguucguacaccagcggauggcuucuaagaucggacguugguacucccgcacgaugucaaaaaccgagagaaugggcauggaacuguauguuaaguacgacggugauccuuggacagacagugaugcccucgcuccaagcggggugauggucuccauggaggaacccggcugguacucuuuuggauucgagauaaaggacaaaaagugcgaugugccguguauuggcaucgagauggugcaugacggggguaaaaagacuuggcacagcgccgcaaccgccaucuauugccuuaugggaucaggccagcuguugugggauacagucacugggguugacauggcucuauga

SEQ ID NO: 156752 - RNA, 1398 nt, Artificial Sequence
  derived and/or modified CDS sequence (opt3) from neuraminidase__InfluenzaB__ABN50650
augcugcccagcaccauccagacacucacucuuuuccugacguccggcgggguguuguuaucucuguacgucucagcccuacucaguuaucugcuuuacagcgacguucuguugaaguuuuccccuaaaauuauagcuccaaccaugucucucgauugcgcaaacgccucgaaugugcaagcgguaaaccacucagcuacagaggaaaugacuuuccugcugccggagcccgaauggaccuauccuagacucagcugucagggaaguacauuucagaaggccuuacugaucuccccacauagguucggugaggcaaaaggcaauucugcuccccuuauuauccgggaaccuuuuauugcuugcgggccaaaggaguguaaacacuucgcauugacccauuacgccgcucagcccggaggcuauuacaacgguacucgcgaggaccgaaauaagcugcgucaccuaaucagcgugaaccucgggaagauaccuacagucgaaaauuccaucuuucauauggccgcguggucaggaagugcaugccacgauggcagagaguggaccuauauuggcguggacgggccagauagcaacgcccugaucaaaauuaaguacggagaagccuacacggacacuuaucacucuuacgccaauaacauccuuaggacccaagaguccgcauguaauugcauagguggcgauuguuaucugaugauuacagacgggucagcuagcggaaucaguaaaugccgguucuugaagauucgcgagggcagaaucaucaaagaaauuuuuccgacugguaggguugagcauaccgaagaguguacaugcggguucgccucuaacaagaccauagaaugugcgugccgggauaauuccuacacggccaagcgccccuuugugaaacucaacgucgagacugacacagcagagauccgacugaugugcaccgaaacuuauuuagauacaccuagaccagacgauggaagcauuaccggccccugugagucgaauggcgacaaggggcacggagguaucaaaggcggguucgugcaucagaggauggcuucuaagauaggacggugguacucccguacgaugucaaaaaccaagcgcaugggcauggaacuguauguaaaauacgacggugauccuuggacagacagugaugcccucgcuccaagcgggguuaugguguccauggaggaacccggcugguacucuuuuggauucgagauuaaggacaagaaaugcgaugucccguguaucggcaucgagauggugcacgacgggggaaagaaaacuuggcacagcgccgcaaccgccauuuauugccuuauggguucaggccagcuguugugggauacagugacuggggucgacauggcucuauga

SEQ ID NO: 156753 - RNA, 1398 nt, Artificial Sequence
  derived and/or modified CDS sequence (opt3) from neuraminidase__InfluenzaB__ABN50661
augcugcccagcaccauccagacacucacucuuuuccugacguccggcgggguguuguuaucucuguacgucucagcccuacucaguuaucugcuuuacagcgacguucuguugaaguuuuccccuaaaaugauugcuccaaccaugucucucgauugcgcaaacgccucgaaugugcaagcgguaaaccacucagcuacagaggaaaugacuuuccugcugccggagcccgaauggaccuauccuagacucagcugucagggaaguacauuucagaaggccuuacugauauccccacauagguucggugaggcaaaaggcaauucugcuccccuuaucauucgggaaccuuuuaucgcuugcgggccaaaggaguguaaacacuucgcauugacccauuacgccgcucagcccggaggcuauuacaacgguacucgcgaggaccgaaauaagcugcgucaccuaauuagcgugaaccucgggaagaucccuacagucgaaaauuccauauuucauauggccgcguggucaggaagugcaugccacgauggcagagaguggaccuauaucggcguggacgggccagauagcaacgcccugauuaaaaucaaguacggagaagccuacacggacacuuaucacucuuacgccaauaacauucuuaggacccaagaguccgcauguaauugcaucgguggcgauuguuaucugaugauaacagacgggucagcuagcggaauuaguaaaugccgguucuugaagauccgcgagggcagaauuaucaaagaaaucuuuccgacugguaggguugagcauaccgaagaguguacaugcggguucgccucuaacaagaccauugaaugugcgugccgggauaauuccuacacggccaagcgccccuuugugaaacucaacgucgagacugacacagcagagauacgacugaugugcaccgaaacuuauuuagauacaccuagaccagacgauggaagcaucaccggccccugugagucgaauggcgacaaggggcacggagguauuaaaggcggguucgugcaucagaggauggcuucuaagaucggacggugguacucccguacgaugucaaaaaccaagcgcaugggcauggaacuguauguaaaauacgacggugauccuuggacagacagugaugcccucgcuccaagcgggguuaugguguccauggaggaacccggcugguacucuuuuggauucgagauaaaggacaagaaaugcgaugucccguguauuggcaucgagauggugcacgacgggggaaagaaaacuuggcacagcgccgcaaccgccaucuauugccuuauggguucaggccagcuguugugggauacagugacuggggucgacauggcucuauga

SEQ ID NO: 156754 - RNA, 1401 nt, Artificial Sequence
  derived and/or modified CDS sequence (opt3) from neuraminidase__InfluenzaB__ABN50683
augcugcccagcaccauccagacacucacucuuuuccugacguccggcgggguguuguuaucucuguacgucucagccagucuaagcuaucuccuguacuccgacauucuucugaaguuuucuccuaccgagauaacagcuccaacuaugccguuggauugcgcaaacgccucgaauguucaagcggugaacagaucagcuaccaaaggaguaacacuccugcugcccgaaccugaguggaccuauccaaggcucagcugucccgguaguacuuuccagaaggccuuacugaucuccccucaccgguuuggcgaaacacgcggaaauucugcaccacuuauuauccgagagcccuucauugccugcgggccuaaagaauguaagcauuuugcuuugacccacuacgcagcccagccaggcgguuauuacaacgggacgcgugaggacagaaauaaacugaggcaucuaaucagcgugaagcucggaaagauaccgacugucgagaacuccaucuuccacauggcugccuggucaggcagugcgugccaugauggccgggaauggaccuauauugggguggacggacccgauagcaaugcacugcuuaaaaucaaguacggugaggccuacacagacacuuaucacucuuacgcuaacaauauucugcgcacccaggaauccgccuguaacugcaucggcggggauuguuauuugaugauaacagacggaucagcaagcggcauuaguaaaugcagauuucucaagaucagggagggucggauuaucaaagagaucuucccuaccgggcgcguugaacacacggaggaauguacuugcggauuugcuucuaauaagacaauugagugugccugccgagauaacuccuacaccgcgaagagaccauucgugaaacugaaugucgaaacugacacagccgagauaagguuaaugugcaccgagacguaucuggauacaccccggccugacgauggcagcaucaccggcccaugugaaucgaacggggacaagggacucgguggcauuaaagggggauuugugcaucaacguauggcaucuaagaucggccgcugguacuccagaacuaugucaaaaaccaagaggauggguauggagcuuuauguaaaauacgacggggaucccuggacagacagugaugcucuggccuugagcggcguuauggugccgauggaggaaccuggaugguacuccuucggcuuugaaauaaaggacaagaaaugcgauguccccuguauugggaucgagauggugcacgacggagguaagaaaacuuggcauucugcugccaccgcaaucuauugccuaaugggcagcgggcagcugcucugggauacagugaccggagucgacauggcccuguga

SEQ ID NO: 156755 - RNA, 1401 nt, Artificial Sequence
  derived and/or modified CDS sequence (opt3) from neuraminidase__InfluenzaB__ABN50694
augcugcccagcaccauccagacacucacucuuuuccugacguccggcgggguguuguuaucucuguacgucucagccagucuaagcuaucuccuguacuccgacauucuucugaaguuuucuccuaccgagauaacagcuccaacuaugccguuggauugcgcaaacgccucgaauguucaagcggugaacagaucagcuaccaaaggaguaacacuccugcugcccgaaccugaguggaccuauccaaggcucagcugucccgguaguacuuuccagaaggccuuacugaucuccccucaccgguuuggcgaaacacgcggaaauucugcaccacuuauuauccgagagcccuucauugccugcgggccuaaagaauguaagcauuuugcuuugacccacuacgcagcccagccaggcgguuauuacaacgggacgcgugaggacagaaauaaacugaggcaucuaaucagcgugaagcucggaaagauaccgacugucgagaacuccaucuuccacauggcugccuggucaggcagugcgugccaugauggccgggaauggaccuauauugggguggacggacccgauagcaaugcacugcuuaaaaucaaguacggugaggccuacacagacacuuaucacucuuacgcuaacaauauucugcgcacccaggaauccgccuguaacugcaucggcggggauuguuauuugaugauaacagacggaucagcaagcggcauuaguaaaugcagauuucucaagaucagggagggucggauuaucaaagagaucuucccuaccgggcgcguugaacacacggaggaauguacuugcggauuugcuucuaauaagacaauugagugugccugccgagauaacuccuacaccgcgaagagaccauucgugaaacugaaugucgaaacugacacagccgagauaagguuaaugugcaccgagacguaucuggauacaccccggccugacgauggcagcaucaccggcccaugugaaucgaacggggacaagggaucugguggcauuaaagggggauuugugcaucaacguauggcauccaagaucggccgcugguacucaagaacuaugaguaaaaccaagaggauggguauggggcucuauguaaaauacgacggcgaucccuggacagacagcgaugcucuugcccuguccggaguuauggugucuauggaggaaccgggcugguacagcuucggguuugagauaaaggacaagaaaugcgaugucccuuguauuggaaucgaaauggugcacgacgguggcaagaaaacuuggcauucagcugccaccgcaaucuauugcuugauggggaguggacagcuacugugggauacagugaccggcgucgacauggcccucuga

SEQ ID NO: 156756 - RNA, 1398 nt, Artificial Sequence
  derived and/or modified CDS sequence (opt3) from neuraminidase__InfluenzaB__ABN50705
augcugcccagcaccauccagacacucacucuuuuccugacguugggcgggguguuacugucccuauacgucucugcccuccugucauaucuucuguacagugacguuuugcucaaguuuagcccuaaaaugauugcuccaaccaugucccuggauugcgcaaacgccucuaaugugcaagcgguaaaccacucggcuacagaggaaaugacuuuccugcucccggagcccgaauggaccuauccuagauuaucaugucagggaagcacauuucagaaggcccugcuuauaaguccacauagguucggugaggcaaaaggcaauuccgcccccuugaucauucgggaaccuuuuaucgcuugcgggccaaaggaguguaaacacuucgcacugacccauuacgccgcucagcccggaggcuauuacaacgguacucgcgaggaccgaaauaagcuacgucaccucauuucugugaaccuggggaagaucccuacagucgaaaauagcauauuucauauggccgcgugguccggaucagcaugccacgauggcagagaguggaccuauaucggcguggacgggccagauaguaacgcccuuauuaaaaucaaguacggagaggcuuacacggacacuuaucacagcuacgccaauaacauucugaggacccaagaaucugcauguaauugcaucgguggcgauuguuauuugaugauaacagacggguccgcuucaggaauuagcaaaugccgguuccucaagauccgcgagggcagaauuaucaaagaaaucuuuccgacugguaggguugagcauaccgaagaguguacaugcggguucgccaguaacaagaccauugaaugugcgugccgggauaauucuuacacggccaagcgccccuuugugaaacugaacgucgagacugacacagcagagauacgauuaaugugcaccgaaacuuaucuggauacaccuagaccagacgauggauccaucaccggccccugugagagcaauggcgacaaggggcacggagguauuaaaggcggguucgugcaucagaggauggcuucgaagaucggacggugguacucucguacgauguccaaaaccaagcgcaugggcauggaacucuauguaaaauacgacggugauccuuggacagacucagaugcccuugcuccaagugggguuauggugagcauggaggaacccggcugguacuccuuuggauucgagauaaaggacaagaaaugcgaugucccguguauuggcaucgagauggugcacgacgggggaaagaaaacuuggcacucugccgcaaccgccaucuauugccugauggguagcggccaguugcuaugggauacagugacuggggucgacauggcucuguga

SEQ ID NO: 156757 - RNA, 1401 nt, Artificial Sequence
  derived and/or modified CDS sequence (opt3) from neuraminidase__InfluenzaB__ABN50716
augcugcccagcaccauccagacacucacucuuuuccugacguccggcgggguguuguuaucucuguacgucucagccagucuaagcuaucuccuguacuccgguauucuucugaaguuuucuccuaccgagauaacagcuccaacuaugccguuggacugcgcaaacgccucgaauguucaagcggugaacagaucagcuaccaaaggaguaacacuccugcugcccgaaccugaguggaccuauccaaggcucagcugucccggcaguacuuuccagaaggccuuacugaucuccccucaccgguuuggggaaacacgcggaaauucugcaccacuuauuauccgagagcccuucauugccugcggcccuaaagaauguaagcauuuugcuuugacccacuacgcagcccagccagguggguauuacaacggaacgcgugaggauagaaauaaacugaggcaucuaaucagcgugaagcucggcaagauaccgacugucgagaacuccaucuuccacauggcugccuggucaggcagugcgugccaugacgggcgggaauggaccuauauuggaguggauggucccgacagcaaugcacugcuuaaaaucaaguacggcgaggccuacacagauacuuaucacucuuacgcuaacaauauucugcgcacccaggaauccgccuguaacugcaucgggggagacuguuauuugaugauaacagauggcucagcaagcgguauuaguaaaugcagauuucucaagaucagggaggggcggauuaucaaagagaucuucccuaccggacgcguugaacacacggaggaauguacuugcggcuuugcuucuaauaagacaauugagugugccugccgagacaacuccuacaccgcgaagagaccauucgugaaacugaaugucgaaacugauacagccgagauaagguuaaugugcaccgagacguaucuggacacaccccggccugaugacggcagcaucaccgggccaugugaaucgaacggagauaaggguucuggcgggauuaaaggaggcuuugugcaucaacguauggcauccaagaucggucgcugguacucaagaacuaugaguaaaaccaagaggauggggaugggccucuauguaaaauacgacggagaccccuggacagauagcgacgcucuugcccuguccggcguuauggugucuauggaggaaccggggugguacagcuucggauuugagauaaaggauaagaaaugcgacgucccuuguauugguaucgaaauggugcacgauggcgggaagaaaacuuggcauucagcugccaccgcaaucuauugcuugaugggaaguggccagcuacugugggacacagugaccggugucgauauggcccucuga

SEQ ID NO: 156758 - RNA, 1401 nt, Artificial Sequence
  derived and/or modified CDS sequence (opt3) from neuraminidase__InfluenzaB__ABN50727
augcugcccagcaccauccagacacucacucuuuuccugacguccggcgggguguuguuaucucuguacgucucagccagucuaagcuaucuccuguacuccgacauucuucugaaguuuucuccuaccgagauaacagcuccaacuaugccguuggauugcgcaaacgccucgaauguucaagcggugaacagaucagcuaccaaaggaguaacacuccugcugcccgaaccugaguggaccuauccaaggcucagcugucccgguaguacuuuccagaaggccuuacugaucuccccucaccgguuuggcgaaacaaaaggaaauucugcaccacuuauuauccgcgagcccuucauugccugcgggccuaaggaauguaaacauuuugcuuugacccacuacgcagcccagccaggcgguuauuacaacgggacgcgagaggaccguaauaagcugagacaucuaaucagcgugaagcucggaaaaauaccgacugucgagaacuccaucuuccacauggcugccuggucaggcagugcgugccaugauggcagggaauggaccuauauugggguggacggacccgauagcaaugcacugcuuaagaucaaauacggugaggccuacacagacacuuaucacucuuacgcuaacaauauucugcggacccaggaauccgccuguaacugcaucggcggggauuguuauuugaugauaacagacggaucagcaagcggcauuagugagugccgcuuucucaagaucagagaggguaggauuaucaaagaaaucuucccuaccgggcggguugagcacacggaagaguguacuugcggauuugcuucuaauaagacaauugaaugugccugccgcgauaacuccuacaccgcgaagcgaccauucgugaaacugaaugucgagacugacacagccgagauaagauuaaugugcaccgaaacguaucuggauacccccaggccugacgauggcagcaucacaggcccaugugagucgaacggggacaagggaucugguggcauuaaagggggauuugugcaucaacggauggcauccaagaucggccguugguacucacgcacuaugaguaaaaccaagagaauggguauggggcucuauguaaaauacgacggcgaucccuggacagacagcgaugcucuugcccuguccggaguuauggugucuauggaggaaccgggcugguacagcuucggguuugaaauaaaggacaagaaaugcgaugucccuuguauuggaaucgagauggugcacgacgguggcaagaaaacuuggcauucagcugccaccgcaaucuauugcuugauggggaguggacagcuacugugggauacagugaccggcgucgacauggcccucuga

SEQ ID NO: 156759 - RNA, 1401 nt, Artificial Sequence; identical to SEQ ID NO: 156701
  derived and/or modified CDS sequence (opt3) from neuraminidase__InfluenzaB__ABN50738

SEQ ID NO: 156760 - RNA, 1401 nt, Artificial Sequence
  derived and/or modified CDS sequence (opt3) from neuraminidase__InfluenzaB__ABN50749
augcugcccagcaccauccagacacucacucuuuuccugacguccggcgggguguuguuaucucuguacgucucagccagucuaagcuaucuccuguacuccgacauucuucugaaguuuucuccuaccgagauaacagcuccaacuaugccguuggauugcgcaaacgccucgaauguucaagcggugaacagaucagcuaccaaaggaguaacacuccugcugcccgaaccugaguggaccuauccaaggcucagcugucccgguaguacuuuccagaaggccuuacugaucuccccucaccgguuuggcgaaacaaaaggaaauucugcaccacuuauuauccgcgagcccuucauugccugcgggccuaaggaauguaaacauuuugcuuugacccacuacgcagcccagccaggcgguuauuacaacgggacgcgaggagaccguaauaagcugagacaucuaaucagcgugaagcucggcaaaauaccgacugucgagaacuccaucuuccacauggcugccuggucaggcagugcgugccaugaugggaaggaguggaccuauauuggaguggacggucccgauagcaaugcacugcuuaaaaucaaguacggcgaagccuacacagacacuuaucacucuuacgcuaacaauauucugaggacccaggaguccgccuguaacugcaucgggggaaauuguuauuugaugauaacagauggcucagcaagcgguauuagugaaugccgguuucucaaaauccgcgaggggagaauuaucaaggagaucuucccuaccggaaggguuaagcacacggaagaguguacuugcggcuuugcuucuaacaaaacaauugaaugugccugccgggacaauuccuacaccgcgaagcgcccauucgugaaacugaacgucgagacugauacagccgaaauacgauuaaugugcaccgagacguaucuggacacccccagaccugaugacggcagcaucacagggccaugugagucgaauggagauaaggguucuggcgggauuaaaggaggcuuugugcaucaaaggauggcauccaagaucggucggugguacucacguacuaugaguaaaaccaagcgcauggggaugggccucuauguaaaguacgacggagaccccugggcugauagcgacgcccuugcucuguccggcguuauggugucuauggaggaaccggggugguacagcuucggauuugaaauaaaagauaagaaaugcgacgucccuuguauugguaucgagauggugcacgauggcgggaaggaaacauggcauucagccgcaacugccaucuauugcuugaugggaaguggccagcuacugugggacaccgugacaggugucgauauggcucucuga

SEQ ID NO: 156761 - RNA, 1398 nt, Artificial Sequence
  derived and/or modified CDS sequence (opt3) from neuraminidase__InfluenzaB__ABN51188
augcugcccagcaccauccagacacucacucuuuuccugacguccggcgggguguuguuaucucuguacgucucagcccuacucaguuaucugcuuuacagcgacauucuguugaaguuuuccccuaaaauaaucgcuccaaccaugcuccuggauugcgcaaacgccucuaauguucaagcggugaaccacucggcuacaaaggagaugacuuuccugcucccggaacccgaguggaccuauccuagauuaucaugucagggaagcacauuucagaaagcccugcuuauuaguccacauagguucggugaagcaaagggcaauuccgcccccuugaucauucgggagccuuuuaucgcuugcgggccaaaagaauguaagcacuucgcacugacccauuacgccgcucagcccggaggcuauuacaacgguacucgcgaggaccgaaauaagcuacgucaccucauaucuguaaaccuggggaaaaucccuacaguggagaauagcauuuuucauauggccgcgugguccggaucagcaugccacgauggcagagaauggaccuauaucggcgucgacgggccagauaguaacgcccuuauuaagaucaaauacggagaggcuuacacggacacuuaucacagcuacgccaauaacauacugaggacccaagaaucugcauguaauugcauugguggcgauuguuauuugaugaucacagacggguccgcuucaggaauuagcaagugccgguuccucaaaauccgcgagggcagaaucauuaaggagauauuuccgacugguaggguggaacauaccgaggaauguacaugcggguucgccaguaacaagaccaucgagugugcgugccgggauaauucuuacacggccaaacgccccuuuguuaagcugaacguggaaacugacacagcagagauucgauuaaugugcaccgagacuuaucuggauacaccuagaccagacgauggauccaucaccggccccugugaaagcaauggcgacaaagggaggggaggugucaagggcggguucgugcaccagcggauggcuucgaaaauaggacguugguacucucgcacgauguccaagaccgagagaaugggcauggaacucuauguaaaauacgacggugauccuuggacagacucagaugcccuugcuccaagugggguuauggugagcauggaggaacccggcugguacuccuuuggauucgagauuaaggacaagaaaugcgaugucccguguaucggcaucgagauggugcaugacgggggaaagaaaacuuggcacucugccgcaaccgccauuuauugccugauggguagcggccaguugcuaugggauacagugacuggggucgacauggcucuguga

SEQ ID NO: 156762 - RNA, 1398 nt, Artificial Sequence; identical to SEQ ID NO: 156750
  derived and/or modified CDS sequence (opt3) from neuraminidase__InfluenzaB__ABN51199

SEQ ID NO: 156763 - RNA, 1401 nt, Artificial Sequence
  derived and/or modified CDS sequence (opt3) from neuraminidase__InfluenzaB__ABN58665
augcugcccagcaccauccagacacucacucuuuuccugacguccggcgggguguuguuaucucuguacgucucagcccuacucaguuaucugcuuuacagcgacauucuguugaaguuuuccccuaccaaaauaaucgcuccaacaaugucucucgauugcgcaaacgccucgaauguucaagcggugaaccacucagcuacugaggaaaugaccuuccugcugccggagcccgaauggacauauccuagacucagcugucagggaaguaccuuucagaaggccuuacugauuuccccacauagguucggugaggcaaaaggcaauucugcuccccuuaucauucgggaaccuuuuaucgcuugcgggccaaaggaguguaaacacuucgcauugacucauuacgccgcucagcccggaggcuauuacaacgguacacgcgaggaccgaaauaagcugcgucaccuaauaagcguaaaccucgggaagaucccuaccguggaaaauuccauuuuucauauggccgcguggucaggaagugcaugccacgauggcagagaguggacguauaucggcgucgacgggccagauagcaacgcccugauuaaaaucaaguacggagaagccuacacugacaccuaucacucuuacgccaauaacauacuuaggacacaagaguccgcauguaauugcauugguggcgauuguuaucugaugaucacugacgggucagcuagcggaauuaguaaaugccgguucuugaagauccgcgagggcagaaucauuaaagaaauauuuccgaccgguaggguggagcauacagaagaguguaccugcggguucgccucuaacaagacgaucgaaugugcgugccgggauaauuccuacacugccaagcgccccuuuguuaaacucaacguggagacagacaccgcagagauucgacugaugugcacugaaacauauuuagauaccccuagaccagacgauggaagcaucacgggccccugugagucgaauggcgggaagggaucugguggcauaaaagggggauucguccaccagaggauggcuuccaagauuggccggugguacucacguaccaugaguaaaacaaagcgcauggguauggaacuguaugugaaauacgacggggacccuuggacugauagcgacgcccucgcuccauccggcguaaugguuucuauggaggaacccggaugguacagcuuuggcuucgagaucaaggauaagaaaugcgacgugccguguaucgggauugagaugguccaugauggagguaagaaaaccuggcacucagccgcaacagccaucuauugccuuaugggcagugggcagcuguugugggacacugugaccggaguggauauggcucuauga

SEQ ID NO: 156764 - RNA, 1401 nt, Artificial Sequence; identical to SEQ ID NO: 156651
  derived and/or modified CDS sequence (opt3) from neuraminidase__InfluenzaB__ABN59449

SEQ ID NO: 156765 - RNA, 1398 nt, Artificial Sequence; identical to SEQ ID NO: 156729
  derived and/or modified CDS sequence (opt3) from neuraminidase__InfluenzaB__ABR15999

SEQ ID NO: 156766 - RNA, 1401 nt, Artificial Sequence; identical to SEQ ID NO: 156758
  derived and/or modified CDS sequence (opt3) from neuraminidase__InfluenzaB__ABR16010

SEQ ID NO: 156767 - RNA, 1401 nt, Artificial Sequence
  derived and/or modified CDS sequence (opt3) from neuraminidase__InfluenzaB__ABR16021
augcugcccagcaccauccagacacucacucuuuuccugacguccggcgggguguuguuaucucuguacgucucagccagucuaagcuaucuccuguacuccgacauucuucugaaguuuucuccuaccgagauaacagcuccaacuaugccguuggauugcgcaaacgccucgaauguucaagcggugaacagaucagcuaccaaaggaguaacacuccugcugcccgaaccugaguggaccuauccaaggcucagcugucccgguaguacuuuccagaaggccuuacugaucuccccucaccgguuuggcgaaacaaaaggaaauucugcaccacuuauuauccgcgagcccuucauugccugcgggccuaacgaauguaagcauuuugcuuugacccacuacgcagcccagccaggcgguuauuacaaugggacgcgaggagaccguaacaaacugagacaucuaaucagcgugaagcucggcaagauaccgacugucgaaaauuccaucuuccacauggcugccuggucaggcagugcgugccaugaugggaaagaguggaccuauauuggaguggacggucccgauaacaaugcacugcuuaagaucaaauacggcgaggccuacacagacacuuaucacagcuacgcuaacaagauucugaggacccaggagucugccuguaauugcaucgggggaaacuguuauuugaugauaacagauggcuccgcaucagguguuagcgaaugccgguuucucaaaauucgcaaggggagaaucauuaaggagaucuucccuaccggaagggugaaacacacggaggaauguacuugcggcuuugcuaguaauaagacaaucgagugugccugccgggacaacucuuacaccgcgaaacgcccauucgucaagcugaauguggaaacugauacagccgagauucgauuaaugugcaccgacacguaucuggauacccccagaccugacgauggcuccauaacagggccaugugaaagcaacggagacaaagguucgggcgggaucaagggaggcuuuguacaucaaaggauggcaucuaaaauuggucggugguacucccguacuaugucaaagaccgagcgcauggggaugggccucuauguuaaguacgacggagaucccugggcugacagugaugcccuugcuuucagcggcgugauggucuccaugaaagagccggggugguacucuuuuggauucgaaaucaaggacaaaaagugcgaugugccuuguauagguauugagauggugcacgacggcgggaaagaaacauggcauagcgccgcaacugccaucuauugccugaugggaucaggccaguugcuaugggauaccgucacagguguugacauggcucuguga

SEQ ID NO: 156768 - RNA, 1401 nt, Artificial Sequence; identical to SEQ ID NO: 156683
  derived and/or modified CDS sequence (opt3) from neuraminidase__InfluenzaB__ACA64903

SEQ ID NO: 156769 - RNA, 1401 nt, Artificial Sequence
  derived and/or modified CDS sequence (opt3) from neuraminidase__InfluenzaB__ACA64914
augcugcccagcaccauccagacacucacucuuuuccugacguccggcgggguguuguuaucucuguacgucucagccagucuaagcuaucuccuguacuccgacauucuucugaaguuuucucaaaccgagauaacagcuccuaucaugccauuggauugcgcaaacgccucgaauguucaggcggugaacagaucagcugccaaaggaguaacucuccugcugccggaacccgaguggaccuauccuaggcucagcuguccagguaguacauuccagaaggcauuacugauuucuccccaccgguuuggcgaaaccaaaggaaauuccgccccucuuaucauucgcgagccauucaucgcuugcgggcccacugaauguaagcauuuugcauugacacacuacgccgcucagccuggcgguuauuacaacgggacccgagaggaccguaauaaacugagacaucuaauaagcgugaagcucggaaagaucccaacggucgagaacuccauuuuccacauggccgcguggucaggcagugcaugccaugauggcaaagaauggacuuauguggggguugacggaccggauagcaaugcccugcuuaagaucaaauacggugaggcuuacaccgacacauaucacucuuacgccaagaacauucugaggacucaagaauccgcauguaauugcaucggcggggauuguuauuugaugauaaccgacggacccgcuucaggcauuagcgagugccgguuucucaaaauccgcgaggguagaauuaucaaggaaaucuucccuacagggagggugaagcacaccgaggaauguacgugcggauuugccaguaacaaaacuauugagugugcgugccgggauaauucuuacacagccaagcgcccauucgucaaacugaacguggaaaccgacacugcagagauacgauuaaugugcacagagaccuaucuggauacgcccagaccuaaugacggcuccaucaccggcccaugugaaagcgauggggacaagggaucggguggcauuaaagggggauuuguacaucagaggauggcuucuaagaucggccggugguacucccguacaaugucaaaaacuaagcgcauggguauggggcucuauguuaaguacgacggcgaucccuggaccgacagugaggcccuugcucugagcggagugauggucuccauggaugaaccgggcugguacucuuucggguuugagauaaaagacaagaaaugcgaugugccuuguauuggaaucgaaauggugcacgacgguggcaagacaacuuggcauagcgccgcaaccgccaucuauugcuugauggggucaggacagcuacugugggauacagucaccggcguugacauggcucucuga

SEQ ID NO: 156770 - RNA, 1401 nt, Artificial Sequence; identical to SEQ ID NO: 156683
  derived and/or modified CDS sequence (opt3) from neuraminidase__InfluenzaB__ACA64936

SEQ ID NO: 156771 - RNA, 1401 nt, Artificial Sequence
  derived and/or modified CDS sequence (opt3) from neuraminidase__InfluenzaB__ACA64969
augcugcccagcaccauccagacacucacucuuuuccugacguccggcgggguguuguuaucucuguacgucucagccagucuaagcuaucuccuguacuccgacauucuucugaaguuuucuccuaccgagauaacagcuccaacuaugccguuggauugcgcaaacgccucgaauguucaagcggugaacagaucagcugccaaaggaguaacccuccugcugcccgaaccugaguggacauauccaaggcucagcugucccgguaguaccuuccagaaggcauuacugaucuccccucaccgguuuggcgaaacuaaaggaaauucugccccacuuauuauccgcgagcccuucauugcuugcgggccuaacgaauguaagcauuuugcauugacacacuacgccgcucagccaggcgguuauuacaaugggacccgaggagaccguaacaaacugagacaucuaaucagcgugaagcucggcaagauaccgacggucgaaaauuccaucuuccacauggccgcguggucaggcagugcaugccaugaugggaaagaguggacuuauauuggaguggacggucccgauaacaaugcccugcuuaagaucaaauacggcgaggcuuacaccgacacauaucacagcuacgccaacaagauucugaggacucaggagucugcauguaauugcaucgggggaaacuguuauuugaugauaaccgauggcuccgcuucagguguuagcgaaugccgguuucucaaaauucgcgaggggagaaucauuaaggagaucuucccuacaggaagggugaagcacaccgaagaguguacgugcggcuuugccaguaauaaaacuaucgaaugugcgugccgggacaacucuuacacagccaagcgcccauucgucaaacugaauguggagaccgauacugcagaaauucgauuaaugugcacagacaccuaucuggauacgcccagaccugacgauggcuccauaaccgggccaugugagagcaacggagacaaggguucgggcgggaucaaaggaggcuuuguacaucaaaggauggcuucuaagauuggucggugguacucccguacaaugucaaaaacugagcgcauggggaugggccucuauguuaaguacgacggagaucccugggccgacagugaugcucuugccuucagcggcgugauggucuccaugaaggaaccggggugguacucuuuuggauucgagaucaaagacaagaaaugcgaugugccuuguauagguauugaaauggugcacgacggcgggaaggagaccuggcauagcgcagccacagcuaucuauugccugaugggaucaggccaguugcuaugggauacugucaccgguguugacauggcgcuguga

SEQ ID NO: 156772 - RNA, 1401 nt, Artificial Sequence
  derived and/or modified CDS sequence (opt3) from neuraminidase__InfluenzaB__ACA64980
augcugcccagcaccauccagacacucacucuuuuccugacguccggcgggguguuguuaucucuguacgucucagccagucuaagcuaucuccuguacuccgacauucuucugaaguuuucuccuaccgagauaacagcuccaacuaugucguuggauugcgcaaacgccucaaauguucaagcggugaacagaagcgcuaccaaaggaguaacacuccugcugccggaacccgaguggaccuauccuaggcucaguuguccagguuccacuuuccagaaggccuuacugaucucuccccaccgguuuggcgaaacaaaagggaauagcgcaccucuuauuauccgcgagccauucauugccugcggacccaacgaauguaagcauuuugcuuugacccacuacgcagcccagccuggcgguuauuacaaugggacgcgaggagaccguaacaaacugagacaucuaaucuccgugaagcucggcaagauaccaacugucgaaaauucaaucuuccacauggcugccuggaguggcagcgcgugccaugaugggaaagaguggaccuauauuggaguggacgguccggauaacaaugcacugcuuaagaucaaauacggcgaggccuacacagacacuuaucacucuuacgcuuccaagauucugaggacccaggagucagccuguaacugcaucgggggaaauuguuauuugaugauaacagauggcagcgcaagugguguuucugaaugccgguuucucaaaauucgcgaggggagaaucauuaaggagaucuuccccaccggaagggugaagcacacggaagaguguacuugcggcuuugcuuccaacaaaacaaucgaaugugccugccgggacaauagcuacaccgcgaagcgcccuuucgucaaacugaacguggagacugauacagccgaaauucgauuaaugugcaccgacacguaucuggauaccccaagacccgacgauggcucgauaacagggccuugugagucuaauggagacaaggguuccggcgggaucaaaggaggcuuuguacaucaaaggauggcaucaaagauuggucggugguacagucguacuaugagcaaaaccgagcgcauggggaugggccucuauguuaaguacgacggagauccaugggcugacuccgaugcccuugcuuucucuggcgugauggucagcaugaaggaacccgggugguacucauuuggauucgagaucaaagacaagaaaugcgaugugccguguauagguauugaaauggugcacgacggcgggaaggagacauggcauagugccgcaacugccaucuauugccugaugggauccggccaguugcuaugggauaccgucacagguguugacauggcucuguga

SEQ ID NO: 156773 - RNA, 1401 nt, Artificial Sequence
  derived and/or modified CDS sequence (opt3) from neuraminidase__InfluenzaB__ACA64991
augcugcccagcaccauccagacacucacucuuuuccugacguccggcgggguguuguuaucucuguacgucucagccagucuaagcuaucuccuguacuccgacauucuucugaaguuuucuccuaccgagauaacagcuccaacuaugccguuggauugcgcaaacgccucgaauguucacgcggugaacagaucagcuaccaaaggaguaacacuccugcugcccgaaccugaguggaccuauccaaggcucagcugucccgguaguacuuuccaaaaggccuuacugaucuccccucaucgguuuggcgaaacaaaaggaaauucugcaccacuuauuauccgcgagcccuucauugccugcgggccuaacgaauguaagcacuuugcuuugacccauuacgcagcccagccaggcgguuauuacaaugggacgcgaggagaccguaacaaacugagacaccuaaucagcgugaagcucggcaagauaccgacugucgaaaauuccaucuuccauauggcugccuggucaggcagugcgugccacgaugggaaagaguggaccuauauuggaguggacggucccgauaacaaugcacugcuuaagaucaaauacggcgaggccuacacagacacuuaucacagcuacgcuaacaauauucugaggacccaggagucugccuguaacugcaucgggggaaauuguuauuugaugauaacagauggcuccgcaucagguguuagcgaaugccgguuucucaagauucgcgaggggagaaucauuaaagagaucuucccuaccggaagggugaagcauacggaagaguguacuugcggcuuugcuaguaacaagacaaucgaaugugccugccgggacaauucuuacaccgcgaaacgcccauucgucaagcugaacguggagacugauacagccgaaauucgauuaaugugcaccgacacguaucuggauacccccagaccugacgauggcuccauaacagggccaugugagagcaacggagacaaagguucgggcgggaucaagggaggcuuuguacaccagaggauggcaucuaaaauuggucggugguacucccguacuaugucaaagaccgagcgcauggggaugggccucuauguuaaauacgacggagaucccugggcugacagugaugcccuugcuuucggcggggugauggucagcaugaaggaaccgggaugguacuccuuugguuucgagaucaaggacaaaaagugcgaugugccuuguauaggcauugaaauggugcaugacgggggaaaagagacauggcacucugccgcaacugccaucuauugccugaugggcagcggucaauugcuaugggauaccgucacagggguugacauggcucuguga

SEQ ID NO: 156774 - RNA, 1401 nt, Artificial Sequence; identical to SEQ ID NO: 156683
  derived and/or modified CDS sequence (opt3) from neuraminidase__InfluenzaB__ACA65013

SEQ ID NO: 156775 - RNA, 1401 nt, Artificial Sequence; identical to SEQ ID NO: 156683
  derived and/or modified CDS sequence (opt3) from neuraminidase__InfluenzaB__ACA65024

SEQ ID NO: 156776 - RNA, 1401 nt, Artificial Sequence
  derived and/or modified CDS sequence (opt3) from neuraminidase__InfluenzaB__ACA65035
augcugcccagcaccauccagacacucacucuuuuccugacguccggcgggguguuguuaucucuguacgucucagccagucuaagcuaucuccuguacuccgacauucuucugaaguuuucuccuaccgagauaacagcuccaacuaugccguuggauugcgcaaacgccucgaauguucaagcggugaacagaucagcuaccaaaggaguaacacuccugcugcccgaaccugaguggaccuauccaaggcucagcugucccgguaguacuuuccagaaggccuuacugaucuccccucaccgguuuggcgaaacaaaaggaaauucugcaccacuuauuauccgcgagcccuucauugccugcgggccuaacgaauguaagcauuuugcuuugacccacuacgcagcccagccaggcgguuauuacaaugggacgcgaggagaccguaacaaacugagacaucuaaucagcgugaagcucggcaagauaccgacugucgaaaauuccaucuuccacauggcugccuggucaggcagugcgugccaugaugggaaagaguggaccuauauuggaguggacggucccgauaacaaugcacugcuuaagaucaaauacggcgaggccuacacagacacuuaucacagcuacgcuucuaagauucugaggacccaggaguccgccuguaacugcaucgggggaaauuguuauuugaugauaacagauggcucagcaagcgguguuagugaaugccgguuucucaaaauucgcgaggggagaaucauuaaggagaucuucccuaccggaagggugaagcacacggaagaguguacuugcggcuuugcuucuaacaaaacaaucgaaugugccugccgggacaauuccuacaccgcgaagcgcccauucgucaaacugaacguggagacugauacagccgaaauucgauuaaugugcaccgacacguaucuggauacccccagaccugacgauggcagcauaacagggccaugugagucgaauggagacaaggguucuggcgggaucaaaggaggcuuuguacaucaaaggauggcauccaagauuggucggugguacucacguacuaugaguaaaaccgagcgcauggggaugggccucuauguuaaguacgacggagaucccugggcugacagcgaugcccuugcuuucuccggcgugauggucucuaugaaggaaccggggugguacagcuuuggauucgagaucaaagacaagaaaugcgaugugccuuguauagguauugaaauggugcacgacggcgggaaggagacauggcauucagccgcaacugccaucuauugccugaugggaaguggccaguugcuaugggauaccgucacagguguugacauggcucuguga

SEQ ID NO: 156777 - RNA, 1401 nt, Artificial Sequence; identical to SEQ ID NO: 156683
  derived and/or modified CDS sequence (opt3) from neuraminidase__InfluenzaB__ACA65046

SEQ ID NO: 156778 - RNA, 1401 nt, Artificial Sequence
  derived and/or modified CDS sequence (opt3) from neuraminidase__InfluenzaB__ACA65057
augcugcccagcaccauccagacacucacucuuuuccugacguccggcgggguguuguuaucucuguacgucucagccagucuaagcuaucuccuguacuccgacauucuucugaaguuuucuccuaccgagauaacagcuccaacuaugccguuggauugcgcaaacgccucgaauguucaagcggugaacagaucagcuaccaaaggaguaacacuccugcugcccgaaccugaguggaccuauccaaggcucagcugucccgguaguacuuuccagaaggccuuacugaucuccccucaccgguuuggcgaaacaaaaggaaauucugcaccacuuauuauccgcgagcccuucauugccugcgggccuaacgaauguaagcauuuugcuuugacccacuacgcagcccagccaggcgguuauuacaaugggacgcgaggagaccguaacaaacugagacaucuaaucagcgugaagcucggcaagauaccgacugucgaaaauuccaucuuccacauggcugccuggucaggcagugcgugccaugaugggaaagaguggaccuauauuggaguggacggucccgauaacaaugcacugcuuaagaucaaauacggcgaggccuacacagacacuuaucacagcuacgcuaacaagauucugaggacccaggagucugccuguaauugcaucgggggaaacuguuauuugaugauaacagauggcuccgcaucagguguuagcgaaugccgguuucucaaaauucgcgaggggagaaucauuaaggagaucuucccuaccggaagggugaagcacacggaagaguguacuugcggcuuugcuaguaauaaaacaaucgaaugugccugccgggacaacucuuacaccgcgaagcgcccauucgucaaacugaauguggaggccgauacugcagaaauucgauuaaugugcacagacaccuaucuggauacgcccagaccugacgauggcuccauaaccgggccaugugaguuuaacggagacaaggguagcggcgggaucaaaggaggcuucguacaucaaaggauggcuucgaagauuggucggugguacucucguacaauguccaaaacugagcgcauggggaugggccucuauguuaaguacgacggagaucccugggccgacucagaugcucuugccuuuaguggcgugauggucagcaugaaggaaccggggugguacuccuucggauucgagaucaaagacaagaaaugcgaugugccuuguauagguauugaaauggugcacgacggcgggaaggagaccuggcauucugcagccacagcuaucuauugccugaugggaagcggccaguugcuaugggauacugucaccgguguugacauggcgcuguga

SEQ ID NO: 156779 - RNA, 1401 nt, Artificial Sequence; identical to SEQ ID NO: 156683
  derived and/or modified CDS sequence (opt3) from neuraminidase__InfluenzaB__ACA65068

SEQ ID NO: 156780 - RNA, 1401 nt, Artificial Sequence; identical to SEQ ID NO: 156683
  derived and/or modified CDS sequence (opt3) from neuraminidase__InfluenzaB__ACA65079

SEQ ID NO: 156781 - RNA, 1401 nt, Artificial Sequence; identical to SEQ ID NO: 156683
  derived and/or modified CDS sequence (opt3) from neuraminidase__InfluenzaB__ACA65090

SEQ ID NO: 156782 - RNA, 1401 nt, Artificial Sequence; identical to SEQ ID NO: 156683
  derived and/or modified CDS sequence (opt3) from neuraminidase__InfluenzaB__ACA65101

SEQ ID NO: 156783 - RNA, 1401 nt, Artificial Sequence
  derived and/or modified CDS sequence (opt3) from neuraminidase__InfluenzaB__ACA96567
augcugcccagcaccauccagacacucacucuuuuccugacguccggcgggguguuguuaucucuguacgucucagccagucuaagcuaucuccuguacuccgacauucuucugaaguuuucuccuaccgagauaacagcuccaacuaugccguuggauugcgcaaacgccucgaauguucacgcggugaacagaucagcuaccaaaggaguaacacuccugcugcccgaaccugagugggccuauccaaggcucagcugucccgguaguaccuuccaaaaggcauuacugaucuccccucaucgguuuggcgaaacuaaaggaaauucugccccacuuauuauccgcgagcccuucauugcuugcgggccuaacgaauguaagcacuuugcauugacacauuacgccgcucagccaggcgguuauuacaaugggacccgaggagaccguaacaaacugagacaccuaaucagcgugaagcucggcaagauaccgacggucgaaaauuccaucuuccauauggccgcguggucaggcagugcaugccacgaugggaaagaguggacuuauauuggaguggacggucccgauaacaaugcccugcuuaagaucaaauacggcgaggcuuacaccgacacauaucacagcuacgccaacaauauucugaggacucaggagucugcauguaacugcaucgggggaaauuguuauuugaugauaaccgauggcuccgcuucagguguuagcgaaugccgguuucucaagauucgcgaggggagaaucauuaaagagaucuucccuacaggaagggugaagcauaccgaagaguguacgugcggcuuugccaguaacaagacuaucgaaugugcgugccgggacaauucuuacacagccaaacgcccauucgucaagcugaacguggagaccgauacugcagaaauucgauuaaugugcacagacaccuaucuggauacgcccagaccugacgauggcuccauaaccgggccaugugagagcaacggagacaaagguucgggcgggaucaagggaggcuuuguacaccagaggauggcuucuaaaauuggucggugguacucccguacaaugucaaagacugagcgcauggggaugggccucuauguuaaauacgacggagaucccugggccgacagugaugcucuugccuucagcggcaucaugguguccaugaaggaaccggggugguacucuuuuggauucgagauaaaggacaaaaagugcgaugucccuuguauugguaucgaaauggugcaugacggcgggaaagagaccuggcacagcgcagccacagcuaucuauugccugaugggaucaggccaauugcuaugggauacugugaccggugucgacauggcgcuguga

SEQ ID NO: 156784 - RNA, 1401 nt, Artificial Sequence; identical to SEQ ID NO: 156683
  derived and/or modified CDS sequence (opt3) from neuraminidase__InfluenzaB__ACA96578

SEQ ID NO: 156785 - RNA, 1401 nt, Artificial Sequence; identical to SEQ ID NO: 156771
  derived and/or modified CDS sequence (opt3) from neuraminidase__InfluenzaB__ACA96589

SEQ ID NO: 156786 - RNA, 1401 nt, Artificial Sequence; identical to SEQ ID NO: 156683
  derived and/or modified CDS sequence (opt3) from neuraminidase__InfluenzaB__ACA96600

SEQ ID NO: 156787 - RNA, 1401 nt, Artificial Sequence
  derived and/or modified CDS sequence (opt3) from neuraminidase__InfluenzaB__ACA96611
augcugcccagcaccauccagacacucacucuuuuccugacguccggcgggguguuguuaucucuguacgucucagccagucuaagcuaucuccuguacuccgacauucuucugaaguuuucuccuaccgagauaacagcuccaacuaugccguuggauuaugcaaacgccucgaauguucacgcggugaaccauucagcuaccaaaggaguaacacuccugcugcccgaaccugaguggaccuacccaagacucagcugccccgguaguacuuuccaaaaggccuuacugaucuccccucacagguuuggcgaaacaaaaggaaauucugcaccacuuauuauccgggagcccuucauugccugugggccuaacgaaugcaagcauuuugcuuugacccacuaugcagcccagccaggcgguuacuauaaugggacgcgcggagaccgaaacaaacugcgucaucuaaucagcgugaagcucggcaagauaccgacugucgaaaauuccaucuuccacauggcugccuggucaggcagugcgugucacgaugggaaagaguggaccuacauuggaguggacggucccgauaacaaugcacugcuuaagaucaaauacggcgaggccuauacagacacuuaccauagcuaugcuaacaauauucugagaacccaggagucugccugcaacuguaucgggggaaauugcuacuugaugauaacagauggcuccgcaucagguguuagcgaauguagguuucucaagauucgggaggggcgcaucauuaaagagaucuucccuaccggaagagugaagcacacggaagagugcacuuguggcuuugcuaguaacaagacaaucgaaugcgccuguagggacaauucuuauaccgcgaaacggccauucgucaagcugaacguggagacugauacagccgaaauucgcuuaaugugcaccgacacguaccuggauacaccccgaccugacgauggcuccauaaccgggccaugcgagagcaacggagacaaagguucgggcgggaucaagggaggcuuuguacaucagagaauggcaucuaaaauugguaggugguauucccggacuaugucaaagaccgagcguauggggaugggccucuacguuaaauacgacggagaucccugggcugacagugaugcccuugcuuucagcggcgugauggucuccaugaaggaaccggggugguauucuuuuggauucgagaucaaggacaaaaagugugaugugccuugcauagguauugaaauggugcacgacggcgggaaagagacauggcacagcgccgcaacugccaucuacugucugaugggaucaggccgcuugcuaugggauaccgucacagguguugacauggcucuguga

SEQ ID NO: 156788 - RNA, 1401 nt, Artificial Sequence
  derived and/or modified CDS sequence (opt3) from neuraminidase__InfluenzaB__ACA96622
augcugcccagcaccauccagacacucacucuuuuccugacguccggcgggguguuguuaucucuguacgucucagccagucuaagcuaucuccuguacuccgacauucuucugaaguuuucuccuaccgagauaacagcuccaacuaugccguuggauugcgcaaacgccucgaauguucacgcggugaacagaucagcuaccaaaggaguaacacuccugcugcccgaaccugaguggaccuauccaaggcucagcugucccgguaguacuuuccaaaaggccuuacugaucuccccucaucgguuuggcgaaacaaaaggaaauucugcaccacuuauuauccgcgagcccuucauugccugcgggccuaacgaauguaagcacuuugcuuugacccauuacgcagcccagccaggcgguuauuacaaugggacgcgaggagaccguaacaaacugagacaccuaaucagcgugaagcucggcaagauaccgacugucgaaaauuccaucuuccauauggcugccuggucaggcagugcgugccacgaugggaaagaguggaccuauauuggaguggacggucccgauaacaaugcacugcuuaagaucaaauacggcgaggccuacacagacacuuaucacagcuacgcuaacaauauucugaggacccaggagucugccuguaacugcaucgggggaaauuguuauuugaugauaacagauggcuccgcaucagguguuagcgaaugccgguuucucaagauucgcgaggggagaaucauuaaagagaucuucccuaccggaagggugaagcauacggaagaguguacuugcggcuuugcuaguaacaagacaaucgaaugugccugccgggacaauucuuacaccgcgaaacgcccauucgucaagcugaacguggagacugauacagccgaaauucgauuaaugugcaccgacacguaucuggauacccccagaccugacgauggcuccauaaucgggccaugugagagcaacggagacaaagguucgggcgggauuaagggaggcuuuguacaccagaggauggcaucuaaaaucggucggugguacucccguacaaugucaaagacugagcgcauggggaugggccucuauguuaaauacgacggagaucccugggcugacagugaugcccuugcuuucagcggcgugauggucuccaugaaggaaccggggugguacucuuuuggauucgagauaaaggacaaaaagugcgaugugccuuguauugguaucgaaauggugcaugacggcgggaaagagaccuggcacagcgccgcaacagccaucuauugccugaugggaucaggccaauugcuaugggauacugucaccgguguugacauggcucuguga

SEQ ID NO: 156789 - RNA, 1401 nt, Artificial Sequence; identical to SEQ ID NO: 156771
  derived and/or modified CDS sequence (opt3) from neuraminidase__InfluenzaB__ACA96633

SEQ ID NO: 156790 - RNA, 1401 nt, Artificial Sequence
  derived and/or modified CDS sequence (opt3) from neuraminidase__InfluenzaB__ACA96644
augcugcccagcaccauccagacacucacucuuuuccugacguccggcgggguguuguuaucucuguacgucucagccagucuaagcuaucuccuguacuccgacauucuucugaaguuuucuccuaccgagauaacagcuccaacuaugccguuggauugcgcaaacgccucgaauguucaagcggugaacagaucagcuaccaaaggaguaacacuccugcugcccgaaccugaguggaccuauccaaggcucagcugucccgguaguacuuuccagaaggccuuacugaucuccccucaccgguuuggcgaaacaaaaggaaauucugcaccacuuauuauccgcgagcccuucauugccugcgggccuaacgaauguaagcauuuugcuuugacccacuacgcagcccagccaggcgguuauuacaaugggacgcgaggagaccguaacaaacugagacaucuaaucagcauaaagcucggcaagaucccgacuguggaaaauuccauuuuccacauggcugccuggucaggcagugcgugccaugaugggaaagaguggaccuauaucggagucgacggucccgauaacaaugcacugcuuaagauuaaauacggcgaggccuacacagacacuuaucacagcuacgcuaacaagauccugaggacccaggagucugccuguaauugcauagggggaaacuguuauuugaugauuacagauggcuccgcaucaggugugagcgaaugccgguuucucaaaauccgcgaggggagaauuaucaaggagaucuucccuaccggaaggguuaagcacacggaagaguguacuugcggcuuugcuaguaauaaaacaauugaaugugccugccgggacaacucuuacaccgcgaagcgcccauucgugaaacugaaugucgagacugauacagccgaaauacgauuaaugugcaccgacacguaucuggauacccccagaccugacgauggcuccaucacagggccaugugagagcaacggagacaaggguucgggcgggauuaaaggaggcuuugugcaucaaaggauggcaucuaagaucggucggugguacucccguacuaugucaaaaaccgagcgcauggggaugggccucuauguaaaguacgacggagaucccugggcugacagugaugcccuugcuuucagcggcguuaugauauccaugaaggaaccggggugguacucuuuuggauucgagauuaaagacaagaaaugcgaugugccuuguaucgguaucgaaaugguccacgacggcgggaaggagacauggcauagcgccgcaacugccauuuauugccugaugggaucaggccaguugcuaugggauaccgugacagguguggacauggcucuguga

SEQ ID NO: 156791 - RNA, 1401 nt, Artificial Sequence
  derived and/or modified CDS sequence (opt3) from neuraminidase__InfluenzaB__ACA96655
augcugcccagcaccauccagacacucacucuuuuccugacguccggcgggguguuguuaucucuguacgucucagccagucuaagcuaucuccuguacuccgacauucuucugaaguuuucucaaaccgagauaacagcuccuaucaugccauuggauugcgcaaacgccucgaauguucaggcggugaacagaucagcuacuaaaggaguaacccuccugcugccggaacccgaguggacauauccuaggcucagcuguccagguaguaccuuccagaaggccuuacugauuucuccccaccgguuuggcgaaacuaaaggaaauuccgcaccucuuaucauucgcgagccauucaucgccugcgggcccaaggaauguaaacauuuugcuuugacacacuacgcagcccagccuggcgguuauuacaacgggacccgagaggaccguaauaagcugagacaucuaauaagcgugaagcucggaaaaaucccaacggucgagaacuccauuuuccacauggcugccuggucaggcagugcgugccaugauggcagggaauggacuuauaucgggguggacggaccggauagcaaugcacugcuuaagauuaaauacggugaggccuacaccgacacauaucacucuuacgcuaagaacauccugcggacucaagaauccgccuguaauugcauaggcggggauuguuauuugaugauuaccgacggacccgcaucaggcaucagcgagugccgcuuucucaaaauuagagaggguaggaucaucaaggaaauuuucccuacagggcggguuaagcacaccgaggaauguacgugcggauuugcuaguaacaaaacuauagagugugccugccgcgauaauucuuacacagcgaagcgaccauucgugaaacugaacgucgaaaccgacacugccgagaucagauuaaugugcacagagaccuaucuggauacgcccaggccuaaugacggcuccauuaccggcccaugugaaagcaacggggauaagggaucggguggcaucaaagggggauuugugcaucagcggauggcaucuaagauaggccguugguacucccgcacaaugucaaaaacuaagagaauggguauggggcucuauguaaaguacgacggcgaccccuggaccgauagugaggcucuugcccugagcggaguuaugguguccauggaggaaccgggcugguacucuuucggguuugaaauuaaagacaagaaaugcgaugucccuuguaucggaaucgagauggugcacgacgguggcaagacaacuuggcauagcgcugccaccgcaauuuauugcuugauggggucaggacagcuacugugggauacagugaccggcgucgacauggcccucuga

SEQ ID NO: 156792 - RNA, 1401 nt, Artificial Sequence
  derived and/or modified CDS sequence (opt3) from neuraminidase__InfluenzaB__ACA96666
augcugcccagcaccauccagacacucacucuuuuccugacguccggcgggguguuguuaucucuguacgucucagccagucuaagcuaucuccuguacuccgacauucuucugaaguuuucuccuaccgagauaacagcuccaacuaugccguuggauugcgcaaacgccucgaauguucaagcggugaacagaucagcuaccaaaggaguaacacuccugcugcccgaaccugaguggaccuauccaaggcucagcugucccgguaguacuuuccagaaggccuuacugaucuccccucaccgguuuggcgaaacaaaaggaaauucugcaccacuuauuauccgcgagcccuucauugccugcgggccuaacgaauguaagcauuuugcuuugacccacuacgcagcccagccaggcgguuauuacaaugggacgcgagaggaccguaacaaacugagacaucuaaucagcgugaagcucggaaagauaccgacugucgaaaauuccaucuuccacauggcugccuggucaggcagugcgugccaugauggcaaagaguggaccuauauugggguggacggacccgauaacaaugcacugcuuaagaucaaauacggugaggccuacacagacacuuaucacagcuacgcuaacaagauucugaggacccaggaaucugccuguaauugcaucggcgggaacuguuauuugaugauaacagauggauccgcaucaggcguuagcgagugccgguuucucaaaauucgcgaggguagaaucauuaaggaaaucuucccuaccgggagggugaagcacacggaggaauguacuugcggauuugcuaguaauaaaacaaucgagugugccugccgggacaacucuuacaccgcgaagcgcccauucgucaaacugaauguggaaacugauacagccgagauucgauuaaugugcaccgacacguaucuggauacccccagaccugacgauggcuccauaacaggcccaugugagagcaacggggacaggggaucggguggcaucaaagggggauuuguacaucaacggauggcaucuaagauuggccguugguacucccgcacuaugucaaagaccgaaagaauggguauggggcucuauguuaaauacgacggcgaucccugggcugacagugaugcccuugcuuucagcggagugauggucuccaugaaggagccgggcugguacucuuuuggguucgaaaucaaggacaaaaagugcgaugugccuuguauaggaauugagauggugcacgacgaugguaaagaaacauggcauagcgccgcaacugccaucuauugccugaugggcucagggcaguugcuaugggacaccgucacaggaguugauauggcucuguga

SEQ ID NO: 156793 - RNA, 1401 nt, Artificial Sequence
  derived and/or modified CDS sequence (opt3) from neuraminidase__InfluenzaB__ACD56581
augcugcccagcaccauccagacacucacucuuuuccugacguccggcgggguguuguuaucucuguacgucucagccagucuaagcuaucuccuguacuccgacauucuucugaaguuuucuaccacagagauaacugcuccuaccaugccauuggauugcgcaaacgccucgaauguucaagcggugaacagaucagcuacaaaaggaguaacccuccugcugccggaacccgaguggacuuauccuaggcucagcuguccagguaguacauuccagaaggccuuacugaucucuccccaccgguuuggcgaaaccaaaggaaauuccgcaccucuuauuauccgcgagccauucauugccugcgggcccaaggaauguaaacauuuugcuuugacgcacuacgcagcccagccuggcgguuauuacaacgggacucgagaggaccguaauaagcugagacaucuaaucagcgugaagcucggaaaaauaccaaccgucgagaacuccaucuuccacauggcugccuggucaggcagugcgugccaugauggcaaggaauggacauauauugggguggacggaccggauagcaaugcacugcuuaaaaucaaguacggugaggccuacacugacaccuaucacucuuacgcuaacaauauucugaggacacaggaauccgccuguaacugcaucggcgggaauuguuauuugaugauaaccgauggaucagcaagcggcauuagugagugccgguuucucaaaauccgcgaggguagaauuaucaaggaaaucuuccccacggggaggguuaagcacacugaggaauguacaugcggauuugcuucuaacaaaaccauugagugugccugccgggacaauuccuacacugcgaagcgcccuuucgugaaacugaacgucgaaacagauaccgccgagauacgauuaaugugcacggagaccuaucuggacacaccaagacccgaugacggcagcaucacuggcccuugugaaucgaaugggaacaagggaucugguggcauuaaagggggauuugugcaucaaaggauggcauccaagaucggccggugguacucacguaccaugaguaaaacaaagcgcauggguauggggcucuauguaaaguacgauggcgacccauggacugacagcgaugcucuugcccuguccggaguuauggugucuauggaggaacccggcugguacagcuucggguuugagauaaaagacaagaaaugcgaugucccguguauuggaaucgaaauggugcacgacgguggcaaggagaccuggcauucagcugccacagcaaucuauugcuugauggggaguggacagcuacugugggauaccgugacuggcgucgacauggcccucuga

SEQ ID NO: 156794 - RNA, 1401 nt, Artificial Sequence
  derived and/or modified CDS sequence (opt3) from neuraminidase__InfluenzaB__ACF33793
augcugcccagcaccauccagacacucacucuuuuccugacguccggcgggguguuguuaucucuguacgucucagccagucuaagcuaucuccuguacuccgacauucuucugaaguuuucuccuaccgagauaacagcuccaacuaugccguuggauugcgcaaacgccucgaauguucaagcggugaacagaucagcuaccaaaggaguaacacuccugcugcccgaaccugaguggaccuauccaaggcucagcugucccgguaguacuuuccagaaggccuuacugaucuccccucaccgguuuggcgaaacaaaaggaaauucugcaccacuuauuauccgcgagcccuucauugccugcgggccuaacgaauguaagcauuuugcuuugacccacuacgcagcccagccaggcgguuauuacaaugggacgcgaggagaccguaacaaacugagacaucuaaucagcgugaagcucggcaagauaccgacugucgaaaauuccaucuuccacauggcugccuggucaggcagugcgugccaugaugggaaagaguggaccuauauuggaguggacggucccgauaacaaugcacugcuuaagaucaaauacggcgaggccuacacagacacuuaucacagcuacgcuaacaauauucugaggacccaggagucugccuguaacugcaucgggggaaauuguuauuugaugauaacagauggcuccgcaucagguguuagcgaaugccgguuucucaagauucgcgaggggagaaucauuaaagagaucuucccuaccggaagggugaagcacacggaagaguguacuugcggcuuugcuaguaacaagacaaucgaaugugccugccgggacaauucuuacaccgcgaaacgcccauucgucaagcugaacguggagacugauacagccgaaauucgauuaaugugcaccgacacguaucuggauauacccagaccugacgauggcuccaucaccgggccaugugagagcaacggagacaaagguucgggcgggauuaagggaggcuuuguacaucaaaggauggcaucuaaaaucggucggugguacucccguacaaugucaaagacugagcgcauggggaugggccucuauguuaaauacgacggagaucccugggcugacagugaugcccuugcuuucagcggcgugauggucuccaugaaggaaccggggugguacucuuuuggauucgagauaaaggacaaaaagugcgaugugccuuguauugguaucgaaauggugcacgacggcgggaaagagaccuggcauagcgccgcaacagccaucuauugccugaugggaucaggccaguugcuaugggauacugucaccgguguugacauggcucuguga

SEQ ID NO: 156795 - RNA, 1401 nt, Artificial Sequence
  derived and/or modified CDS sequence (opt3) from neuraminidase__InfluenzaB__ACF33795
augcugcccagcaccauccagacacucacucuuuuccugacguccggcgggguguuguuaucucuguacgucucagccagucuaagcuaucuccuguacuccgacauucuucugaaguuuccuucuaccgagauaacagcuccaacuaugccguuggauugcgcaaacgccucgaauguucaagcggugaacagaucagcuaccaaaggaguaacacuccugcugcccgaaccugaguggaccuauccaaggcucagcugucccgguaguacuuuccagaaggccuuacugaucuccccucaccgguuuggcgaaacaaaaggaaauucugcaccacuuauuauccgcgagcccuucauugccugcgggccuaaggaauguaaacauuuugcuuugacccacuacgcagcccagccaggcgguuauuacaacgggacgcgaggagaccguaauaagcugagacaucuaaucagcgugaagcucggcaaaauaccgacugucgagaacuccaucuuccacauggcugccuggucaggcagugcgugccaugaugggaaggaguggaccuauauuggaguggacggucccgauaauaacgcacugcuuaaaaucaaguacggcgaagccuacacagacacuuaucacagcuacgcuaauaacauucugaggacccaggagucugccuguaauugcaucgggggaaacuguuauuugaugauaacagauggcuccgcaucagguguuagcgaaugccgguuucucaaaauucgcgaggggagaaucauuaaggagaucuucccuaccggaaggaucaagcacacggaagaguguacuugcggcuuugcuaguaauaaaacaauugaaugugccugccgggacaacucuuacaccgcgaagcgcccauucgugaaacugaaugucgagacugauacagccgaaauacgauuaaugugcaccgagacguaucuggacacccccagaccugaugacggcuccaucacagggccaugugagagcaacggagauaaggguucgggcgggauuaaaggaggcuuugugcaucaaaggauggcaucuaagaucggucggugguacucccguacuaugucaaaaaccgaaaagauggggaugggccucuauguaaaguacgacggagagcccugggcugacagugaugcccuuacauucagcggcguuaugguguccauggaggaaccggggugguacucuuuuggauucgaaauaaaagacaagaaaugcgaugucccuuguauugguaucgagauggugcacgacggcgggaaggagacuuggcauagcgcugccaccgcaaucuauugccugaugggaucaggccaguugcuaugggauacagugaccggugucaacauggcccuguga

SEQ ID NO: 156796 - RNA, 1401 nt, Artificial Sequence
  derived and/or modified CDS sequence (opt3) from neuraminidase__InfluenzaB__ACF33797
augcugcccagcaccauccagacacucacucuuuuccugacguccggcgggguguuguuaucucuguacgucucagccagucuaagcuaucuccuguacuccgacauucuucugaaguuuucuccuaccgagauaacagcuccaacuaugccguuggauugcgcaaacgccucgaauguucaagcggugaacagaucagcuaccaaaggaguaacacuccugcugcccgaaccugaguggaccuauccaaggcucagcugucccgguaguacuuuccagaaggccuuacugaucuccccucaccgguuuggcgaaacaaaaggaaauucugcaccacuuauuauccgcgagcccuucauugccugcgggccuaacgaauguaagcauuuugcuuugacccacuacgcagcccagccaggcgguuauuacaaugggacgcgaggagaccguaacaaacugagacaucuaaucagcgugaagcucggcaagauaccgacugucgaaaauuccaucuuccacauggcugccuggucaggcagugcgugccaugaugggaaagaguggaccuauauuggaguggacggucccgauaacaaugcacugcuuaagaucaaauacggcgaggccuacacagacacuuaucacagcuacgcuaacaauacccugaggacacaggagucugccuguaacugcauugggggaaauuguuauuugaugaucaccgauggcuccgcaucagguguuagcgaaugccgguuucucaagauacgcgaggggagaauuaucaaagagauuuucccuacgggaagggugaagcacacugaagaguguacaugcggcuuugcuaguaacaagaccaucgaaugugccugccgggacaauucuuacacugcgaaacgcccauucgucaagcugaacguggagacagauaccgccgaaauccgauuaaugugcacggagaccuaucuggacacacccagaccugaugacggcuccauuacugggccaugugagagcaacggagauaaagguucgggcgggauaaagggaggcuuuguacaucaaaggauggcaucuaaaaucggucggugguacucccguaccaugucaaagacagaacgcauggggaugggccucuauguuaaauacgacggagaccccugggcugauagugacgcccuugcucugauuggcgugauggucagcauggaggaaccggggugguacuccuucggauuugagaucaaggauaagaaaugcgacgugccuuguauagguauugaaauggugcacgauggcgggaaggagacuuggcauucugccgcaaccgccaucuauugcuugaugggaagcggccagcuacugugggacacagucaccgguguuaauauggcucucuga

SEQ ID NO: 156797 - RNA, 1401 nt, Artificial Sequence; identical to SEQ ID NO: 156776
  derived and/or modified CDS sequence (opt3) from neuraminidase__InfluenzaB__ACF41662

SEQ ID NO: 156798 - RNA, 1401 nt, Artificial Sequence
  derived and/or modified CDS sequence (opt3) from neuraminidase__InfluenzaB__ACF54140
augcugcccagcaccauccagacacucacucuuuuccugacguccggcgggguguuguuaucucuguacgucucagccagucuaagcuaucuccuguacuccgacauucuucugaaguuuucuccuaccgagauaacagcuccaacuaugccguuggauugcgcaaacgccucgaauguucaagcggugaacagaucagcuaccaaaggaguaacacuccugcugcccgaaccugaguggaccuauccaaggcucagcugucccgguaguacuuuccagaaggccuuacugaucuccccucaccgguuuggcgaaacaaaaggaaauucugcaccacuuauuauccgcgagcccuucauugccugcgggccuaacgaauguaagcauuuugcuuugacccacuacgcagcccagccaggcgguuauuacaaugggacgaaaggagaccgaaacaagcugcgucaucuaaucagcgugaagcucggcaaaauaccgacugucgaaaauuccaucuuccacauggcugccuggucaggcagugcgugccaugaugggaaggaguggaccuauauuggaguggacggucccgauaacaaugcacugcuuaaaaucaaguacggcgaggccuacacagacacuuaucacagcuacgcuaacaaaauucugagaacccaggagucugccuguaauugcaucgggggaaacuguuauuugaugauaacagauggcuccgcaucagguguuagcgaaugcagguuucucaagauucgggaggggcgcaucauuaaggagaucuucccuaccggaagagugaaacacacggaagaguguacuugcggcuuugcuaguaauaagacaaucgaaugugccugcagggacaacucuuacaccgcgaaacggccauucgucaagcugaauguggagacugauacagccgaaauucgcuuaaugugcaccgacacguaucuggauacaccccgaccugacgauggcuccauaaccgggccaugugagagcaacggagacagagguucgggcgggaucaaaggaggcuuuguacaucaaaggauggcaucuaagauuggucggugguacucccguacuaugucaaaaaccgagcgcauggggaugggccucuauguuaaguacgacggagaucccugggcugacagugaugcccuugcuuucagcggcgugauggucuccaugaaggaaccggggugguacucuuuuggauucgagaucaaagacaagaaaugcgaugugccuuguauagguauugaaauggugcacgacggcgggaaggagacauggcauagcgccgcaacugccaucuauugccugaugggaucaggccaguugcuaugggauaccgucacagguguugacauggcucuguga

SEQ ID NO: 156799 - RNA, 1401 nt, Artificial Sequence
  derived and/or modified CDS sequence (opt3) from neuraminidase__InfluenzaB__ACF54151
augcugcccagcaccauccagacacucacucuuuuccugacguccggcgggguguuguuaucucuguacgucucagccagucuaagcuaucuccuguacuccgacauucuucugaaguuuccuucuaccgagauaacagcuccaacuaugccguuggauugcgcaaacgccucgaauguucaagcggugaacagaucagcuaccaaaggaguaacacuccugcugcccgaaccugaguggaccuauccaaggcucagcugucccgguaguacuuuccagaaggccuuacugaucuccccucaccgguuuggcgaaacaaaaggaaauucugcaccacuuauuauccgcgagcccuucauugccugcgggccuaaggaauguaaacauuuugcuuugacccacuacgcagcccagccaggcgguuauuacaacgggacgcgaggaaaucguaacaagcugagacaucuaaucagcgugaagcucggcaaaauaccgacugucgaaaauuccaucuuccacauggcugccuggucaggcagugcgugccaugacgggaaggaguggaccuauauuggaguggauggucccgacaacaaugcacugcuuaaaaucaaguacggcgaagccuacacagauacuuaucacagcuacgcuaacaauauucugaggacccaggagucugccuguaacugcaucgggggaaauuguuauuugaugauaacagacggcuccgcaucagguguuagcgaaugccgguuucucaaaauucgcgaggggagaaucauuaaggagaucuucccuaccggaaggaucaagcacacggaagaguguacuugcggcuuugcuaguaacaaaacaauugaaugugccugccgggauaauucuuacaccgcgaagcgcccauucgugaaacugaacgucgagacugacacagccgaaauacgauuaaugugcaccgagacguaucuggauacccccagaccugacgauggcuccaucacagggccaugugagagcaacggagacaaggguucgggcgggauuaaaggaggcuuugugcaucaaaggauggcaucuaagaucggucggugguacucccguacuaugucaaaaaccaagcgcauggggaugggccucuauguaaaguacgauggagaccccugggcugacagugaugcccuugcuuucagcggcguuaugguguccauggaggagccggggugguacucuuuuggauucgaaauaaaagacaagaaaugcgaugucccuuguauugguaucgagauggugcacgacggcgggaaggaaacauggcauagcgccgcaacugccaucuauugccugaugggaucaggccaguugcuaugggauaccgugacaggugucaauauggcucuguga

SEQ ID NO: 156800 - RNA, 1401 nt, Artificial Sequence
  derived and/or modified CDS sequence (opt3) from neuraminidase__InfluenzaB__ACF54162
augcugcccagcaccauccagacacucacucuuuuccugacguccggcgggguguuguuaucucuguacgucucagccagucuaagcuaucuccuguacuccgacauucuucugaaguuuucucaaaccgagauaacagcuccuaucaugccauuggauugcgcaaacgccucgaauguucaggcggugaacagaucagcuacuaaaggaguaacccuccugcugccggaacccgaguggacauauccuaggcucagcuguccagguaguaccuuccagaaggccuuacugauuucuccccaccgguuuggcgaaacuaaaggaaauuccgcaccucuuaucauucgcgagccauucaucgccugcgggcccaaggaauguaaacauuuugcuuugacacacuacgcagcccagccuggcgguuauuacaacgggacccgagaggaccguaauaagcugagacaucuaauaagcgugaagcucggaaaaaucccaacggucgagaacuccauuuuccacauggcugccuggucaggcagugcgugccaugauggcaaggaauggacuuauaucgggguggacggaccggauagcaaugcacugcuuaaaauuaaguacggugaggccuacaccgacacauaucacucuuacgcuaaaaacauccugaggacucaagaauccgccuguaauugcauaggcggggauuguuauuugaugauuaccgacggacccgcaucaggcaucagcgagugccgguuucucaagauucgcgaggguagaaucaucaaggaaauuuucccuacagggaggguuaaacacaccgaggaauguacgugcggauuugcuaguaacaagacuauagagugugccugccgggauaauaacuacacagcgaaacgcccauucgugaagcugaaugucgaaaccgacacugccgagauccgauuaaugugcacagagaccuaucuggauacgcccagaccuaacgacggcucuauuaccggcccaugugaauccgauggggacaaaggaagcgguggcaucaaagggggauuugugcaucagaggauggcaucgaagauaggccggugguacucucguacaauguccaagacuaagcgcauggguauggagcucuauguaaaauacgacggggaucccuggaccgacucagaagcucuugcccugaguggcguuauggugagcauggaggaaccgggaugguacuccuucggcuuugagauuaaggauaaaaagugcgacgucccuuguaucgggaucgagauggugcacgauggagguaaaacaacuuggcauucugcugccaccgcaauuuauugcuugaugggcagcgggcagcuacugugggacacagugaccggagucgauauggcccucuga

SEQ ID NO: 156801 - RNA, 1401 nt, Artificial Sequence
  derived and/or modified CDS sequence (opt3) from neuraminidase__InfluenzaB__ACF54184
augcugcccagcaccauccagacacucacucuuuuccugacguccggcgggguguuguuaucucuguacgucucagccagucuaagcuaucuccuguacuccgacauucuucugaaguuuucuaccacagagauaacugcuccuaccaugccauuggauugcgcaaacgccucgaauguucaagcggugaacagaucagcuacaaaaggaguaacccuccugcugccggaacccgaguggacuuauccuaggcucagcuguccagguaguacauuccagaaggccuuacugaucucuccccaccgguuuggcgaaaccaaaggcaauuccgcaccucuuauuauccgcgagccauucauugccugcggacccaaggaauguaaacauuuugcuuugacgcacuacgcagcccagccuggcgguuauuacaacgggacuaaggaggaccgaaauaagcugcgucaucuaaucagcgugaaacucggaaagauaccaaccgucgagaacuccaucuuccacauggcugccuggucaggcagugcgugccaugauggcaaagaauggacauauauugggguggacggaccggauagcaaugcacugcuuaagaucaaauacggugaggccuacacugacaccuaucacucuuacgcuaacaauauucugagaacacaggaauccgccuguaacugcaucggcgggaauuguuauuugaugauaaccgauggaucagcaagcggcauuagugagugcagguuucucaagauccgggagggucgcauuaucaaggaaaucuuccccacggggagaguuaaacacacugaggaauguacaugcggauuugcuucuaacaagaccauugagugugccugcagggacaauuccuacacugcgaaacggccuuucgugaagcugaacgucgaaacagauaccgccgagauacgcuuaaugugcacggagaccuaucuggacacaccacgacccgaugacggcagcaucacuggcccuugugaaucgaaugggaacaaaggaucugguggcauuaaagggggauuugugcaucaaagaauggcauccaagaucgggaggugguacucacggaccaugaguaagacaaagcguauggguauggggcucuauguaaaauacgauggcgacccauggacugacagcgaugcucuugcccuguccggaguuauggugucuauggaggaacccggcugguacagcuucggguuugagauaaaggacaaaaagugcgaugucccguguauuggaaucgaaauggugcacgacgguggcaaagagaccuggcauucagcugccacagcaaucuauugcuugauggggaguggacagcuacugugggauaccgugacuggcgucgacauggcccucuga

SEQ ID NO: 156802 - RNA, 1401 nt, Artificial Sequence
  derived and/or modified CDS sequence (opt3) from neuraminidase__InfluenzaB__ACF54206
augcugcccagcaccauccagacacucacucuuuuccugacguccggcgggguguuguuaucucuguacgucucagccagucuaagcuaucuccuguacuccgacauucuucugaaguuuucuaccacagagacuaccgcuccuacaaugccauuggauugcgcaaacgccucgaauguucaagcggugaacagaucagcuaccaaaggaguaacucuccugcugccggaacccgaguggacauauccuaggcucagcuguccagguaguaccuuccagaaggccuuacugauaucuccccaccgguuuggcgaaacgaaaggaaauuccgcaccucuuaucauucgcgagccauucaucgccugcgggcccaaggaauguaaacauuuugcuuugacucacuacgcagcccagccuggcgguuauuacaacgggacccgagaggaccguaauaagcugagacaucuaauuagcgugaagcucggaaaaaucccaacagucgagaacuccauauuccacauggcugccuggucaggcagugcgugccaugauggcaaggaauggacuuauaucgggguggacggaccggauagcaaugcacugcuuaaaauuaaguacggugaggccuacaccgacacauaucacucuuacgcuaacaauauccugaggacccaggaauccgccuguaacugcauuggcgggaauuguuauuugaugaucacggauggaucagcaagcggcauaagugagugccgguuucucaaaauucgcgaggguagaaucauuaaggaaaucuuccccacugggaggguuaagcacacagaggaauguaccugcggauuugcuucuaacaaaacuaucgagugugccugccgggacaauuccuacacagcgaagcgcccuuucgugaaacugaacgucgaaaccgauacggccgagauucgauuaaugugcaccgagacauaucuggacacuccaagacccgaugacggcagcauaaccggcccuugugaaucgaaugggaacaagggaucugguggcaucaaagggggauuugugcaucaaaggauggcauccaagauuggccggugguacucacguacaaugaguaaaacuaagcgcauggguauggggcucuauguaaaguacgauggcgacccauggaccgacagcgaugcucuugcccuguccggaguuauggugucuauggaggaacccggcugguacagcuucggguuugagaucaaagacaagaaaugcgaugucccguguauaggaauugaaauggugcacgacgguggcaaggagacauggcauucagcugccaccgcaaucuauugcuugauggggaguggacagcuacugugggauacugugacgggcgucgacauggcccucuga

SEQ ID NO: 156803 - RNA, 1401 nt, Artificial Sequence
  derived and/or modified CDS sequence (opt3) from neuraminidase__InfluenzaB__ACF54217
augcugcccagcaccauccagacacucacucuuuuccugacguccggcgggguguuguuaucucuguacgucucagccagucuaagcuaucuccuguacuccgacauucuucugaaguuuucucaaaccgagauaacagcuccuaucaugccauuggauugcgcaaacgccucgaauguucaggcggugaaccacucagcuacuaaaggaguaacccuccugcugccggaacccgaguggacauauccuagacucagcuguccagguaguaccuuccagaaggccuuacugauuucuccccauagguuuggcgaaacuaaaggaaauuccgcaccucuuaucauucgggagccauucaucgccugcgggcccaaggaauguaaacacuuugcuuugacacauuacgcagcccagccuggcgguuauuacaacgggacccgcgaggaccgaaauaagcugcgucaccuaauaagcgugaagcucggaaaaaucccaacggucgagaacuccauuuuccauauggcugccuggucaggcagugcgugccacgauggcagagaauggacuuauaucgggguggacggaccggauagcaaugcacugcuuaagauuaaauacggugaggccuacaccgacacauaucacucuuacgcuaagaacauccugaggacucaagaauccgccuguaauugcauaggcggggauuguuauuugaugauuaccgacggacccgcaucaggcaucagcgagugccgguuucucaaaauucgcgaggguagaaucaucaaggaaauuuucccuacagggaggguuaagcauaccgaggaauguacgugcggauuugcuaguaacaaaacuauagagugugccugccgggauaauucuuacacagcgaagcgcccauucgugaaacugaacgucgaaaccgacacugccgagauccgauuaaugugcacagagaccuaucuggauacgcccagaccuaaugacggcuccauuaccggcccaugugaaagcaacggggauaagggaucggguggcaucaaagggggauuugugcaccagaggauggcaucuaagauaggccggugguacucccguacaaugucaaaaacuaagcgcauggguauggggcucuauguaaaguacgacggcgaccccuggaccgauagugaggcucuugcccugagcggaguuaugguguccauggaggaaccgggcugguacucuuucggguuugaaauuaaagacaagaaaugcgaugucccuuguaucggaaucgagauggugcaugacgguggcaagacaacuuggcacagcgcugccaccgcaauuuauugcuugauggggucaggacagcuacugugggauacagugaccggcgucgacauggcccucuga

SEQ ID NO: 156804 - RNA, 1401 nt, Artificial Sequence; identical to SEQ ID NO: 156695
  derived and/or modified CDS sequence (opt3) from neuraminidase__InfluenzaB__ACF54228

SEQ ID NO: 156805 - RNA, 1401 nt, Artificial Sequence; identical to SEQ ID NO: 156716
  derived and/or modified CDS sequence (opt3) from neuraminidase__InfluenzaB__ACF54239

SEQ ID NO: 156806 - RNA, 1401 nt, Artificial Sequence
  derived and/or modified CDS sequence (opt3) from neuraminidase__InfluenzaB__ACF54261
augcugcccagcaccauccagacacucacucuuuuccugacguccggcgggguguuguuaucucuguacgucucagccagucuaagcuaucuccuguacuccgacauucuucugaaguuuucuccuaccgagauaacagcuccaacuaugccguuggauugcgcaaacgccucgaauguucaagcggugaacagaucagcuaccaaaggaguaacacuccugcugcccgaaccugaguggaccuauccaaggcucagcugucccgguaguacuuuccagaaggccuuacugaucuccccucaccgguuuggcgaaacaaaaggaaauucugcaccacuuauuauccgcgagcccuucauugccugcgggccuaaggaauguaaacauuuugcuuugacccacuacgcagcccagccaggcgguuauuacaacgggacgcgagaggaccguaauaagcugagacaucuagugagcgucaagcucggaaaaaucccgacuguggagaacuccauauuccacauggcugccuggucaggcagugcgugccaugauggcaaggaauggaccuauaucgggguugacggacccgauagcaaugcacugcuuaaaauuaaguacggugaggccuacacagacacuuaucacucuuacgcuaacaauauccugaggacccaggaauccgccuguaacugcauuggcgggaauuguuauuugaugaucacagauggaucagcaagcggcauaagugagugccgguuucucaaaauucgcgaggguagaaucauuaaggaaaucuucccuaccgggagggugaagcacacggaggaauguacuugcggauuugcuucuaacaaaacaaucgagugugccugccgggacaauuccuacaccgcgaagcgcccauucgucaaacugaacguggaaacugauacagccgagauucgauuaaugugcaccgagacguaucuggacacccccagaccugaugacggcagcauaacaggcccaugugaaucgaauggggauaagggaucugguggcaucaaagggggauuuguacaucaaaggauggcauccaagauuggccggugguacucacguacuaugaguaaaaccaagcgcauggguauggggcucuauguuaaguacgacggcgaccccuggacagauagcgacgcucuugcccuguccggagugauggucucuauggaggaaccgggcugguacagcuucggguuugagaucaaagauaagaaaugcgacgugccuuguauaggaauugaaauggugcacgaugguggcaaggagacuuggcauucagcugccaccgcaaucuauugcuugauggggaguggacagcuacugugggacacagucaccggcguugauauggcccucuga

SEQ ID NO: 156807 - RNA, 1401 nt, Artificial Sequence
  derived and/or modified CDS sequence (opt3) from neuraminidase__InfluenzaB__ACF54272
augcugcccagcaccauccagacacucacucuuuuccugacguccggcgggguguuguuaucucuguacgucucagccagucuaagcuaucuccuguacuccgacauucuucugaaguuuucuaccacagagauaacugcuccuaccaugccauuggauugcgcaaacgccucgaauguucaagcggugaacagaucagcuacaaaaggaguaacccuccugcugccggaacccgaguggacuuauccuaggcucagcuguccagguaguacauuccagaaggccuuacugaucucuccccaccgguuuggcgaaaccaaaggaaauuccgcaccucuuauuauccgcgagccauucauugccugcgggcccaaggaauguaaacauuuugcuuugacgcacuacgcagcccagccuggcgguuauuacaacgggacucgagaggaccguaauaagcugagacaucuaaucagcgugaagcucggaaaaauaccaaccgucgagaacuccaucuuccacauggcugccuggucaggcagugcgugccaugauggcaaggaauggacauauauugggguggacggaccggauagcaaugcacugcuuaaaaucaaguacggugaggccuacacugacaccuaucacucuuacgcuaacaauauucugaggacacaggaauccgccuguaacugcaucggcgggaauuguuauuugaugauaaccgauggaucagcaagcggcauuagugagugccgguuucucaaaauccgcgaggguagaauuaucaaggaaaucuuccccacggggaggguuaagcacacugaggaauguacaugcggauuugcuucuaacaaaaccauugagugugccugccgggacaauuccuacacugcgaagcgcccuuucgugaaacugaacgucgaaacagauaccgccgagauacgauuaaugugcacggagaccuaucuggacacaccaagacccgaugacggcagcaucacuggcccuugugaaucgaauggggauaagggaucugguggcauuaaagggggauuugugcaucaaaggauggcauccaagaucggccggugguacucacguaccaugaguaaaacaaagcgcauggguauggggcucuauguaaaguacgacggcgacccauggacugauagcgacgcucuugcccuguccggaguuauggugucuauggaggaacccggcugguacagcuucggguuugagauaaaagauaagaaaugcgacgucccguguauuggaaucgaaauggugcacgaugguggcaaggagaccuggcauucagcugccacagcaaucuauugcuugauggggaguggacagcuacugugggacaccgugacuggcgucgauauggcccucuga

SEQ ID NO: 156808 - RNA, 1401 nt, Artificial Sequence
  derived and/or modified CDS sequence (opt3) from neuraminidase__InfluenzaB__ACF54283
augcugcccagcaccauccagacacucacucuuuuccugacguccggcgggguguuguuaucucuguacgucucagccagucuaagcuaucuccuguacuccgacauucuucugaaguuuucuaccacagagauaacugcuccuaccaugccauuggauugcgcaaacgccucgaauguucaagcggugaacagaucagcuacaaaaggaguaacccuccugcugccggaacccgaguggacuuauccuaggcucagcuguccagguaguacauuccagaaggccuuacugaucucuccccaccgguuuggcgaaaccaaaggaaauuccgcaccucuuauuauccgcgagccauucauugccugcgggcccaaggaauguaaacauuuugcuuugacgcacuacgcagcccagccuggcgguuauuacaacgggacucgagaggaccguaauaagcugagacaucuagugagcgucaagcucggaaaaaucccaaccguggagaacuccauauuccacauggcugccuggucaggcagugcgugccaugauggcaaggaauggacauauaucgggguugacggaccggauagcaaugcacugcuuaaaauuaaguacggugaggccuacacugacaccuaucacucuuacgcuaacaauauccugaggacacaggaauccgccuguaacugcauuggcgggaauuguuauuugaugaucaccgauggaucagcaagcggcauaagugagugccgguuucucaaaauucgcgaggguagaaucauuaaggaaaucuuccccacggggagggugaagcacacugaggaauguacaugcggauuugcuucuaacaaaaccaucgagugugccugccgggacaauuccuacacugcgaagcgcccuuucgucaaacugaacguggaaacagauaccgccgagauucgauuaaugugcacggagaccuaucuggacacaccaagacccgaugacggcagcauaacuggcccuugugaaucgaauggggauaagggaucugguggcaucaaagggggauuuguacaucaaaggauggcauccaagauuggccggugguacucacguaccaugaguaaaacaaagcgcauggguauggggcucuauguuaaguacgacggcgacccauggacugauagcgacgcucuugcccuguccggagugauggucucuauggaggaacccggcugguacagcuucggguuugagaucaaagauaagaaaugcgacgugccguguauaggaauugaaauggugcacgaugguggcaaggagaccuggcauucagcugccacagcaaucuauugcuugauggggaguggacagcuacugugggacaccgucacuggcguugauauggcccucuga

SEQ ID NO: 156809 - RNA, 1401 nt, Artificial Sequence
  derived and/or modified CDS sequence (opt3) from neuraminidase__InfluenzaB__ACF54294
augcugcccagcaccauccagacacucacucuuuuccugacguccggcgggguguuguuaucucuguacgucucagccagucuaagcuaucuccuguacuccgacauucuucugaaguuuucuaccacagagauaacugcuccuaccaucccauuggauugcgcaaacgccucgaauguucaagcggugaacagaucagcuacaaaaggaguaaccuuccuccugccggaacccgaguggacuuauccuaggcugagcuguccagguaguacauuucagaaggcccucuuaauuucuccccaccgguucggcgaaaccaaaggaaauuccgcaccucugaucauucgcgagccauuuaucgccugcgggcccaaggaauguaaacauuucgcucuuacgcacuacgcagcccagccuggcgguuauuacaacgggacucgagaggaccguaauaaguugagacaucugauaagcgugaagcuaggaaaaaucccaaccgucgagaacuccauuuuucacauggcugccuggucaggcagugcgugccaugauggcaaggaauggacauauaucgggguggacggaccggauagcaaugcacuccugaaaauuaaguacggugaggccuacacugacaccuaucacucuuacgcuaacaauauccuuaggacacaggaauccgccuguaacugcauaggcgggaauuguuaucugaugauuaccgauggaucagcaagcggcaucagugagugccgguucuugaaaauucgcgaggguagaaucaucaaggaaauuuuucccacggggaggguuaagcacacugaggaauguacaugcggauucgcuucuaacaaaaccauagagugugccugccgggacaauuccuacacugcgaagcgcccuuuugugaaacucaacgucgaaacagauaccgccgagauccgacugaugugcacggagaccuauuuagacacaccaagacccgaugacggcagcauuacuggcccuugugaaucgaaugggaacaagggaucugguggcaucaaagggggauucgugcaucaaaggauggcauccaagauaggccggugguacucacguaccaugaguaaaacaaagcgcauggguauggggcuguauguaaaguacgauggcgacccauggacugacagcgaugcucucgcccuuuccggaguuauggugucuauggaggaacccggcugguacagcuuuggguucgagauuaaagacaagaaaugcgaugucccguguaucggaaucgaaauggugcacgacgguggcaaggagaccuggcauucagcugccacagcaauuuauugccugauggggaguggacaguugcuaugggauaccgugacuggcgucgacauggcccuguga

SEQ ID NO: 156810 - RNA, 1401 nt, Artificial Sequence
  derived and/or modified CDS sequence (opt3) from neuraminidase__InfluenzaB__ACF54305
augcugcccagcaccauccagacacucacucuuuuccugacguccggcgggguguuguuaucucuguacgucucagccagucuaagcuaucuccuguacuccgacauucuucugaaguuuucuaccacagagauaacugcuccuaccaugccauuggauugcgcaaacgccucgaauguucaagcggugaacagaucagcuacaaaaggaguaaccuuccuccugccggaacccgaguggacuuauccuaggcugagcuguccagguaguacauuucagaaggcccucuuaaucucuccccaccgguucggcgaaaccaaaggaaauuccgcaccucugauuauccgcgagccauuuauugccugcgggcccaaggaauguaaacauuucgcucuuacgcacuacgcagcccagccuggcgguuauuacaacgggacucgagaggaccguaauaaguugagacaucugaucagcguggagcuaggaaagauaccaaccgucgaaaacuccaucuuucacauggcugccuggucaggcagugcgugccaugauggcaaagaguggacauauauugggguggacggaccggauagcaaugcacuccugaagaucaaauacggugaagccuacacugacaccuaucacucuuacgcuaacaauauucuuaggacacaggaguccgccuguaacugcaucggcgggaauuguuaucugaugauaaccgauggaucagcaagcggcauuagugagugccgguucuugaagauccgcgaagguagaauuaucaaagagaucuuucccacggggaggguuaagcacacugaagaguguacaugcggauucgcuucuaacaagaccauugaaugugccugccgggacaauuccuacacugcgaaacgcccuuuugugaagcucaacgucgagacagauaccgccgagauacgacugaugugcacggaaaccuauuuagacacaccaagacccgaugacggcagcaucacuggcccuugugagucgaaugggaacaaaggaucugguggcauuaaagggggauucgugcaucaaaggauggcauccaagaucggccggugguacucacguaccaugaguaagacaaaacgcauggguauggggcuguauguaaaguacgauggcgacccauggacugacagcgaugcucucgcccuuuccggaguuauggugucuauggaggaacccggcugguacagcuuuggguucgaaauaaaggacaaaaagugcgaugucccguguauuggaaucgagauggugcacgacgguggcaaagagaccuggcauucagcugccacagcaaucuauugccugauggggaguggacaguugcuaugggauaccgugacuggcgucgacauggcccuguga

SEQ ID NO: 156811 - RNA, 1401 nt, Artificial Sequence
  derived and/or modified CDS sequence (opt3) from neuraminidase__InfluenzaB__ACF54316
augcugcccagcaccauccagacacucacucuuuuccugacguccggcgggguguuguuaucucuguacgucucagccagucuaagcuaucuccuguacuccgacauucuucugaaguuuucuccuaccgagauaacagcuccaacuaugccguuggauugcgcaaacgccucgaauguucaagcggugaacagaucagcuaccaaaggaguaacacuccugcugcccgaaccugaguggaccuauccaaggcucagcugucccgguaguacuuuccagaaggccuuacugaucuccccucaccgguuuggcgaaacaaaaggaaauucugcaccacuuauuauccgcgagcccuucauugccugcgggccuaacgaauguaagcauuuugcuuugacccacuacgcagcccagccaggcgguuauuacaaugggacgcgaggagaccguaacaaacugagacaucuaaucagcgugaagcucggcaagauaccgacugucgaaaauuccaucuuccacauggcugccuggucaggcagugcgugccaugaugggaaagaguggaccuauauuggaguggacggucccgauaacaaugcacugcuuaagaucaaauacggcgaggccuacacagacacuuaucacagcuacgcuaacaauauucugaggacccaggagucugccuguaacugcaucgggggaaauuguuauuugaugauaacagauggcuccgcaucagguguuagcgaaugccgguuucucaagauucgcgaggggagaaucauuaaagagaucuucccuaccggaagggugaagcacacggaagaguguacuugcggcuuugcuaguaacaagacaaucgaaugugccugccgggacaauucuuacaccgcgaaacgcccauucgucaagcugaacguggagacugauacagccgaaauucgauuaaugugcaccgagacguaucuggacacccccagaccugaugacggcuccauaacagggccaugugagagcaacggagauaaagguucgggcgggaucaagggaggcuuuguacaucaaaggauggcaucuaaaauuggucggugguacucccguacuaugucaaagaccgaacgcauggggaugggccucuauguuaaauacgacggagaccccugggcugauagugacgcccuugcucugaucggcgugauggucagcauggaggaaccggggugguacuccuucggauuugagauaaaggauaagaauugcgacgugccuuguauugguaucgaaauggugcacgauggcgggaaagagacauggcauucugccgcaacugccaucuauugcuugaugggaagcggccagcuacugugggacaccgucacagguguuaacauggcucucuga

SEQ ID NO: 156812 - RNA, 1404 nt, Artificial Sequence
  derived and/or modified CDS sequence (opt3) from neuraminidase__InfluenzaB__ACF54338
augcugcccagcaccauccagacacucacucuuuuccugacguccggcgggguguuguuaucucuguacgucucagccagucuaagcuaucuccuguacuccgacauucuucugaaguuuccuucuaccgagauaacagcuccaacuaugccguuggauugcgcaaacgccucgaauguucaagcggugaacagaucagcuaccaaaggaguaacacuccugcugcuccccgaaccugaguggaccuauccaagguuaagcugucccgguaguacuuuccagaaggcccugcuuaucuccccucaccgguuuggcgaaacaaaaggaaauucugcaccauugauuauccgcgagcccuucauugccugcgggccuaaggaauguaaacauuuugcucugacccacuacgcagcccagccaggcgguuauuacaacgggacgcgaggagaccguaauaagcuaagacaucucaucagcgugaagcugggcaaaauaccgacugucgagaacuccaucuuccacauggcugccuggucaggcagugcgugccaugaugggaaggaguggaccuauauuggaguggacggucccgauaauaacgcacuucugaaaaucaaguacggcgaagccuacacagacacuuaucacagcuacgcuaauaacauuuugaggacccaggagucugccuguaauugcaucgggggaaacuguuaucucaugauaacagauggcuccgcaucagguguuagcgaaugccgguuucugaaaauucgcgaggggagaaucauuaaggagaucuucccuaccggaaggaucaagcacacggaagaguguacuugcggcuuugcuaguaauaaaacaauugaaugugccugccgggacaacucuuacaccgcgaagcgcccauucgugaaauuaaaugucgagacugauacagccgaaauacgacugaugugcaccgagacguaucucgacacccccagaccugaugacggcuccaucacagggccaugugagagcaacggagguaagggcucugggggaauuaaaggcgguuuugugcaucaaaggauggcaucgaagaucgggcggugguacucccguacuaugucaaaaaccgaacgcaagggcaugggacuuuauguaaaguacgauggcgaccccugggcugacagugaugcccugguuuucagcggggugauggucuccauggaggaaccgggaugguacucuuuugguuucgagauaaaagacaagaaaugcgaugugccuuguauuggcaucgaaauggugcacgacgggggaaaggagacauggcauagcgcugccacugcaaucuauugcuugaugggcucaggucagcuacugugggauaccgucacagggguuaacauggcccucuga

SEQ ID NO: 156813 - RNA, 1401 nt, Artificial Sequence
  derived and/or modified CDS sequence (opt3) from neuraminidase__InfluenzaB__ACF54349
augcugcccagcaccauccagacacucacucuuuuccugacguccggcgggguguuguuaucucuguacgucucagccagucuaagcuaucuccuguacuccgacauucuucugaaguuuucucaaaccgagauaacagcuccuaucaugccauuggauugcgcaaacgccucgaauguucaggcggugaacagaucagcugccaaaggaguaacucuccugcugccggaacccgaguggaccuauccuaggcucagcuguccagguaguacauuccagaaggcauuacugauuaauccccaccgguuuggcgaaaccaaagggaacuccgccccucuuaucauucgcgagccauucaucgcuugcggacccacugaauguaagcauuuugcauugacacacuacgccgcucagccuggcgguuauuacaaugggacccgagaggaccguaacaaacugagacaucuaauaucugugaagcucggaaagaucccaacggucgagaauagcauuuuccacauggccgcgugguccggcucagcaugccaugauggcaaagaauggacuuauaucgggguggacggaccggauaguaacgcccugcuuaagauuaaauacggugaggcuuacaccgacacauaucacagcuacgccaagaauauccugaggacucaagaaucugcauguaacugcauaggcggggauuguuauuugaugauuaccgacggauccgcuucaggcaucagcgagugccgguuucucaaaauucgcgaggguagaaucaucaaggaaauuuuccccacagggaggguuaagcacaccgaggaauguacgugcggauuugccaguaauaaaacuauagagugugcgugccgggauaacucuuacacagccaagcgcccuuucgugaaacugaaugucgaaaccgacacugcagagauccgauuaaugugcacagagaccuaucuggauacgccaagacccaacgacggcuccauuaccggcccuugugaaagcgauggggacaagggaucggguggcaucaaagggggauuugugcaucagaggauggcuucuaagauaggccggugguacucccguacaaugucaaaaacuaagcgcauggguauggggcucuauguaaaguacgacggcgauccauggaccgacagugaggcccuugcucugagcggaguuaugguguccauggaggaacccggcugguacucuuucggguuugaaauuaaagauaagaaaugcgacgucccguguaucggaaucgagauggugcacgaugguggcaagacaacuuggcauagcgccgcaaccgccauuuauugcuugauggggucaggacagcuacugugggacacagugaccggcgucgauauggcucucuga

SEQ ID NO: 156814 - RNA, 1401 nt, Artificial Sequence
  derived and/or modified CDS sequence (opt3) from neuraminidase__InfluenzaB__ACF54371
augcugcccagcaccauccagacacucacucuuuuccugacguccggcgggguguuguuaucucuguacgucucagccagucuaagcuaucuccuguacuccgacauucuucugaaguuuucucaaaccgagauaacagcuccuaucaugccauuggauugcgcaaacgccucgaauguucaggcggugaacagaucagcugccaaaggaguaacucuccugcugccggaacccgaguggaccuauccuaggcucagcuguccagguaguacauuccagaaggcauuacugauuucuccccaccgguuuggcgaaaccaaaggaaauuccgccccucuuaucauucgcgagccauucaucgcuugcgggcccacugaauguaagcauuuugcauugacacacuacgccgcucagccuggcgguuauuacaacgggacccgagaggaccguaauaaacugagacaucuaauaagcgugaagcucggaaagaucccaacggucgagaacuccauuuuccacauggccgcguggucaggcagugcaugccaugauggcaaagaauggacuuauaucgggguggacggaccggauagcaaugcccugcuuaagauuaaauacggugaggcuuacaccgacacauaucacucuuacgccaagaacauccugaggacucaagaauccgcauguaauugcauaggcggggauuguuauuugaugauuaccgacggacccgcuucaggcaucagcgagugccgguuucucaaaauucgcgaggguagaaucaucaaggaaauuuucccuacagggaggguuaagcacaccgaggaauguacgugcggauuugccaguaacaaaacuauagagugugcgugccgggauaauucuuacacagccaagcgcccauucgugaaacugaacgucgaaaccgacacugcagagauccgauuaaugugcacagagaccuaucuggauacgcccagaccuaaugacggcuccauuaccggcccaugugaaagcgauggggacaagggaucggguggcaucaaagggggauuugugcaucagaggauggcuucuaagauaggccggugguacucccguacaaugucaaaaacuaagcgcauggguauggggcucuauguaaaguacgacggcgaucccuggaccgacagugaggcccuugcucugagcggaguuaugguguccauggaggaaccgggcugguacucuuucggguuugaaauuaaagauaagaaaugcgacgucccuuguaucggaaucgagauggugcacgaugguggcaagacaacuuggcauagcgccgcaaccgccauuuauugcuugacagggucaggacagcuacugugggacaccgugacuggcgucgauauggcucucuga

SEQ ID NO: 156815 - RNA, 1401 nt, Artificial Sequence
  derived and/or modified CDS sequence (opt3) from neuraminidase__InfluenzaB__ACI22549
augcugcccagcaccauccagacacucacucuuuuccugacguccggcgggguguuguuaucucuguacgucucagccagucuaagcuaucuccuguacuccgacauucuucugaaguuuucuccuaccgagauaacagcuagaacuaugccauuggauugcgcaaacgccucgaauguucaagcggugaacaggucagcuaccaaaggaguaacacuccugcugccggaacccgaguggaccuauccucggcucagcuguccagguaguacuuuccagaaggccuuacugaucucuccccaccgcuuuggcgaaacaaaaggaaauuccgcaccucuuauuauccgagagccauucauugccugcgggcccaacgaauguaagcauuuugcuuugacccacuacgcagcccagccuggcgguuauuacaaugggacgcguggagacagaaacaaacugaggcaucuaaucagcgugaagcucggcaagauaccaacugucgaggauuccaucuuccacauggcugccuggucaggcagugcgugccaugacgggaaagaguggaccuauauuggaguggaugguccggacaauaacgcacugcuuaagaucaaauacggcgaagccuacacagauacuuaucacagcuacgcuaauaacauucugcggacccaggagucugccuguaauugcaucgggggaaacuguuauuugaugauaacagacggcuccgcaucagguguuagcgaaugccgcuuucucaagauuagagaggggaggaucauuaaagagaucuuccccaccggacgggugaagcacacggaagaguguacuugcggcuuugcuaguaauaagacaaucgaaugugccugccgcgauaacucuuacaccgcgaaacgaccuuucgucaagcugaauguggagacugacacagccgaaauuagauuaaugugcaccgagacguaucuggauaccccaaggcccgacgauggcuccauaacagggccuugugagagcaacggagacaaagguucgggcgggaucaagggaggcuuuguacaucaacggauggcaucuaaaauuggucguugguacucccgcacuaugucaaagaccgaaagaauggggaugggccucuauguuaaauacgacggagauccaugggcugacagugaugcccuugcucugaucggcgugauggucagcauggaggaacccgggugguacuccuucggauuugagauaaaggacaagaacugcgaugugccguguauugguaucgaaauggugcacgacggcgggaaagagacauggcauucugccgcaacugccaucuauugcuugaugggaagcggccagcuacugugggauaccgucacagguguuaauauggcucucuga

SEQ ID NO: 156816 - RNA, 1401 nt, Artificial Sequence
  derived and/or modified CDS sequence (opt3) from neuraminidase__InfluenzaB__ACI22551
augcugcccagcaccauccagacacucacucuuuuccugacguccggcgggguguuguuaucucuguacgucucagccagucuaagcuaucuccuguacuccgacauucuucugaaguuuucuccuaccgagauaacagcuuugacuaugccacucgauugcgcaaacgccucgaauguucaagcggugaacagaucagcuaccaaaggaguaacacugcugcucccggaacccgaguggaccuauccuagguuaagcuguccagguaguacuuuccagaaggcccugcuuaucucuccccaccgguuuggcgaaacaaaaggaaauuccgcaccuuugauuauccgcgagccauucauugccugcgggcccaacgaauguaagcauuuugcucugacccacuacgcagcccagccuggcgguuauuacaaugggacgcgaggagaccguaacaaacuaagacaucucaucagcgugaagcugggcaagauaccaacugucgaaaauuccaucuuccacauggcugccuggucaggcagugcgugccaugaugggaaagaguggaccuauauuggaguggacgguccggauaacaaugcacuucugaagaucaaauacggcgaggccuacacagacacuuaucacagcuacgcuaacaauauuuugaggacccaggagucugccuguaacugcaucgggggaaauuguuaucucaugauaacagauggcuccgcaucagguguuagcgaaugccgguuucugaagauucgcgaggggagaaucauuaaagagaucuuccccaccggaagggugaagcacacggaagaguguacuugcggcuuugcuaguaacaagacaaucgaaugugccugccgggacaauucuuacaccgcgaaacgcccuuucgucaaguuaaacguggagacugauacagccgaaauucgacugaugugcaccgagacguaucucgacaccccaagacccgaugacggcuccauaacagggccuugugagagcaacggagauaaagguucgggcgggaucaagggaggcuuuguacaucaaaggauggcaucuaaaauuggucggugguacucccguacuaugucaaagaccgaacgcauggggaugggccuuuauguuaaauacgacggagacccaugggcugauagugacgcccuggcuuugaucggcgugauggucagcauggaggaacccgggugguacuccuucggauuugagauaaaggauaagaauugcgacgugccguguauugguaucgaaauggugcacgauggcgggaaagagacauggcauucugccgcaacugccaucuauugccuaaugggaagcggccagcugcucugggacaccgucacagguguuaacauggcucuguga

SEQ ID NO: 156817 - RNA, 1401 nt, Artificial Sequence; identical to SEQ ID NO: 156816
  derived and/or modified CDS sequence (opt3) from neuraminidase__InfluenzaB__ACI22555

SEQ ID NO: 156818 - RNA, 1401 nt, Artificial Sequence; identical to SEQ ID NO: 156683
  derived and/or modified CDS sequence (opt3) from neuraminidase__InfluenzaB__ACI22557

SEQ ID NO: 156819 - RNA, 1401 nt, Artificial Sequence
  derived and/or modified CDS sequence (opt3) from neuraminidase__InfluenzaB__ACI22559
augcugcccagcaccauccagacacucacucuuuuccugacguccggcgggguguuguuaucucuguacgucucagccagucuaagcuaucuccuguacuccgacauucuucugaaguuuccuucuaccgagauaacagcuccaacuaugccguuggauugcgcaaacgccucgaauguucaagcggugaaccucucagcuaccaaaggaguaacacugcugcuccccgaaccugaguggaccuauccaagauuaagcugucccgguaguacuuuccagaaggcccugcuuaucuccccucacagguuuggcgaaacaaaaggaaauucugcaccauugauuauccgggagcccuucauugccugcgggccuaaggaauguaaacauuuugcucugacccacuacgcagcccagccaggcgguuauuacaacgggacgcgcggagaccgaaauaagcuacgucaucucaucagcgugaagcugggcaaaauaccgacugucgagaacuccaucuuccacauggcugccuggucaggcagugcgugccaugaugggaaggaguggaccuauauuggaguggacggucccgauaauaacgcacuucugaaaaucaaguacggcgaagccuacacagacacuuaucacagcuacgcuaauaacauuuugagaacccaggagucugccuguaauugcaucgggggaaacuguuaucucaugauaacagauggcuccgcaucagguguuagcgaaugcagguuucugaaaauucgggaggggcgcaucauuaaggagaucuucccuaccggaagaaucaagcacacggaagaguguacuugcggcuuugcuaguaauaaaacaauugaaugugccugcagggacaacucuuacaccgcgaagcggccauucgugaaauuaaaugucgagacugauacagccgaaauacgccugaugugcaccgagacguaucucgacacaccccgaccugaugacggcuccaucaccgggccaugugagagcaacggagguaagggcucugggggaauuaaaggcgguuuugugcaucaaagaauggcaucgaagaucgggaggugguacucccggacuaugucaaaaaccgaacguaagggcaugggacuuuauguaaaguacgauggcgaccccugggcugacagugaugcccuggcuuucagcgggguuaugguguccauggaggaaccgggaugguacucuuuugguuucgagauaaaagacaagaaaugcgaugucccuuguauuggcaucgaaauggugcacgacgggggaaaggagacauggcauagcgccgcaacugccaucuauugcuugaugggcucaggucagcuacugugggauaccgugacaggggucaacauggcucucuga

SEQ ID NO: 156820 - RNA, 1401 nt, Artificial Sequence
  derived and/or modified CDS sequence (opt3) from neuraminidase__InfluenzaB__ACI22561
augcugcccagcaccauccagacacucacucuuuuccugacguccggcgggguguuguuaucucuguacgucucagccagucuaagcuaucuccuguacuccgacauucuucugaaguuuucuccuaccgagauaacagcuccaacuaugccguuggauugcgcaaacgccucgaauguucaagcggugaacagaucagcuaccaaaggagguacacuccugcugcccgaaccugaguggaccuauccaaggcucagcugucccggcaguacuuuccagaaggccuuacugaucuccccucaccgguuuggggaaacaaaaggaaauucugcaccacuuauuauccgcgagcccuucauugccugcggcccuaacgaauguaagcauuuugcuuugacccacuacgcagcccagccagguggguauuacaauggaacgcgaggcgaccguaacaaacugagacaucuaaucagcguaaagcucggcaagauaccgacuguggaaaauuccaucuuccacauggcugccuggucagggagugcgugccaugauggaaaagaguggaccuauauuggugucgacggccccgauaacaaugcacugcuuaagaucaaauacggggaggccuacacagacacuuaucacagcuacgcuaacaagauucugaggacccaggagucugccuguaauugcaucggaggcaacuguuauuugaugauaacagaugguuccgcaucaggggugagcgaaugccgguuucucaaaauucgcgagggaagaaucauuaaggagaucuucccuaccggcaggguuaagcacacggaagaguguacuugcggcuuugcuaguaauaaaacaaucgaaugugccugccgggacaacucuuacaccgcgaagcgcccauucgugaaacugaaugucgagacugauacagccgaaauucgauuaaugugcaccgacacguaucuggauacccccagaccugacgauggguccauaacaggaccaugugagagcaacggugacaagggcucugggggaaucaaaggcgguuuugugcaucaaaggauggcaucgaagauugggcggugguacucccguacuaugucaaaaaccgagcgcaugggcaugggacucuauguaaaguacgacggcgaucccugggcugacagugaugcccuugcuuucagcgggguuaugguguccaugaaggaaccgggaugguacucuuuugguuucgagaucaaagacaagaaaugcgaugucccuuguauaggcauugaaauggugcacgacgggggaaaggagacauggcauagcgccgcaacugccaucuauugccugaugggcucaggucaguugcuaugggauaccgugacaggggucgacauggcucuguga

SEQ ID NO: 156821 - RNA, 1401 nt, Artificial Sequence; identical to SEQ ID NO: 156683
  derived and/or modified CDS sequence (opt3) from neuraminidase__InfluenzaB__ACI22563

SEQ ID NO: 156822 - RNA, 1401 nt, Artificial Sequence
  derived and/or modified CDS sequence (opt3) from neuraminidase__InfluenzaB__ACI22565
augcugcccagcaccauccagacacucacucuuuuccugacguccggcgggguguuguuaucucuguacgucucagccagucuaagcuaucuccuguacuccgacauucuucugaaguuuccuucuaccgagauaacagcuccaacuaugccguuggauugcgcaaacgccucgaauguucaagcggugaaccacucagcuaccaaaggaguaacacuccugcugcccgaaccugaguggaccuauccaagacucagcugucccgguaguacuuuccagaaggccuuacugaucuccccucauagguuuggcgaaacaaaaggaaauucugcaccacuuauuauccgggagcccuucauugccugcgggccuaaggaauguaaacacuuugcuuugacccauuacgcagcccagccaggcgguuauuacaacgggacgcgcggagaccgaaauaagcugcgucaccuaaucagcgugaagcucggcaaaauaccgacugucgagaacuccaucuuccauauggcugccuggucaggcagugcgugccacgaugggaaggaguggaccuauauuggaguggacggucccgauaauaacgcacugcuuaaaaucaaguacggcgaagccuacacagacacuuaucacagcuacgcuaauaacauucugagaacccaggagucugccuguaauugcaucgggggaaacuguuauuugaugauaacagauggcuccgcaucagguguuagcgaaugcagguuucucaaaauucgggaggggcgcaucauuaaggagaucuucccuaccggaagaaucaagcauacggaagaguguacuugcggcuuugcuaguaauaaaacaauugaaugugccugcagggacaacucuuacaccgcgaagcggccauucgugaaacugaaugucgagacugauacagccgaaauacgcuuaaugugcaccgagacguaucuggacacaccccgaccugaugacggcuccaucaccgggccaugugagagcaacggagguaagggcucugggggaauuaaaggcgguuuugugcaccaaagaauggcaucgaagaucgggaggugguacucccggacuaugucaaaaauagaacguaagggcaugggacucuauguaaaguacgauggcgaccccugggcugacagugaugcccuugcuuucagcgggguuaugguguccauggaggaaccgggaugguacucuuuugguuucgagauucgcgacaaaaagugcgaugucccuuguaucggcaucgaaauggugcaugacgggggaaaagagaccuggcacagcgccgcaacagccauuuauugccugaugggcucaggucaguugcuaugggauacugugaccggggucaacauggcucuguga

SEQ ID NO: 156823 - RNA, 1401 nt, Artificial Sequence; identical to SEQ ID NO: 156683
  derived and/or modified CDS sequence (opt3) from neuraminidase__InfluenzaB__ACI22567

SEQ ID NO: 156824 - RNA, 1401 nt, Artificial Sequence; identical to SEQ ID NO: 156683
  derived and/or modified CDS sequence (opt3) from neuraminidase__InfluenzaB__ACI22569

SEQ ID NO: 156825 - RNA, 1401 nt, Artificial Sequence
  derived and/or modified CDS sequence (opt3) from neuraminidase__InfluenzaB__ACJ53908
augcugcacagcaccauccagacacucacucuuuuccugacguccggcgggguguuguuaucucuguacgucucagccagucuaagcuaucuccuguacuccgacauucuucugaaguuuucucaaaccgagauaacagcucccaucaugccuuuggauugcgcaaacgccucgucaguucaggcggugaauagaagcgcugccaaaggaguaacucuccugcugccagaaccggaguggaccuaucccaggcucaguuguccugguuccacauuccagaaggcauuacugauuucuccacaucgguuuggcgaaaccaaagggaacagcgcuccccuuaucauucgcgagccuuucaucgccugcggaccaacugaauguaagcacuuugcauugacacauuacgccgcucagcccggcgguuauuacaaugggacccgagaggaccguaacaaacugagacaccuaauauccgugaagcucggaaagaucccuacggucgaaaauucaauuuuccauauggccgcguggaguggcagcgcaugccacgauggcaaagaauggacuuauaucgggguggacggaccagauucuaacgcccugcuuaagauuaaauacggugaggcuuacaccgacacauaucacuccuacgccaagaauauccugaggacucaagaaucagcauguaacugcauaggcggggauuguuauuugaugauuaccgacggaccggcuagcggcaucagugagugccgguuucucaaaauucgcgaggguagaaucaucaaggaaauuuuccccacagggaggguuaagcauaccgaggaauguacgugcggauuugccucuaauaaaacuauagagugugcgugccgggauaacuccuacacagccaagcgcccuuucgugaaacugaaugucgaaaccgacacugcagagauccgauuaaugugcacagagaccuaucuggauacgccaagacccaacgacggcagcauuaccggcccuugugaaucggauggggacaagggaucugguggcaucaaagggggauuugugcaccagaggauggcuuccaagauaggccggugguacucacguacaaugaguaaaacuaagcgcauggguauggggcucuauguaaaguacgacggcgauccauggaccgacagcgaggcccuugcucuguccggaguuauggugucuauggaggagcccggcugguacagcuucggguuugaaauuaaagauaagaaaugcgacgucccguguaucggaaucgagauggugcaugaugguggcaagacaacuuggcacucagccgcaaccgccauuuauugcuugauggggaguggacagcuacugugggacacagugaccggcgucgauauggcucucuga

SEQ ID NO: 156826 - RNA, 1401 nt, Artificial Sequence; identical to SEQ ID NO: 156701
  derived and/or modified CDS sequence (opt3) from neuraminidase__InfluenzaB__ACN32560

SEQ ID NO: 156827 - RNA, 1401 nt, Artificial Sequence; identical to SEQ ID NO: 156771
  derived and/or modified CDS sequence (opt3) from neuraminidase__InfluenzaB__ACN32582

SEQ ID NO: 156828 - RNA, 1401 nt, Artificial Sequence; identical to SEQ ID NO: 156683
  derived and/or modified CDS sequence (opt3) from neuraminidase__InfluenzaB__ACN32593

SEQ ID NO: 156829 - RNA, 1401 nt, Artificial Sequence
  derived and/or modified CDS sequence (opt3) from neuraminidase__InfluenzaB__ACN32604
augcugcccagcaccauccagacacucacucuuuuccugacguccggcgggguguuguuaucucuguacgucucagccagucuaagcuaucuccuguacuccgacauucuucugaaguuuucuccuaccgagauaacagcuccaacuaugccguuggauugcgcaaacgccucgaauguucacgcggugaacagaucagcuaccaaaggaguaacacuccugcugcccgaaccugaguggaccuauccaaggcucagcugucccgguaguacuuuccaaaaggccuuacugaucuccccucaucgguuuggcgaaacaaaaggaaauucugcaccacuuauuauccgcgagcccuucauugccugcgggccuaacgaauguaagcacuuugcuuugacccauuacgcagcccagccaggcgguuauuacaaugggacgcgaggagaccguaacaaacugagacaccuaaucagcgugaagcucggcaagauaccgacugucgaaaauuccaucuuccauauggcugccuggucaggcagugcgugccacgaugggaaagaguggaccuauauuggaguggacggucccgauaacaaugcacugcuuaagaucaaauacggcgaggccuacacagacacuuaucacagcuacgcuaacaauauucugaggacccaggagucugccuguaacugcaucgggggaaauuguuauuugaugauaacagauggcuccgcaucagguguuagcgaaugccgguuucucaagauucgcgaggggagaaucauuaaagagaucuucccuaccggaagggugaagcauacggaagaguguacuugcggcuuugcuaguaacaagacaaucgaaugugccugccgggacaauucuuacaccgcgaaacgcccauucgucaagcugaacguggagacugauacagccgaaauucgauuaaugugcaccgacacguaucuggauacccccagaccugacgauggcuccauaacagggccaugugaguuuaacggagacaaagguagcggcgggaucaagggaggcuucguacaccagaggauggcaucgaaaauuggucggugguacucucguacuauguccaagaccgagcgcauggggaugggccucuauguuaaauacgacggagaucccugggcugacucagaugcccuugcuuuuaguggcgugauggucagcaugaaggaaccggggugguacuccuucggauucgagaucaaggacaaaaagugcgaugugccuuguauagguauugaaauggugcaugacggcgggaaagagacauggcacucugccgcaacugccaucuauugccugaugggaagcggccaauugcuaugggauaccgucacagguguugacauggcucuguga

SEQ ID NO: 156830 - RNA, 1401 nt, Artificial Sequence; identical to SEQ ID NO: 156683
  derived and/or modified CDS sequence (opt3) from neuraminidase__InfluenzaB__ACN32615

SEQ ID NO: 156831 - RNA, 1401 nt, Artificial Sequence
  derived and/or modified CDS sequence (opt3) from neuraminidase__InfluenzaB__ACN32775
augcugcccagcaccauccagacacucacucuuuuccugacguccggcgggguguuguuaucucuguacgucucagccagucuaagcuaucuccuguacuccgacauucuucugaaguuuucuccuaccgagauaaacgcuccaacaaugccguuggauugcgcaaaugccucgaacguucacgcggugaauagaucagcuacuaaaggaguaacccuccugcugcccgaaccugaguggacauauccaaggcucagcugucccgguaguaccuuccaaaaggccuuacugaucuccccucaucgguuuggcgaaacuaaagggaacucugcaccacuuauuauccgcgagcccuucauugccugcggaccuaaugaauguaagcacuuugcuuugacacauuacgcagcccagccaggcgguuauuacaacgggacccgaggagaccguaauaaacugagacaccuaaucagcgugaagcucggcaagauaccgacggucgagaacuccaucuuccauauggcugccuggucaggcagugcgugccacgaugggaaagaguggacuuauauuggaguggacggucccgauaauaacgcacugcuuaagaucaaauacggcgaagccuacaccgacacauaucacagcuacgcuaauaacauucugaggacucaggagucugccuguaauugcaucgggggaaacuguuauuugaugauaaccgauggcuccgcaucagguauuagcgaaugccgguuucucaagauccgcgaggggagaauuaucaaagagaucuucccuacaggaaggguuaagcauaccgaagaguguacgugcggcuuugcuaguaauaagucuauugaaugugccugccgggacaacuccuacacugcgaaacgcccauucgugaagcugaacgucgagacagauaccgccgaaauacgauuaaugugcacugacacauaucuggauacccccagaccugacgauggcagcaucacggggccaugugagucgaauggagacaaagguucuggcgggauuaagggaggcuuugugcaccagaggauggcauccaaaaucggucggugguacucacguaccaugaguaagacagagcgcauggggaugggccucuauguaaaauacgacggagaucccugggcugacagcgaugcccuugcuuucuccggcguuauggugucuaugaaggaaccggggugguacagcuuuggauucgagauaaaggacaaaaagugcgaugucccuuguauugguaucgaaauggugcaugacggcgggaaagagacuuggcacucagccgcaaccgccaucuauugccugaugggaaguggccaauugcuaugggauacagugacuggugucgacauggcucuguga

SEQ ID NO: 156832 - RNA, 1401 nt, Artificial Sequence; identical to SEQ ID NO: 156683
  derived and/or modified CDS sequence (opt3) from neuraminidase__InfluenzaB__ACN32786

SEQ ID NO: 156833 - RNA, 1401 nt, Artificial Sequence
  derived and/or modified CDS sequence (opt3) from neuraminidase__InfluenzaB__ACO05928
augcugcccagcaccauccagacacucacucuuuuccugacguccggcgggguguuguuaucucuguacgucucagccagucuaagcuaucuccuguacuccgacauucuucugaaguuuccuucuaccgagauaacagcuccaacuaugccguuggauugcgcaaacgccucgaauguucaagcggugaacagaucagcuaccaaaggaguaacacuccugcugcccgaaccugaguggaccuauccaaggcucagcugucccgguaguacuuuccagaaggccuuacugaucuccccucaccgguuuggcgaaacaaaaggaaauucugcaccacuuauuauccgcgagcccuucauugccugcgggccuaaggaauguaaacauuuugcuuugacccacuacgcagcccagccaggcgguuauuacaacgggacgcgaggagaccguaauaagcugagacaucuaaucagcgugaagcucggcaaaauaccgacugucgagaacuccaucuuccacauggcugccuggucaggcagugcgugccaugaugggaaggaguggaccuauauuggaguggacggucccgauaauaacgcacugcuuaaaaucaaguacggcgaagccuacacagacacuuaucacagcuacgcuaauaacauucugaggacccaggagucugccuguaauugcaucgggggaaacuguuauuugaugauaacagauggcuccgcaucagguguuagcgaaugccgguuucucaaaauucgcgaggggagaaucauuaaggagaucuucccuaccggaaggaucaagcacacggaagaguguacuugcggcuuugcuaguaauaaaacaauugaaugugccugccgggacaacucuuacaccgcgaagcgcccauucgugaaacugaaugucgagacugauacagccgaaauacgauuaaugugcaccgagacguaucuggacacccccagaccugaugacggcuccaucacagggccaugugagagcaacggagauaaggguucgggcgggauuaaaggaggcuuugugcaucaaaggauggcaucuaagaucggucggugguacucccguacuaugucaaaaaccaagcgcauggggaugggccucuauguaaaguacgacggagaccccugggcugauagugacgcccuugcuuucagcggcguuauggugccgauggaggaaccugggugguacuccuuuggauucgaaauaaaagauaagaaaugcgacguccccuguauugguaucgagauggugcacgauggcgggaaggaaacauggcauucugccgcaacugccaucuauugccugaugggaagcggccaguugcuaugggacaccgugacaggugucaacauggcucuguga

SEQ ID NO: 156834 - RNA, 1401 nt, Artificial Sequence; identical to SEQ ID NO: 156695
  derived and/or modified CDS sequence (opt3) from neuraminidase__InfluenzaB__ACO05950

SEQ ID NO: 156835 - RNA, 1401 nt, Artificial Sequence
  derived and/or modified CDS sequence (opt3) from neuraminidase__InfluenzaB__ACO05961
augcugcccagcaccauccagacacucacucuuuuccugacguccggcgggguguuguuaucucuguacgucucagccagucuaagcuaucucccuuacuccgacauucugcuuaaguuuccaucuaccgagauaacagcuccgacuaugccccuggauugcgcaaacgccucgaauguucaagcggugaacagaucagcuaccaaaggaguaacauugcuccugccugaaccagaguggaccuaucccaggcugagcuguccugguaguacuuuccagaaggcccucuuaaucuccccacaccgguuuggcgaaacaaaaggaaauucugcaccccugauuauccgcgagccuuucauugccugcgggccaaaggaauguaaacauuuugcucuuacccacuacgcagcccagccgggcgguuauuacaacgggacgcgaggagaccguaauaaguugagacaucugaucagcgugaagcuaggcaaaauacccacugucgagaacuccaucuuccacauggcugccuggucaggcagugcgugccaugaugggaaggaguggaccuauauuggaguggacgguccugauaauaacgcacuccugaaaaucaaguacggcgaagccuacacagacacuuaucacagcuacgcuaauaacauucuuaggacccaggagucugccuguaauugcaucgggggaaacuguuaucugaugauaacagauggcuccgcaucagguguuagcgaaugccgguuuuugaaaauucgcgaggggagaaucauuaaggagaucuucccaaccggaaggaucaagcacacggaagaguguacuugcggcuuugcuaguaauaaaacaauugaaugugccugccgggacaacucuuacaccgcgaagcgccccuucgugaaacucaaugucgagacugauacagccgaaauacgacugaugugcaccgagacguauuuagacaccccuagaccagaugacggcuccaucacagggcccugugagagcaacggagauaaggguucgggcgggauuaaaggaggcuuugugcaucaaaggauggcaucuaagaucggucggugguacucccguacuaugucaaaaaccaagcgcauggggaugggccuguauguaaaguacgacggagacccgugggcugauagugacgcccucgcuuucagcggcguuaugguguccauggaggaaccugggugguacucuuuuggauucgaaauaaaagauaagaaaugcgacguccccuguauugguaucgagauggugcacgauggcgggaaggaaacauggcauagcgccgcaacugccaucuauugccuuaugggaucaggccagcuguugugggacaccgugacaggugucaacauggcucuauga

SEQ ID NO: 156836 - RNA, 1401 nt, Artificial Sequence
  derived and/or modified CDS sequence (opt3) from neuraminidase__InfluenzaB__ACO05972
augcugcccagcaccauccagacacucacucuuuuccugacguccggcgggguguuguuaucucuguacgucucagccagucuaagcuaucuccuguacuccgacauucuucugaaguuuucucaaaccgagauaacagcuccuaucaugccauuggauugcgcaaacgccucgaauguucaggcggugaacagaucagcugccaaaggaguaacucuccugcugccggaacccgaguggaccuauccuaggcucagcuguccagguaguacauuccagaaggcauuacugauuucuccccaccgguuuggcgaaaccaaaggaaauuccgccccucuuaucauucgcgagccauucaucgcuugcgggcccacugaauguaagcauuuugcauugacacacuacgccgcucagccuggcgguuauuacaacgggacccgagaggaccguaauaaacugagacaucuaauaagcgugaagcucggaaagaucccaacggucgagaacuccauuuuccacauggccgcguggucaggcagugcaugccaugauggcaaagaauggacuuauaucgggguggacggaccggauagcaaugcccugcuuaagauuaaauacggugaggcuuacaccgacacauaucacucuuacgccaagaacauccugaggacucaagaauccgcauguaauugcauaggcggggauuguuauuugaugauuaccgacggacccgcuucaggcaucagcgagugccgguuucucaaaauucgcgaggguagaaucaucaaggaaauuuucccuacagggaggguuaagcacaccgaggaauguacgugcggauuugccaguaacaaaacuauagagugugcgugccgggauaauucuuacacagccaagcgcccauucgugaaacugaacgucgaaaccgacacugcagagauccgauuaaugugcacagagaccuaucuggauacgcccagaccuaaugacggcuccauuaccggcccaugugaaagcgauggggacaagggaucggguggcaucaaagggggauuugugcaucagaggauggcuucuaagauaggccggugguacucccguacaaugucaaaaacuaagcgcauggguauggggcucuauguaaaguacgacggcgaucccuggaccgacagugaggcccuugcucugagcggaguuaugguguccauggaggaaccgggcugguacucuuucggguuugaaauuaaagauaagaaaugcgacgucccuuguaucggaaucgagauggugcacgaugguggcaagacaacuuggcauagcgccgcaaccgccauuuauugcuugauggggucaggacagcuacugugggacacagugaccggcgucgauauggcucucuga

SEQ ID NO: 156837 - RNA, 1401 nt, Artificial Sequence; identical to SEQ ID NO: 156836
  derived and/or modified CDS sequence (opt3) from neuraminidase__InfluenzaB__ACO05983

SEQ ID NO: 156838 - RNA, 1401 nt, Artificial Sequence; identical to SEQ ID NO: 156836
  derived and/or modified CDS sequence (opt3) from neuraminidase__InfluenzaB__ACO05994

SEQ ID NO: 156839 - RNA, 1401 nt, Artificial Sequence
  derived and/or modified CDS sequence (opt3) from neuraminidase__InfluenzaB__ACO06005
augcugcccagcaccauccagacacucacucuuuuccugacguccggcgggguguuguuaucucuguacgucucagccagucuaagcuaucuccuguacuccgacauucuucugaaguuuucuccuaccgagauaacagcuccaacuaugccguuggauugcgcaaacgccucgaauguucaagcggugaacagaucagcuaccaaaggaguaacacuccugcugcccgaaccugaguggaccuauccaaggcucagcugucccgguaguacuuuccagaaggccuuacugaucuccccucaccgguuuggcgaaacaaaaggaaauucugcaccacuuauuauccgcgagcccuucauugccugcgggccuaacgaauguaagcauuuugcuuugacccacuacgcagcccagccaggcgguuauuacaaugggacgcgaggagaccguaacaaacugagacaucuaaucagcgugaagcucggcaagauaccgacugucgaaaauuccaucuuccacauggcugccuggucaggcagugcgugccaugaugggaaagaguggaccuauauuggaguggacggucccgauaacaaugcacugcuuaagaucaaauacggcgaggccuacacagacacuuaucacagcuacgcuaacaagauucugaggacccaggagucugccuguaauugcaucgggggaaacuguuauuugaugauaacagauggcuccgcaucagguguuagcgaaugccgguuucucaaaauucgcgaggggagaaucauuaaggagaucuucccuaccggaagggugaagcacacggaagaguguacuugcggcuuugcuaguaauaaaacaaucgaaugugccugccgggacaacucuuacaccgcgaagcgcccauucgucaaacugaauguggagacugauacagccgaaauucgauuaaugugcaccgacacguaucuggauacccccagaccugacgauggcuccauaacagggccaugugagagcaacggagacagggguucgggcgggaucaagggaggcuuuguacaucaacggauggcaucuaaaauuggucguugguacucccgcacuaugucaaagaccgagagaauggggaugggccucuauguuaaauacgacggagaucccugggcugacagugaugcccuugcuuucagcggcgugauggucuccaugaaggaaccggggugguacucuuuuggauucgagaucaaggacaaaaagugcgaugugccuuguauagguauugaaauggugcacgacggcgggaaagagacauggcauagcgccgcaacugccaucuauugccugaugggaucaggccaguugcuaugggauaccgucacagguguugacauggcucuguga

SEQ ID NO: 156840 - RNA, 1401 nt, Artificial Sequence
  derived and/or modified CDS sequence (opt3) from neuraminidase__InfluenzaB__ACO06027
augcugcccagcaccauccagacacucacucuuuuccugacguccggcgggguguuguuaucucuguacgucucagccagucuaagcuaucuccuguacuccgacauucuucugaaguuuucucaaaccgagauaacagcuccuaucaugccauuggauugcgcaaacgccucgaauguucaggcggugaacagaucagcugccaaaggaguaacucuccugcugccggaacccgaguggaccuauccuaggcucagcuguccagguaguacauuccagaaggcauuacugauuucuccccaccgguuuggcgaaaccaaaggaaauuccgccccucuuaucauucgcgagccauucaucgcuugcgggcccacugaauguaagcauuuugcauugacacacuacgccgcucagccuggcgguuauuacaacgggacccgagaggaccguaauaaacugagacaucuaauaagcgugaagcucggaaagaucccaacggucgagaacuccauuuuccacauggccgcguggucaggcagugcaugccaugauggcaaagaauggacuuauaucgggguggacggaccggauagcaaugcccugcuuaagauuaaauacggugaggcuuacaccgacacauaucacucuuacgccaagaacauccugaggacucaagaauccgcauguaauugcauaggcggggauuguuauuugaugauuaccgacggacccgcuucaggcaucagcgagugccgguuucucaaaauucgcgaggguagaaucaucaaggaaauuuucccuacagggaggguuaagcacaccgaggaauguacgugcggauuugccaguaacaaaacuauagagugugcgugccgggauaauucuuacacagccaagcgcccauucgugaaacugaacgucgaaaccgacacugcagagauccgauuaaugugcacagagaccuaucuggauacgcccagaccuaaugacggcuccauuaccggcccaugugaaagcgauggggacaagggaucggguggcaucaaagggggauuugugcaucagaggauggcuucuaagauaggccggugguacucccguacaaugucaaaaacuaagcgcauggguauggggcucuauguaaaguacgacggcgaucccuggaccgacagugaggcccuugcucugagcggaguuaugguguccauggaggaaccgggcugguacucuuucggguuugaaauuaaagauaagaaaugcgacgucccuuguaucggaaucgagauggugcacgaugguggcaagacaacuuggcauagcgccgcaaccgccauuuauugcuugauggggucaggacagcuacugugggacacagugaccggcgucgauaugacucucuga

SEQ ID NO: 156841 - RNA, 1401 nt, Artificial Sequence
  derived and/or modified CDS sequence (opt3) from neuraminidase__InfluenzaB__ACO06066
augcugcccagcaccauccagacacucacucuuuuccugacguccggcgggguguuguuaucucuguacgucucagccagucuaagcuaucuccuguacuccgacauucuucugaaguuuucucaaaccgagauaacagcuccuaucaugccauuggauugcgcaaacgccucgaauguucaggcggugaacagaucaguagcuaaaggagugacucuccugcugccggaacccgaguggaccuauccuaggcucagcuguccagguaguacauuccagaaggccuuacugauuucuccccaccgguuuggcgaaaccaaaggaaauuccgcaccucuuaucauucgcgagccauucaucgccugcgggcccacugaauguaagcauuuugcuuugacacacuacgcagcccagccuggcgguuauuacaacgggacccgagaggaccguaauaaacugagacaucuaauaagcgucaagcucggaaagaucccaacgguggagaacuccauuuuccacauggcugccuggucaggcagugcgugccaugauggcaaagaauggacuuauaucgggguugacggaccggauagcaaugcacugcuuaagauuaaauacggugaggccuacaccgacacauaucacucuuacgcuaagaacauccugaggacucaagaauccgccuguaauugcauaggcggggauuguuauuugaugauuaccgacggacccgcaucaggcaucagcgagugccgguuucucaaaauucgcgaggguagaaucaucaaggaaauuuucccuacagggagggugaagcacaccgaggaauguacgugcggauuugcuaguaacaaaacuauagagugugccugccgggauaauucuuacacagcgaagcgcccauucgucaaacugaacguggaaaccgacacugccgagauccgauuaaugugcacagagaccuaucuggauacgcccagaccuaaugacggcuccauuaccggcccaugugaaagcgauggggacaagggaucggguggcaucaaagggggauuuguacaucagaggauggcaucuaagauaggccggugguacucccguacaaugucaaaaacuaagcgcauggguauggggcucuauguuaaguacgacggcgaucccuggaccgacagugaggcucuugcccugagcggagugauggucuccauggaggaaccgggcugguacucuuucggguuugaaauuaaagauaagaaaugcgacgugccuuguaucggaaucgagauggugcacgaugguggcaagacaacuuggcauagcgcugccaccgcaauuuauugcuugauggggucaggacagcuacugugggacacagucaccggcguugauaugacucucuga

SEQ ID NO: 156842 - RNA, 1401 nt, Artificial Sequence
  derived and/or modified CDS sequence (opt3) from neuraminidase__InfluenzaB__ACO94665
augcugcccagcaccauccagacacucacucuuuuccugacguccggcgggguguuguuaucucuguacgucucagccagucuaagcuaucuccuguacuccgacauucuucugaaguuuucuccuaccgagauaacagcuucgacuaugccauuggauugcgcaaacgccucaaauguucaagcggugaacagaagcgcuaccaaaggaguaacacuccugcugccggaacccgaguggaccuauccuaggcucaguuguccagguuccacuuuccagaaggccuuacugaucucuccccaccgguuuggcgaaacaaaagggaauagcgcaccucuuauuauccgcgagccauucauugccugcggacccaacgaauguaagcauuuugcuuugacccacuacgcagcccagccuggcgguuauuacaaugggacgcgaggagaccguaacaaacugagacaucuaaucuccgugaagcucggcaagauaccaacugucgaaaauucaaucuuccacauggcugccuggaguggcagcgcgugccaugaugggaaagaguggaccuauauuggaguggacgguccggauaacaaugcacugcuuaagaucaaauacggcgaggccuacacagacacuuaucacucuuacgcuaacaagauucugaggacccaggaguccgccuguaauugcaucgggggaaacuguuauuugaugauaacagauggcucagcaagcgguguuagugaaugccgguuucucaaaauucgcgaggggagaaucauuaaggagaucuuccccaccggaagggugaagcacacggaagaguguacuugcggcuuugcuucuaauaaaacaaucgaaugugccugccgggacaacuccuacaccgcgaagcgcccuuucgucaaacugaauguggagacugauacagccgaaauucgauuaaugugcaccgacacguaucuggauaccccaagacccgacgauggcagcauaacagggccuugugagucgaacggagacaaggguucuggcgggaucaaaggaggcuuuguacaucaaaggauggcauccaagauuggucggugguacucacguacuaugaguaaaaccgagcgcauggggaugggccucuauguuaaguacgacggagauccaugggcugacagcgaugcccuugcuuucuccggcgugauggucucuaugaaggaacccgggugguacagcuuuggauucgagaucaaagacaagaaaugcgaugugccguguauagguauugaaauggugcacgacggcgggaaggagacauggcauucagccgcaacugccaucuauugccugaugggaaguggccaguugcuaugggauaccgucacagguguugacauggcucuguga

SEQ ID NO: 156843 - RNA, 1401 nt, Artificial Sequence; identical to SEQ ID NO: 156683
  derived and/or modified CDS sequence (opt3) from neuraminidase__InfluenzaB__ACQ45607

SEQ ID NO: 156844 - RNA, 1401 nt, Artificial Sequence
  derived and/or modified CDS sequence (opt3) from neuraminidase__InfluenzaB__ACQ45610
augcugcccagcaccauccagacacucacucuuuuccugacguccggcgggguguuguuaucucuguacgucucagccagucuaagcuaucuccuguacuccgacauucuucugaaguuuucuccuaccgagauaacagcuccaacuguuccguuggauugcgcaaacgccucgaaugugcaagcgguaaacagaucagcuaccaaaggagugacacuccugcugcccgaaccugaguggaccuauccaaggcucagcugucccgguaguacuuuccagaaggccuuacugaucuccccucaccgguuuggcgaaacaaaaggaaauucugcaccacuuauuauccgcgagcccuucauugccugcgggccuaacgaauguaagcauuuugcuuugacccacuacgcagcccagccaggcgguuauuacaaugggacgcgaggagaccguaacaaacugagacaucuaaucagcgucaagcucggcaagauaccgacuguggaaaauuccaucuuccacauggcugccuggucaggcagugcgugccaugaugggaaagaguggaccuauauuggaguugacggucccgauaacaaugcacugcuuaagaucaaauacggcgaggccuacacagacacuuaucacagcuacgcuaacaagauucugaggacccaggagucugccuguaauugcaucgggggaaacuguuauuugaugauaacagauggcuccgcaucaggugugagcgaaugccgguuucucaaaauucgcgaggggagaaucauuaaggagaucuucccuaccggaagggucaaguacacggaagaguguacuugcggcuuugcuaguaauaaaacaaucgaaugugccugccgggacaacucuuauaccgcgaagcgcccauucgugaaacugaauguagagacugauacagccgaaauucgauuaaugugcaccgacacguaccuggauacccccagaccugacgauggcuccauaacagggccaugugagagcaacggagacaaggguucgggcgggaucaaaggaggcuuuguucaccaaaggauggcaucuaagauuggucggugguauucccguacuaugucaaaaaccgagcgcauggggaugggccucuacgugaaguacgacggagaucccugggcugacagugaugcccuugcuuucagcggcgucaugguguccaugaaggaaccggggugguauucuuuuggauucgagaucaaagacaagaaaugcgaugugccuuguauagguauugaaaugguccaugacggcgggaaggagacauggcacagcgccgcaacugccaucuacugccugaugggaucaggccaguugcuaugggauaccguuacagguguggacauggcucuguga

SEQ ID NO: 156845 - RNA, 1401 nt, Artificial Sequence; identical to SEQ ID NO: 156683
  derived and/or modified CDS sequence (opt3) from neuraminidase__InfluenzaB__ACQ45613

SEQ ID NO: 156846 - RNA, 1401 nt, Artificial Sequence; identical to SEQ ID NO: 156839
  derived and/or modified CDS sequence (opt3) from neuraminidase__InfluenzaB__ACR15626

SEQ ID NO: 156847 - RNA, 1401 nt, Artificial Sequence; identical to SEQ ID NO: 156839
  derived and/or modified CDS sequence (opt3) from neuraminidase__InfluenzaB__ACR15637

SEQ ID NO: 156848 - RNA, 1401 nt, Artificial Sequence; identical to SEQ ID NO: 156810
  derived and/or modified CDS sequence (opt3) from neuraminidase__InfluenzaB__ACR15648

SEQ ID NO: 156849 - RNA, 1401 nt, Artificial Sequence; identical to SEQ ID NO: 156839
  derived and/or modified CDS sequence (opt3) from neuraminidase__InfluenzaB__ACR15659

SEQ ID NO: 156850 - RNA, 1401 nt, Artificial Sequence; identical to SEQ ID NO: 156839
  derived and/or modified CDS sequence (opt3) from neuraminidase__InfluenzaB__ACR15670

SEQ ID NO: 156851 - RNA, 1401 nt, Artificial Sequence; identical to SEQ ID NO: 156664
  derived and/or modified CDS sequence (opt3) from neuraminidase__InfluenzaB__ACR15681

SEQ ID NO: 156852 - RNA, 1401 nt, Artificial Sequence
  derived and/or modified CDS sequence (opt3) from neuraminidase__InfluenzaB__ACR15692
augcugcccagcaccauccagacacucacucuuuuccugacguccggcgggguguuguuaucucuguacgucucagccagucuaagcuaucuccuguacuccgacauucuucugaaguuuucuccuaccgagauaacagcuccaacuaugccguugggaugcgcaaacgccucgaauguucaagcggugaacagaucagcuaccaaagguguaacacuccugcugcccgaaccugaguggaccuauccaaggcucagcugucccggcaguacuuuccagaaggccuuacugaucuccccucaccgguuuggggaaacaaaaggaaauucugcaccacuuauuauccgcgagcccuucauugccugcggcccuaaggaauguaaacauuuugcuuugacccacuacgcagcccagccagguggguauuacaacggaacgcgaggcgaucguaauaagcugagacaucuaaucagcgugaagcucggcaaaauaccgacugucgagaacuccaucuuccacauggcugccuggucagggagugcgugccaugacggaaaggaguggaccuauauugguguggauggccccgacaauaacgcacugcuuaaaaucaaguacggggaagccuacacagauacuuaucacagcuacgcuaauaacauucugaggacccaggagucugccuguaauugcaucggaggcaacuguuauuugaugauaacagacgguuccgcaucagggauuagcgaaugccgguuucucaaaauccgcgagggaagaauuaucaaggagaucuucccuaccggcaggguuaagcacacggaagaguguacuugcggcuuugcuaguaauaaaacaauugaaugugccugccgggauaacucuuacaccgcgaagcgcccauucgugaaacugaaugucgagacugacacagccgaaauacgauuaaugugcaccgagacguaucuggauacccccagaccugacgauggguccaucacaggaccaugugagagcaacggugacaagggcucugggggaauuaaaggcgguuuugugcaucaaaggauggcaucgaagaucgggcggugguacucccguacuaugucaaaaaccaagcgcaugggcaugggacucuauguaaaguacgauggcgaccccugggcugacaacgaugcccuugcucugagugggguuauggugagcauggaggaaccgggaugguacuccuucgguuuugaaauaaaagacaagaaaugcgaugucccuuguauuggcaucgagauggugcacgacgggggaaaggaaacauggcauucugccgcaacugccaucuauugcuugaugggcagcggucagcuacugugggauaccgugacaggggucgacauggcucucuga

SEQ ID NO: 156853 - RNA, 1401 nt, Artificial Sequence; identical to SEQ ID NO: 156840
  derived and/or modified CDS sequence (opt3) from neuraminidase__InfluenzaB__ACR15703

SEQ ID NO: 156854 - RNA, 1401 nt, Artificial Sequence; identical to SEQ ID NO: 156840
  derived and/or modified CDS sequence (opt3) from neuraminidase__InfluenzaB__ACR15714

SEQ ID NO: 156855 - RNA, 1401 nt, Artificial Sequence; identical to SEQ ID NO: 156755
  derived and/or modified CDS sequence (opt3) from neuraminidase__InfluenzaB__ACR15725

SEQ ID NO: 156856 - RNA, 1401 nt, Artificial Sequence; identical to SEQ ID NO: 156716
  derived and/or modified CDS sequence (opt3) from neuraminidase__InfluenzaB__ACR15736

SEQ ID NO: 156857 - RNA, 1401 nt, Artificial Sequence; identical to SEQ ID NO: 156839
  derived and/or modified CDS sequence (opt3) from neuraminidase__InfluenzaB__ACR39340

SEQ ID NO: 156858 - RNA, 1401 nt, Artificial Sequence
  derived and/or modified CDS sequence (opt3) from neuraminidase__InfluenzaB__ADL28399
augcugcccagcaccauccagacacucacucuuuuccugacguccggcgggguguuguuaucucuguacgucucagccagucuaagcuaucuccuguacuccgacauucuucugaaguuuucuccuaccgagauaacagcuccaacuaugccguuggauugcgcaaacgccucgaauguucaagcggugaacagaucagcuaccaaaggaguaacacuccugcugcccgaaccugaguggaccuauccaaggcucagcugucccgguaguacuuuccagaaggccuuacugaucuccccucaccgguuuggcgaaacaaaaggaaauucugcaccacuuauuauccgcgagcccuucauugccugcgggccuaacgaauguaagcauuuugcuuugacccacuacgcagcccagccaggcgguuauuacaaugggacgcgaggagaccguaacaaacugagacaucuaaucagcgugaagcucggcaagauaccgacugucgaaaauuccaucuuccacauggcugccuggucaggcagugcgugccaugaugggaaagaguggaccuauauuggaguggacggucccgauaacaaugcacugcuuaagaucaaauacggcgaggccuacacagacacuuaucacagcuacgcuaacaauauucugaggacccaggagucugccuguaacugcaucgggggaaauuguuauuugaugauaacagauggcuccgcaucagguguuagcgaaugccgguuucucaagauucgcgaggggagaaucauuaaagagaucuucccuaccggaagggugaagcacacggaagaguguacuugcggcuuugcuaguaacaagaucauugaaugugccugccgggacucuuccuacacagcgaaacgcccauucgucaagcugaauguggagaccgauacugccgaaauacgauuaaugugcacagagaccuaucuggacacgcccagaccuaacgauggcagcaucaccgggccaugugagucgaacggagacaaagguucuggcgggauuaagggaggcuuuguacaucaaaggauggcauccaaaaucggucggugguacucacguacaaugaguaagacugaacgcauggggaugggccucuauguuaaauacgauggagaccccugggcugacagcgaugcccuugcucuguccggcgugauggucucuauggaggaaccggggugguacagcuucggauuugagauaaaggacaagaaaugcgaugugccuuguauugguaucgaaauggugcacgacggcgggaaggagaccuggcauucagccgcaacagccaucuauugcuugaugggaaguggccagcuacugugggauacugucaccgguguugacauggcucucuga

SEQ ID NO: 156859 - RNA, 1401 nt, Artificial Sequence; identical to SEQ ID NO: 156836
  derived and/or modified CDS sequence (opt3) from neuraminidase__InfluenzaB__ADN32822

SEQ ID NO: 156860 - RNA, 1401 nt, Artificial Sequence
  derived and/or modified CDS sequence (opt3) from neuraminidase__InfluenzaB__ADR02756
augcugcccagcaccauccagacacucacucuuuuccugacguccggcgggguguuguuaucucuguacgucucagccagucuaagcuaucuccuguacuccgacauucuucugaaguuuucucaaaccgagauaacagcuccuaucauuccauuggauugcgcaaacgccucgaauguucaggcggugaacagaucagcugccaaaggaguaacucuccugcugccggaacccgaguggaccuauccuaggcucagcuguccagguaguacauuccagaaggcauuacugaucucuccccaccgguuuggcgaaaccaaaggaaauuccgccccucuuauuauccgcgagccauucauagcuugcgggcccacugaauguaagcauuuugcauugacacacuacgccgcucagccuggcgguuauuacaacgggacccgagaggaccguaauaaacugagacaucuaaucagcgugaagcucggaaagauuccaacggucgagaacuccaucuuccacauggccgcguggucaggcagugcaugccaugauggcaaagaauggacuuauauugggguggacggaccggauagcaaugcccugcuuaagaucaaauacggugaggcuuacaccgacacauaucacucuuacgccaagaacauacugaggacucaagaauccgcauguaauugcauuggcggggauuguuauuugaugaucaccgacggacccgcuucaggcauuagcgagugccgguuucucaaaauccgcgaggguagaaucauuaaggaaauauucccuacagggaggguuaagcacaccgaggaauguacgugcggauuugccaguaacaaaacuaucgagugugcgugccgggauaauucuuacacagccaagcgcccauucgugaaacugaacgucgaaaccgacacugcagagauucgauuaaugugcacagagaccuaucuggauacgcccagaccuaaugacggcuccaucaccggcccaugugaaagcgauggggacaagggaucggguggcauaaaagggggauuugugcaucagaggauggcuucuaagauuggccggugguacucccguacaaugucaaaaacuaagcgcauggguauggggcucuauguaaaguacgacggcgaucccuggaccgacagugaggcccuugcucugagcggaguuaugguguccauggaggaaccgggcugguacucuuucggguuugaaaucaaagauaagaaaugcgacgucccuuguaucggaauugagauggugcacgaugguggcaagacaacuuggcauagcgccgcaaccgccaucuauugcuugauggggucaggacagcuacugugggacacagugaccggcgucgauauggcucucuga

SEQ ID NO: 156861 - RNA, 1401 nt, Artificial Sequence
  derived and/or modified CDS sequence (opt3) from neuraminidase__InfluenzaB__AEA51353
augcugcccagcaccauccagacacucacucuuuuccugacguccggcgggguguuguuaucucuguacgucucagccagucuaagcuaucuccuguacuccgacauucuucugaaguuuucuagaaccgagauaacagcuccuaucaugccauuggauugcgcaaacgccucgaauguucaagcggugaacaggucagcuacuaaaggaguaacccuccugcugccggaacccgaguggacauauccucggcucagcuguccagguaguaccuuccagaaggccuuacugauuucuccccaccgcuuuggcgaaacuaaaggaaauuccgcaccucuuaucauucgagagccauucaucgccugcgggcccaaggaauguaaacauuuugcuuugacacacuacgcagcccagccuggcgguuauuacaacgggacccgugaggacagaaauaagcugaggcaucuaauaagcgugaagcucggaaaaaucccaacggucgagaacuccauuuuccacauggcugccuggucaggcagugcgugccaugauggccgggaauggacuuauaucgggguggacggaccggauagcaaugcacugcuuaagauuaaauacgguggcgccuuuaccgacacauaccacucuuaugcuaagaacauccugucaccccaggaguccgccuguaauugcauagggggagauuguuacuugaugauuacugacggcccugcaagcgguaucagugaaugccgcuuccucaaaauuagagaggggaggaucaucaaggagauuuuuccaaccggacggguuaagcacacagaagaguguaccugcggcuucgcuucuaacaaaacgauagaaugugccugccgcgauaauuccuauacugcgaagcgacccuuugugaaacugaacgucgagacagacaccgccgaaaucagauuaaugugcacugagacauaccuggauaccccuaggccaaaugacggcagcauuacggggcccugugagucgaacggagauaaggguucuggcgggaucaaaggaggcuucgugcaucaacggauggcauccaagauaggucguugguauucacgcaccaugaguaaaacaaagagaauggggaugggccucuacguaaaguaugacggagacccguggacugauagcgaagcucuugcccuguccggcguuauggugucuauggaggaaccugggugguacagcuuuggauucgagauuaaagacaagaaaugcgauguccccuguaucgguaucgaaauggugcacgacggcgggaagaccacauggcauucagcugccacugcaauuuacugcuugaugggaaguggccagcuacugugggauaccgugacaggugucaauaugacccucuga

SEQ ID NO: 156862 - RNA, 1401 nt, Artificial Sequence
  derived and/or modified CDS sequence (opt3) from neuraminidase__InfluenzaB__AEA51355
augcugcccagcaccauccagacacucacucuuuuccugacguccggcgggguguuguuaucucuguacgucucagccagucuaagcuaucuccuguacuccgacauucuucugaaguuuucuccuaccgagauaacagcuccaacuaugccguuggauugcgcaaacaccucgaauguucaagccgugaacagaucagcgacaaaaggaguaacccuccugcugcccgaaccugaguggacuuauccaaggcucagcugucccgguaguacauuccagaaggcuuuacugaucuccccucaccgguuuggcgaaaccaaaggaaauucugccccacuuauuauccgcgagcccuucauugcaugcgggccuaacgaauguaagcauuuugccuugacgcacuacgcugcacagccaggcgguuauuacaaugggacucgaggagaccguaacaaacugagacaucuaaucagcgugaagcucggcaagauaccgaccgucgaaaauuccaucuuccacauggccgcuuggucaggcagugccugccaugaugggaaagaguggacauauauuggaguggacggucccgauaacaaugcgcugcuuaagaucacuuacggcgaggcauacccugggaccuaucacagcuacgccauuaaaaacccaaggacacaggagucugcucccaauuguuuuggaggccacuccuucccuaucauaacccaugccccacccucagguguuugggaaccgcgguuucugaagauucgcgaggggagaaucauuaacgagaucuucccuacgggaagggugaaacccccagaagagugcacuuguggcuuugcaagcaauaacacaaucgaaugcgcuugucgggacaauaacugcaccgccaagcgcccuuucgucaaguuucacguggagagugaucccgcggaaauucgagccauguguacugacacauauuuggauucuccaagacccgacgauggcuccauaaccgggccuugcgacagcaacggagauaaagguucgggcgggaucaagggaggcuucguacaucaaaggauggagucuaaaauuggucggugguacucccguacgaugucaaagaccgagcgcauggggaugggccucuauguuaaauacgacggagacccaugggcagauagugacgcucuggccaauagcggcgugauggucuccaugaacgaaccggggucuagcucauucggauuugagaucaaggauaaaaagugcgacgugcccuguauagguauugaaauggugcacgauggcgggaaggagacauggcacagugcugccacugcaaucuauugcuuaaugggauccggccagcugcucugggacaccgucacagguguugauauggcccuuuga

SEQ ID NO: 156863 - RNA, 1401 nt, Artificial Sequence
  derived and/or modified CDS sequence (opt3) from neuraminidase__InfluenzaB__AEA51357
augcugcccagcaccauccagacacucacucuuuuccugacguccggcgggguguuguuaucucuguacgucucagccagucuaagcuaucuccuguacuccgacauucuucugaaguuuucuagaaccgagauaacagcuccuaucaugccauuggauugcgcaaacgccucgaauguucaagcggugaacaggucagcuacuaaaggaguaacccuccugcugccggaacccgaguggacauauccucggcucagcuguccagguaguaccuuccagaaggccuuacugauuucuccccaccgcuuuggcgaaacuaaaggaaauuccgcaccucuuaucauucgagagccauucaucgccugcgggcccaaggaauguaaacauuuugcuuugacacacuacgcagcccagccuggcgguuauuacaacgggacccgugaggacagaaauaagcugaggcaucuaauaagcgugaagcucggaaaaaucccaacggucgagaacuccauuuuccacauggcugccuggucaggcagugcgugccaugauggccgggaauggacuuauaucgggguggacggaccggauagcaaugcacugcuuaagauuaaauuuggugaggccuacaccgacacauaccacucuuaugcuaagaacauccugggcacucaggaauccgccuguaauugcauagggggagauuguaacuugaugauuaccgacggccccgcaucagguaucagcgagagucgcuuccucaaaauuggggagggaagaaucaucaaggaaauuuuuccuacaggcaggguuaagcacaccgaggaaugcacguguggcuucgcuucuaauaaaacuauagagugcgccugucgggauaacuccuacacagcgaagcgcccauuugugaaacugaaugucgaaaccgacacugccgagauccgauuaaugugcacagagaccuaucuggauacgcccagaccuaacgacgggagcauuaccggaccaugcgaaucgaauggugauaagggcucugggggaaucaaaggcgguuucgugcaucaaaggauggcauccaagauagggcggugguacucacguacaaugaguaaaacugagcgcaugggcaugggacucuauguaaaguacgacggcgaccccugggcugauagcgacgcccuugcuuuuuccgggguuauggugucuaugaaggaaccgggaugguauagcuucgguuucgagauuaaagauaagaaaugugacgucccuugcaucggcaucgaaauggugcacgaugggggaaaggagaccuggcauucagccgcaacagccauuuacugucugaugggcaguggucaguugcuaugggacacugugaccggggucaacauggcucuguga

SEQ ID NO: 156864 - RNA, 1401 nt, Artificial Sequence
  derived and/or modified CDS sequence (opt3) from neuraminidase__InfluenzaB__AEA51359
augcugcccagcaccauccagacacucacucuuuuccugacguccggcgggguguuguuaucucuguacgucucagccagucuaagcuaucuccuguacuccgacauucuucugaaguuuucuagaaccgagauaacagcuccuaucaugccauuggauugcgcaaacgccucgaauguucaagcggugaacaggucagcuacuaaaggaguaacccuccugcugccggaacccgaguggacauauccucggcucagcuguccagguaguaccuuccagaaggccuuacugauuucuccccaccgcuuuggcgaaacuaaaggaaauuccgcaccucuuaucauucgagagccauucaucgccugcgggcccaaggaauguaaacauuuugcuuugacacacuacgcagcccagccuggcgguuauuacaacgggacccgugaggacagaaauaagcugaggcaucuaauaagcgugaagcucggaaaaaucccaacggucgagaacuccauuuuccacauggcugccuggucaggcagugcgugccaugauggccgggaauggacuuauaucgggguggacggaccggauagcaaugcacugcuuaagauuaaauacggugaggccuacaccgacacauaucacucuuacgcuaagaacauccugcgcacucaggaauccgccuguaauugcauaggcggggauuguuauuugaugauuaccgacggacccgcaucaggcaucagcgagugcagauuucucaaaauuagggagggucggaucaucaaggaaauuuucccuacagggcgcguuaagcacaccgaggaauguacgugcggauuugcuaguaacaaaacuauagagugugccugccgagauaauucuuacacagcgaagagaccauucgugaaacugaacgucgaaaccgacacugccgagaucagguuaaugugcacagagaccuaucuggauacgccccggccuaaugacggcuccauuaccggcccaugugaaagcgauggggacaagggaucggguggcaucaaagggggauuugugcaucaacguauggcaucuaagauaggccgcugguacuccagaacaaugucaaaaacuaagaggauggguauggggcucuauguaaaguacgacggcgaucccuggaccgacagugaggcucuugcccugagcggaguuaugguguccauggaggaaccgggcugguacucuuucggguuugaaauuaaagauaagaaaugcgacgucccuuguaucggaaucgagauggugcacgaugguggcaagacaacuuggcauagcgcugccaccgcaauuuauugcuugauggggucaggacagcuacugugggacacagugaccggcgucgauauggcccucuga

SEQ ID NO: 156865 - RNA, 1401 nt, Artificial Sequence
  derived and/or modified CDS sequence (opt3) from neuraminidase__InfluenzaB__AEA51365
augcugcccagcaccauccagacacucacucuuuuccugacguccggcgggguguuguuaucucuguacgucucagccagucuaagcuaucuccuguacuccgacauucuucugaaguuuucuagaaccgagauaacagcuccuaucaugccauuggauugcgcaaacgccucgaauguucaagcggugaacaggucagcuacuaaaggaguaacccuccugcugccggaacccgaguggacauauccucggcucagcuguccagguaguaccuuccagaaggccuuacugauuucuccccaccgcuuuggcgaaacuaaaggaaauuccgcaccucuuaucauucgagagccauucaucgccugcgggcccaaggaauguaaacauuuugcuuugacacacuacgcagcccagccuggcgguuauuacaacgggacccgugaggacagaaauaagcugaggcaucuaauaagcgugaagcucggaaaaaucccaacggucgagaacuccauuuuccacauggcugccuggucaggcagugcgugccaugauggccgggaauggacuuauaucgggguggacggaccggauagcaaugcacugcuuaagauuaaauacggugaggccuacaccgacacauaucacucuuacgcuaagaacauccugcgcacucaggaauccgccuguaauugcauaggcggggauuguuauuugaugauuaccgacggacccgcaucaggcaucagcgagugcagauuucucaaaauuagggagggucggaucaucaaggaaauuuucccuacagggcgcguuaagcacaccgaggaauguacgugcggauuugcuaguaacaaaacuauagagugugccugccgagauaauucuuacacagcgaagagaccauucgugaaacugaacgucgaaaccgacacugccgagaucagguuaaugugcacagagaccuaucuggauacgccccggccuaaugacggcuccauuaccggcccaugugaaagcaacggggauaagggaucggguggcaucaaagggggauuugugcaucaacguauggcaucuaagauaggccgcugguacuccagaacaaugucaaaaacuaagaggauggguauggggcucuauguaaaguacgacggcgaccccuggaccgauagugaggcucuugcccugagcggaguuaugguguccauggaggaaccgggcugguacucuuucggguuugaaauuaaagacaagaaaugcgaugucccuuguaucggaaucgagauggugcacgacgguggcaagacaacuuggcauagcgcugccaccgcaauuuauugcuugauggggucaggacagcuacugugggauacagugaccggcgucaauaugacucucuga

SEQ ID NO: 156866 - RNA, 1401 nt, Artificial Sequence; identical to SEQ ID NO: 156865
  derived and/or modified CDS sequence (opt3) from neuraminidase__InfluenzaB__AEA51367

SEQ ID NO: 156867 - RNA, 1401 nt, Artificial Sequence; identical to SEQ ID NO: 156865
  derived and/or modified CDS sequence (opt3) from neuraminidase__InfluenzaB__AEA51371

SEQ ID NO: 156868 - RNA, 1401 nt, Artificial Sequence
  derived and/or modified CDS sequence (opt3) from neuraminidase__InfluenzaB__AEA51373
augcugcccagcaccauccagacacucacucuuuuccugacguccggcgggguguuguuaucucuguacgucucagccagucuaagcuaucuccuguacuccgacauucuucugaaguuuucuccuaccgagauaacagcuccaacuaugccguuggauugcgcaaacgccucgaauguucaagcggugaacagaucagcuaccaaaggaguaacacuccugcugcccgaaccugaguggaccuauccaaggcucagcugucccgguaguacuuuccagaaggccuuacugaucuccccucaccgguuuggcgaaacaaaaggaaauucugcaccacuuauuauccgcgagcccuucauugccugcgggccuaacgaauguaagcauuuugcuuugacccacuacgcagcccagccaggcgguuauuacaaugggacgcgaggagaccguaacaaacugagacaucuaaucagcgugaagcucggcaagauaccgacugucgaaaauuccaucuuccacauggcugccuggucaggcagugcgugccaugaugggaaagaguggaccuauauuggaguggacggucccgauaacaaugcacugcuuaagguuaaauacggcgaagccuacacagacacuuaucacagcuacgcuaacaagauccugaggacccaggagucugccuguaauugcauugggggaaacuguuauuugaugaucacagauggcuccgcaucaggugugagcgaaugccgguuucucaaaauacgcgaggggagaauuaucaaggagauuuucccuaccggaagggucaagcacacggaagaguguacuugcggcuuugcuaguaauaaaacaaucgaaugugccugccgggacaacucuuacaccgcgaagcgcccauucgugaaacugaauguagagacugauacagccgaaauccgauuaaugugcaccgacacguaucuggauacccccagaccugacgauggcuccauuacagggccaugugagagcaacggagacaaggguucgggcgggauaaaaggaggcuuuguucaucaaaggauggcaucuaagaucggucggugguacucccguacuaugucaaaaaccaagcgcauggggaugggccucuaugugaaguacgacggagaucccuggacagacagugaggcucuugcccugagcggcgucaugguguccauggaggagccggggugguacucuuucggauuugaaauuaaagauaagaaaugcgacgugccuuguaucgguauagagaugguccacgauggcgggaaggaaacuuggcauagcgcugccaccgcaauuuauugcuugaugggaucaggccagcuacugugggacacaguuaccggugugaacaugacucucuga

SEQ ID NO: 156869 - RNA, 1401 nt, Artificial Sequence
  derived and/or modified CDS sequence (opt3) from neuraminidase__InfluenzaB__AEA51377
augcugcccagcaccauccagacacucacucuuuuccugacguccggcgggguguuguuaucucuguacgucucagccagucuaagcuaucuccuguacuccgacauucuucugaaguuuucuccuaccgagauaacagcuccaacuaugccguuggauugcgcaaacgccucgaauguucaagcggugaacagaucagcuaccaaaggaguaacacuccugcugcccgaaccugaguggaccuauccaaggcucagcugucccgguaguacuuuccagaaggccuuacugaucuccccucaccgguuuggcgaaacaaaaggaaauucugcaccacuuauuauccgcgagcccuucauugccugcgggccuaacgaauguaagcauuuugcuuugacccacuacgcagcccagccaggcgguuauuacaaugggacgcgaggagaccguaacaaacugagacaucuaaucagcgugaagcucggcaagauaccgacugucgaaaauuccaucuuccacauggcugccuggucaggcagugcgugccaugaugggaaagaguggaccuauauuggaguggacggucccgauaacaaugcacugcuuaagguuaaauacggcgaggccuacacagacacuuaucacagcuacgcuaacaagauccugaggacccaggagucugccuguaauugcauugggggaaacuguuauuugaugaucacagauggcuccgcaucaggugugagcgaaugccgguuucucaaaauacgcgaggggagaauuaucaaggagauuuucccuaccggaagggucaagcacacggaagaguguacuugcggcuuugcuaguaauaaaacaaucgaaugugccugccgggacaacucuuacaccgcgaagcgcccauucgugaaacugaauguagagacugauacagccgaaauccgauuaaugugcaccgacacguaucuggauacccccagaccugacgauggcuccauuacagggccaugugagagcaacggagacaaggguucgggcgggauaaaaggaggcuuuguucaucaaaggauggagucuaagaucggucggugguacucccguacuaugucaaaaaccgaacgcauggggaugggccucuaugugaaguacgacggagaucccugggcagacagugaugcucuugccuucagcggcgucaugguguccaugaaggagccggggugguacucuuuuggauucgaaauuaaagacaagaaaugcgaugugccuuguaucgguauagagaugguccacgacggcgggaaggaaacauggcauagcgcugccacugcaauuuauugccugaugggaucaggccaguugcuaugggauaccguuacagguguggacauggcccuguga

SEQ ID NO: 156870 - RNA, 1401 nt, Artificial Sequence; identical to SEQ ID NO: 156869
  derived and/or modified CDS sequence (opt3) from neuraminidase__InfluenzaB__AEA51379

SEQ ID NO: 156871 - RNA, 1401 nt, Artificial Sequence
  derived and/or modified CDS sequence (opt3) from neuraminidase__InfluenzaB__AEA51381
augcugcccagcaccauccagacacucacucuuuuccugacguccggcgggguguuguuaucucuguacgucucagccagucuaagcuaucuccuguacuccgacauucuucugaaguuuucuccuaccgagauaacagcuccaacuaugccguuggauugcgcaaacgccucgaauguucaagcggugaacagaucagcuaccaaaggaguaacacuccugcugcccgaaccugaguggaccuauccaaggcucagcugucccgguaguacuuuccagaaggccuuacugaucuccccucaccgguuuggcgaaacaaaaggaaauucugcaccacuuauuauccgcgagcccuucauugccugcgggccuaacgaauguaagcauuuugcuuugacccacuacgcagcccagccaggcgguuauuacaaugggacgcgaggagaccguaacaaacugagacaucuaaucagcgugaagcucggcaagauaccgacugucgaaaauuccaucuuccacauggcugccuggucaggcagugcgugccaugaugggaaagaguggaccuauauuggaguggacggucccgauaacaaugcacugcuuaagguuaaauacggcgaggccuacacagacacuuaucacagcuacgcuaacaagauccugaggacccaggagucugccuguaauugcauugggggaaacuguuauuugaugaucacagauggcuccgcaucaggugugagcgaaugccgguuucucaaaauacgcgaggggagaauuaucaaggagauuuucccuaccggaagggucaagcacacggaagaguguacuugcggcuuugcuaguaauaaaacaaucgaaugugccugccgggacaacucuuacaccgcgaagcgcccauucgugaaacugaauguagagacugauacagccgaaauccgauuaaugugcaccgacacguaucuggauacccccagaccuaacgacggcuccauuacagggccaugugagagcgauggagacaaggguucgggcgggauaaaaggaggcuuuguucaucaaaggaugaagucuaaaaucggucggugguacucccguacuaugucaaagaccgagcgcauggggaugggccucuaugugaaguacgacggagaucccugggcagacagugaugcucuugccuucagcggcgucaugguguccgugaaagaaccggggugguacucuuuuggauucgagauuaaggacaaaaagugcgaugucccuuguaucgguauagaaaugguucacgacggcgggaaagagacauggcauagcgcugccacugcaauuuauugccugaugggaucaggccaguugcuaugggauaccgugacagguguagacauggcccuguga

SEQ ID NO: 156872 - RNA, 1401 nt, Artificial Sequence; identical to SEQ ID NO: 156869
  derived and/or modified CDS sequence (opt3) from neuraminidase__InfluenzaB__AEA51383

SEQ ID NO: 156873 - RNA, 1401 nt, Artificial Sequence
  derived and/or modified CDS sequence (opt3) from neuraminidase__InfluenzaB__AEG20998
augcugcccagcaccauccagacacucacucuuuuccugacguccggcgggguguuguuaucucuguacgucucagccagucuaagcuaucuccuguacuccgacauucuucugaaguuuucuagaaccgagauaacagcuccuaucuugaggcucgcaugcgccaacgcgucgaauguucaagcugugaaccggucagccacuaaaggaguaacccugcugcucccagaaccggaguggacauauccccgcuuaagcuguccugguaguaccuuccagaaggcacugcuuauuuccccacaccgauuuggcgaaacuaaaggaaauucugcccccuugaucauucgugagccuuucaucgcuugcgggccaaaggaauguaaacauuuugcacugacacacuacgccgcucagcccggcgguuauuacaacgggaccagagaggauaggaauaagcuacggcaucucauaagcgugaagcugggaaaaaucccuacggucgagaacuccauuuuccacauggccgcguggucaggcagugcaugccaugacggccgcgaauggacuuauaucgggguggauggaccagacagcaaugcccuucugaagauuaaauacgguggcgcuuuuaccgauacauaccacucuuaugccaagaacaucuuguccccgcaggagucagcauguaauugcauagggggagacuguuaccucaugauuacugauggccccgcuagcgguaucagugaaugcagauuccugaaaauuagggaggggcggaucaucaaggagauuuuuccuaccggacgcguuaagcacacagaagaguguaccugcggcuucgccucuaacaaaacgauagaaugugcgugccgagacaauuccuauacugccaagagaccauuugugaaauuaaacgucgagacagauaccgcagaaaucaggcugaugugcacugagacauaccucgacacgccccggccuaaugauggcagcauuaccgggccaugugagucgaacggagacaaggguucuggcgggaucaaaggaggcuucgugcaucaacguauggcuuccaagauaggucgcugguauucaagaaccaugaguaaaacaaagaggauggggaugggccuuuacguaaaguaugauggagaccccuggacugacagcgaagcccuggcuuuguccggcguuauggugucuauggaggaaccggggugguacagcuuuggauucgagauuaaagauaagaaaugcgacgucccuuguaucgguaucgaaauggugcacgauggcgggaagaccacauggcauucagccgcaacugccauuuacugccuaaugggaaguggccagcugcucugggacaccgugacaggugucaauaugacccuguga

SEQ ID NO: 156874 - RNA, 1401 nt, Artificial Sequence
  derived and/or modified CDS sequence (opt3) from neuraminidase__InfluenzaB__AEG20999
augcugcccagcaccauccagacacucacucuuuuccugacguccggcgggguguuguuaucucugucagucagugccagccuauccuaccuccuguauucugacauucuucugaaguuuucgagaaccgagauaacagcuccuaucaugccauuggauugcgcaaacgccucaaauguucaagcggugaacaggagcgcuacuaaaggaguaacccuccugcugccggaacccgaguggacauacccucggcucaguuguccagguuccaccuuccagaaggccuuacugauuucuccccaccgcuuuggcgaaacuaaagggaauagcgcaccucuuaucauucgagagccauucaucgccugcggacccaaggaauguaaacauuuugcuuugacacacuaugcagcccagccuggcgguuacuauaacgggacccgugaggacagaaauaagcugaggcaucuaauauccgugaagcucggaaaaaucccaacggucgagaacucaauuuuccacauggcugccuggaguggcagcgcgugccaugauggccgggaauggacuuacaucgggguggacggaccggauucuaaugcacugcuuaagauuaaauaugguggcgccuuuaccgacacauaccacuccuacgcuaagaacauccugucaccccaggagagcgccuguaauugcauagggggagauuguuauuugaugauuacugacggcccugcaagugguaucucugaaugccgcuuccucaaaauuagagaggggaggaucaucaaggagauuuuuccaaccggacggguuaagcacacagaagaguguaccugcggcuucgcuuccaacaaaacgauagaaugugccugccgcgauaauagcuacacugcgaagcgacccuuugugaaacugaacgucgagacagacaccgccgaaaucagauuaaugugcacugagacauaucuggauaccccuaggccaaaugacggcucgauuacggggcccugugagucuaacggagauaaggguuccggcgggaucaaaggaggcuucgugcaucaacggauggcaucaaagauaggucguugguacagucgcaccaugagcaaaacaaagagaauggggaugggccucuauguaaaguacgacggagacccguggacugauuccgaagcucuugcccugucuggcguuauggugagcauggaggaaccugggugguauucauuuggauucgagauuaaagacaagaaaugcgauguccccuguaucgguaucgaaauggugcacgacggcgggaagaccacauggcauagugcugccacugcaauuuacugcuugaugggauccggccagcuacugugggauaccgugacaggugucaauaugacccucuga

SEQ ID NO: 156875 - RNA, 1401 nt, Artificial Sequence
  derived and/or modified CDS sequence (opt3) from neuraminidase__InfluenzaB__AEG21000
augcugcccagcaccauccagacacucacucuuuuccugacguccggcgggguguuguuaucucuguacgucucagccagucuaagcuaucuccuguacuccgacauucuucugaaguuuucuagaaccgagauaacagcugcaaucuugauucucgauugcgccaacgcgucgaauguucaagcugugaacaggucagccacuaaaggaguaacccugcugcucccugaaccagaguggacauauccgcgguuaagcugucccgguaguaccuuccagaaggcacugcuuaucuccccucaccgcuuuggcgaaacuaaaggaaauucugccccauugauuauccgagagcccuucauagcuugcgggccuaaggaauguaaacauuuugcacugacacacuacgccgcucagccaggcgguuauuacaacgggacccgugaggacagaaauaagcuaaggcaucucaucagcgugaagcugggaaaaauucccacggucgagaacuccaucuuccacauggccgcguggucaggcagugcaugccaugauggccgggaauggacuuauauugggguggacggaccugauagcaaugcccuucugaagaucaaauacgguggcgcuuuuaccgacacauaccacucuuaugccaagaacauauuguccccacaggagucagcauguaauugcauugggggagauuguuaccucaugaucacugacggcccggcuagcgguauuagugaaugccgcuuccugaaaaucagagaggggaggaucauuaaggagauauuucccaccggacggguuaagcacacagaagaguguaccugcggcuucgccucuaacaaaacgaucgaaugugcgugccgcgauaauuccuauacugccaagcgaccuuuugugaaauuaaacgucgagacagacaccgcagaaauuagacugaugugcacugagacauaccucgauaccccaaggcccaaugacggcagcaucacggggccuugugagucgaacggagauaaggguucuggcgggauaaaaggaggcuucgugcaucaacggauggcuuccaagauuggucguugguauucacgcaccaugaguaaaacaaagagaauggggaugggccuuuacguaaaguaugacggagacccauggacugauagcgaagcccuggcuuuguccggcguuauggugucuauggaggaacccgggugguacagcuuuggauucgagaucaaagacaagaaaugcgaugucccguguaucgguauugaaauggugcacgacggcgggaagaccacauggcauucagccgcaacugccaucuacugccuaaugggaaguggccagcugcucugggauaccgugacaggugucaauaugacccuguga

SEQ ID NO: 156876 - RNA, 1401 nt, Artificial Sequence
  derived and/or modified CDS sequence (opt3) from neuraminidase__InfluenzaB__AEG21002
augcugcccagcaccauccagacacucacucuuuuccugacguccggcgggguguuguuaucucuguacgucucagccagucuaagcuaucuccuguacuccgacauucuucugaaguuuucuagaaccgagauaacagcuccuaucaugccauuggauugcgcaaacgccucgaauguucaagcggugaacaggucagcuacuaaaggaguaacccuccugcugccggaacccgaguggacauauccucggcucagcuguccagguaguaccuuccagaaggccuuacugauuucuccccaccgcuuuggcgaaacuaaaggaaauuccgcaccucuuaucauucgagagccauucaucgccugcgggcccaaggaauguaaacauuuugcuuugacacacuacgcagcccagccuggcgguuauuacaacgggacccgugaggacagaaauaagcugaggcaucuaauaagcgugaagcucggaaaaaucccaacggucgagaacuccauuuuccacauggcugccuggucaggcagugcgugccaugauggccgggaauggacuuauaucgggguggacggaccggauagcaaugcacugcuuaagauuaaauacggugaggccuacaccgacacauaucacucuuacgcuaagaacauccugcgcacucaggaauccgccuguaauugcauaggcggggauuguuauuugaugauuaccgacggacccgcaucaggcaucagcgagugcagauuucucaaaauuagggagggucggaucaucaaggaaauuuucccuacagggcgcguucgacacaccgaggaauguacgugcggauuugcuaguaacaagacuauagagugugccugcagagauaauucuuacacagcgaaaaggccauucgugaagcugaacgucgaaaccgacacugccgagauccgguuaaugugcacagagaccuaucuggauacgccccguccuaaugacggcuccauuaccggcccaugugaaagcaacggggauaaaggaucggguggcaucaaagggggauuugugcaucaacgcauggcaucuaagauaggcagaugguacuccaggacaaugucaaagacuaaacggauggguauggggcucuauguaaaguacgacggcgaccccuggaccgauagugaggcucuugcccugagcggaguuaugguguccauggaggaaccgggcugguacucuuucggguuugaaauuaaggacaaaaagugcgaugucccuuguaucggaaucgagauggugcacgacgguggcaaaacaacuuggcauagcgcugccaccgcaauuuauugcuugauggggucaggacagcuacugugggauacagugaccggcgucaauaugacucucuga

SEQ ID NO: 156877 - RNA, 1401 nt, Artificial Sequence
  derived and/or modified CDS sequence (opt3) from neuraminidase__InfluenzaB__AEG21003
augcugcccagcaccauccagacacucacucuuuuccugacguccggcgggguguuguuaucucuguacgucucagccagucuaagcuaucuccuguacuccgacauucuucugaaguuuucuagaaccgagauaacagcuccuaucaugccauuggauugcgcaaacgccucgaauguucaagcggugaacaggucagcuacuaaaggaguaacccuccugcugccggaacccgaguggacauauccucggcucagcuguccagguaguaccuuccagaaggccuuacugauuucuccccaccgcuuuggcgaaacuaaaggaaauuccgcaccucuuaucauucgagagccauucaucgccugcgggcccaaggaauguaaacauuuugcuuugacacacuacgcagcccagccuggcgguuauuacaacgggacccgugaggacagaaauaagcugaggcaucuaauaagcgugaagcucggaaaaaucccaacggucgagaacuccauuuuccacauggcugccuggucaggcagugcgugccaugauggccgggaauggacuuauaucgggguggacggaccggauagcaaugcacugcuuaagauuaaauacggugaggccuacaccgacacauaucacucuuacgcuaagaacauccugcgcacucaggaauccgccuguaauugcauaggcggggauuguuauuugaugauuaccgacggacccgcaucaggcaucagcgagugcagauuucucaaaauuagggagggucggaucaucaaggaaauuuucccuacagggcgcguuaagcacaccgaggaauguacgugcggauuugcuaguaacaaaacuauagagugugccugccgagauaauucuuacacagcgaagagaccauucgugaaacugaacgucgaaaccgacacugccgagaucagguuaaugugcacagagaccuaucuggauacgccccggccuaaugacggcuccauuaccggcccaugugaaagcgauggggacaagggaucggguggcaucaaagggggauuugugcaucaacguauggcaucuaagauaggccgcugguacuccagaacaaugucaaaaacuaagaggauggguauggggcucuauguaaaguacgacggcgaucccuggaccgacagugaggcucuugcccugagcggaguuaugguguccauggaggaaccgggcugguacucuuucggguuugaaauuaaagauaagaaaugcgacgucccuuguaucggaaucgagauggugcacgaugguggcaagacaacuuggcauagcgcugccaccgcaauuuauugcuugauggggucaggacagcuacugugggacacagugaccggcgucaacaugacucucuga

SEQ ID NO: 156878 - RNA, 1401 nt, Artificial Sequence
  derived and/or modified CDS sequence (opt3) from neuraminidase__InfluenzaB__AEG21004
augcugcccagcaccauccagacacucacucuuuuccugacguccggcgggguguuguuaucucuguacgucucagccagucuaagcuaucuccuguacuccgacauucuucugaaguuuucuccuaccgagauaacagcuccaacuaugccguuggauugcgcaaacgccucgaauguucaagcggugaacagaucagcuaccaaaggaguaacacuccugcugcccgaaccugaguggaccuauccaaggcucagcugucccgguaguacuuuccagaaggccuuacugaucuccccucaccgguuuggcgaaacaaaaggaaauucugcaccacuuauuauccgcgagcccuucauugccugcgggccuaacgaauguaagcauuuugcuuugacccacuacgcagcccagccaggcgguuauuacaaugggacgcgaggagaccguaacaaacugagacaucuaaucagcgugaagcucggcaagauaccgacugucgaaaauuccaucuuccacauggcugccuggucaggcagugcgugccaugaugggaaagaguggaccuauauuggaguggacggucccgauaacaaugcacugcuuaagguuaaauacggcgaggccuacacagacacuuaucacagcuacgcuaacaagauccugaggacccaggagucugccuguaauugcauugggggaaacuguuauuugaugaucacagauggcuccgcaucaggugugagcgaaugccgguuucucaaaauacgcgaggggagaauuaucaaggagauuuucccuaccggaagggucaagcacacggaagaguguacuugcggcuuugcuaguaauaaaacaaucgaaugugccugccgggacaacucuuacaccgcgaagcgcccauucgugaaacugaauguagagacugauacagccgaaauccgauuaaugugcaccgacacguaucuggauacccccagaccugacgauggcuccauuacagggccaugugagagcaacggagacaaggguggcgggggaauaaaaggcgguuuuguucaucaaaggauggagucgaagaucgggcggugguacucucguacuauguccaaaaccgaacgcaugggcaugggacucuaugugaaguacgacggcgaucccugggcagacucagaugcucuugccuucaguggggucauggugagcaugaaggagccgggaugguacuccuuugguuucgaaauuaaagacaagaaaugcgaugugccuuguaucggcauagagaugguccacgacgggggaaaggaaacauggcauucugcugccacugcaauuuauugccugaugggcagcggucaguugcuaugggauaccguuacagggguggacauggcccuguga

SEQ ID NO: 156879 - RNA, 1401 nt, Artificial Sequence
  derived and/or modified CDS sequence (opt3) from neuraminidase__InfluenzaB__AEG21005
augcugcccagcaccauccagacacucacucuuuuccugacguccggcgggguguuguuaucucuguacgucucagccagucuaagcuaucuccuguacuccgacauucuucugaaguuuucuccuaccgagauaacagcuccaacuaugccguuggauugcgcaaacgccucgaauguucaagcggugaacagaucagcuaccaaaggaguaacacuccugcugcccgaaccugaguggaccuauccaaggcucagcugucccgguaguacuuuccagaaggccuuacugaucuccccucaccgguuuggcgaaacaaaaggaaauucugcaccacuuauuauccgcgagcccuucauugccugcgggccuaacgaauguaagcauuuugcuuugacccacuacgcagcccagccaggcgguuauuacaaugggacgcgaggagaccguaacaaacugagacaucuaaucagcgugaagcucggcaagauaccgacugucgaaaauuccaucuuccacauggcugccuggucaggcagugcgugccaugaugggaaagaguggaccuauauuggaguggacggucccgauaacaaugcacugcuuaagguuaaauacggcgaggccuacacagacacuuaucacagcuacgcuaacaagauccugaggacccaggagucugccuguaauugcauugggggaaacuguuauuugaugaucacagauggcuccgcaucaggugugagcgaaugccgguuucucaaaauacgcgaggggagaauuaucaaggagauuuucccuaccggaagggucaagcacacggaagaguguacuugcggcuuugcuaguaauaaaacaaucgaaugugccugccgggacaacucuuacaccgcgaagcgcccauucgugaaacugaauguagagacugauacagccgaaauccgauuaaugugcaccgacacguaucuggauacccccagaccugacgauggcuccauuacagggccaugugagagcaacggagacaaggguggcgggggaauaaaaggcgguuuuguucaucaaaggauggagucgaagaucgggcggugguacucucguacuauguccaaaaccgaacgcaugggcaugggacucuaugugaaguacgacggcgaucccugggcagacucagaugcucuugccuucaguggggucauggugagcaugaaggagccgggaugguacuccuuugguuucgaaauuaaagacaagaaaugcgaugugccuuguaucggcauagagaugguccacgacgggggaaaggaaacauggcauucugcugccacugcaauuuauugccugaugggcagcggucaguugcuaugggauaccguuacaggggugaacaugacccuguga

SEQ ID NO: 156880 - RNA, 1401 nt, Artificial Sequence; identical to SEQ ID NO: 156865
  derived and/or modified CDS sequence (opt3) from neuraminidase__InfluenzaB__AEG21006

SEQ ID NO: 156881 - RNA, 1401 nt, Artificial Sequence; identical to SEQ ID NO: 156869
  derived and/or modified CDS sequence (opt3) from neuraminidase__InfluenzaB__AEG21007

SEQ ID NO: 156882 - RNA, 1401 nt, Artificial Sequence
  derived and/or modified CDS sequence (opt3) from neuraminidase__InfluenzaB__AEG21008
augcugcccagcaccauccagacacucacucuuuuccugacguccggcgggguguuguuaucucuguacgucucagccagucuaagcuaucuccuguacuccgacauucuucugaaguuuucuccuaccgagauaacagcuccaacuaugccguuggauugcgcaaacgccucgaauguucaagcggugaacagaucagcuaccaaaggaguaacacuccugcugcccgaaccugaguggaccuauccaaggcucagcugucccgguaguacuuuccagaaggccuuacugaucuccccucaccgguuuggcgaaacaaaaggaaauucugcaccacuuauuauccgcgagcccuucauugccugcgggccuaacgaauguaagcauuuugcuuugacccacuacgcagcccagccaggcgguuauuacaaugggacgcgaggagaccguaacaaacugagacaucuaaucagcgugaagcucggcaagauaccgacugucgaaaauuccaucuuccacauggcugccuggucaggcagugcgugccaugaugggaaagaguggaccuauauuggaguggacggucccgauaacaaugcacugcuuaagguuaaauacggcgaggccuacacagacacuuaucacagcuacgcuaacaagauccugaggacccaggagucugccuguaauugcauugggggaaacuguuauuugaugaucacagauggcuccgcaucaggugugagcgaaugccgguuucucaaaauacgcgaggggagaauuaucaaggagauuuucccuaccggaagggucaagcacacggaagaguguacuugcggcuuugcuaguaauaaaacaaucgaaugugccugccgggacaacucuuacaccgcgaagcgcccauucgugaaacugaauguagagacugauacagccgaaauccgauuaaugugcaccgacacguaucuggauacccccagaccugacgauggcuccauuacagggccaugugagagcaacggagacaaggguucgggcgggauaaaaggaggcuuuguucaucaaaggauggcaucuaagaucggucggugguacucccguacuaugucaaaaaccaagcgcauggggaugggccucuaugugaaguacgacggagaucccugggcugacagugaugcccuugcuuucagcggcgucaugguguccaugaaagagccggggugguacucuuuuggauucgaaauuaaggacaaaaagugcgaugugccuuguaucgguauagagaugguccacgacggcgggaaagaaacauggcauagcgccgcaacugccauuuauugccugaugggaucaggccaguugcuaugggauaccguuacagguguggacauggcucuguga

SEQ ID NO: 156883 - RNA, 1401 nt, Artificial Sequence; identical to SEQ ID NO: 156869
  derived and/or modified CDS sequence (opt3) from neuraminidase__InfluenzaB__AEG21009

SEQ ID NO: 156884 - RNA, 1401 nt, Artificial Sequence; identical to SEQ ID NO: 156869
  derived and/or modified CDS sequence (opt3) from neuraminidase__InfluenzaB__AEG21010

SEQ ID NO: 156885 - RNA, 1401 nt, Artificial Sequence; identical to SEQ ID NO: 156869
  derived and/or modified CDS sequence (opt3) from neuraminidase__InfluenzaB__AEG21011

SEQ ID NO: 156886 - RNA, 1401 nt, Artificial Sequence; identical to SEQ ID NO: 156869
  derived and/or modified CDS sequence (opt3) from neuraminidase__InfluenzaB__AEG21012

SEQ ID NO: 156887 - RNA, 1401 nt, Artificial Sequence
  derived and/or modified CDS sequence (opt3) from neuraminidase__InfluenzaB__AEG21013
augcugcccagcaccauccagacacucacucuuuuccugacguccggcgggguguuguuaucucuguacgucucagccagucuaagcuaucuccuguacuccgacauucuucugaaguuuucuccuaccgagauaacagcuccaacuaugccguuggauugcgcaaacgccucgaauguucaagcggugaacagaucagcuaccaaaggaguaacacuccugcugcccgaaccugaguggaccuauccaaggcucagcugucccgguaguacuuuccagaaggccuuacugaucuccccucaccgguuuggcgaaacaaaaggaaauucugcaccacuuauuauccgcgagcccuucauugccugcgggccuaacgaauguaagcauuuugcuuugacccacuacgcagcccagccaggcgguuauuacaaugggacgcgaggagaccguaacaaacugagacaucuaaucagcgugaagcucggcaagauaccgacugucgaaaauuccaucuuccacauggcugccuggucaggcagugcgugccaugaugggaaagaguggaccuauauuggaguggacggucccgauaacaaugcacugcuuaagguuaaauacggcgaggccuacacagacacuuaucacagcuacgcuaacaagauccugaggacccaggagucugccuguaauugcauugggggaaacuguuauuugaugaucacagauggcuccgcaucaggugugagcgaaugccgguuucucaaaauacgcgaggggagaauuaucaaggagauuuucccuaccggaagggucaagcacacggaagaguguacuugcggcuuugcuaguaauaaaacaaucgaaugugccugccgggacaacucuuacaccgcgaagcgcccauucgugaaacugaauguagagacugauacagccgaaauccgauuaaugugcaccgacacguaucuggauacccccagaccuaacgacggcuccauuacagggccaugugagagcgauggagacaaggguucgggcgggauaaaaggaggcuuuguucaucaaaggaugaagucuaaaaucggucggugguacucccguacuaugucaaagaccgagcgcauggggaugggccucuaugugaaguacgacggagaucccugggcagacagugaugcucuugccuucagcggcgucaugguguccaugaaagaaccggggugguacucuuuuggauucgagauuaaggacaaaaagugcgaugugccuuguaucgguauagaaaugguccacgacggcgggaaagagacauggcauagcgcugccacugcaauuuauugccugaugggaucaggccaguugcuaugggauaccguuacagguguggacauggcccuguga

SEQ ID NO: 156888 - RNA, 1401 nt, Artificial Sequence
  derived and/or modified CDS sequence (opt3) from neuraminidase__InfluenzaB__AEN68957
augcugcccagcaccauccagacacucacucuuuuccugacguccggcgggguguuguuaucucuguacgucucagccagucuaagcuaucuccuguacuccgacauucuucugaaguuuucuagaaccgagauaccugcuccaaucaugccguuggauugcgcaaacgccucgaauguucaagcggugaacaggucagcuacaaaaggaguaacucuccugcugcccgaaccugaguggaccuauccacggcucagcugucccgguaguacauuccagaaggccuuacugauuuccccucaccgcuuuggcgaaaccaaaggaaauucugcaccacuuaucauucgagagcccuucaucgccugcgggccuaaggaauguaaacauuuugcuuugacucacuacgcagcccagccaggcgguuauuacaacgggacacgugaggacagaaauaagaugaggcaucugauaagcgugaagcuaggaaaaaucccgaccgucgagaacuccauuuuccacauggcugccuggucaggcagugcgugccaugauggccgggaauggacguauaucgggguggacggacccgauagcaaugcacuccugaagauuaaauacggugaggccuacacugacaccuaucacucuuacgcuaagaacauccuucgcacacaggaauccgccuguaauugcauaggcggggauuguuaucugaugauuacugacggaccugcaucaggcaucagcgagugcagauuuuugaaaauuagggagggucggaucaucaaggaaauuuucccaaccgggcgcguuaaguacacagaggaauguaccugcggauuugcuaguaacaaaacgauaggcugugccugccgagauaauucuuauacugcgaagagacccuucgugaaacucaacgucgagacagacaccgccgaaaucaggcugaugugcacugagacauacuuagauaccccucggccaaaugacggcuccauuacggggcccugugagagcaacggagauaaggguucgggcgggaucaaaggaggcuuugugcaccaacguauggcaucuaagauaggucgcugguauuccagaaccaugucaaaaacaaagaggauggggaugggccuguacguaaaguacgacggagacccguggacugauagugaagcucucgcccuuagcggcguuaugguguccauggaggaaccugggugguauucuuucggauuugagauuaaagacaagaaaugcgauguccccuguaucgguaucgaaauggugcaugacggcgggaagaccacauggcacagcgcugccacugcaauuuacugccugaugggaucaggccaguugaugugggauaccgugacaggugucaauaugacccuauga

SEQ ID NO: 156889 - RNA, 1401 nt, Artificial Sequence
  derived and/or modified CDS sequence (opt3) from neuraminidase__InfluenzaB__AEO80071
augcugcccagcaccauccagacacucacucuuuuccugacguccggcgggguguuguuaucucuguacgucucagccagucuaagcuaucuccuguacuccgacauucuucugaaguuuucuccuaccgagauaacagcuccaacuaugccguuggauugcgcaaacgccucgaauguucacgcggugaacagaucagcuaccaaaggaguaacacuccugcugcccgaaccugaguggaccuauccaaggcucagcugucccgguaguacuuuccaaaaggccuuacugaucuccccucaucgguuuggcgaaacaaaaggaaauucugcaccacuuauuauccgcgagcccuucauugccugcgggccuaacgaauguaagcacuuugcuuugacccauuacgcagcccagccaggcgguuauuacaaugggacgcgaggagaccguaacaaacugagacaccuaaucagcgugaagcucggcaagauaccgacugucgaaaauuccaucuuccauauggcugccuggucaggcagugcgugccacgaugggaaagaguggaccuauauuggaguggacggucccgauaacaaugcacugcuuaagaucaaauacggcgaggccuacacagacacuuaucacagcuacgcuaacaauauucugaggacccaggagucugccuguaacugcaucgggggaaauuguuauuugaugauaacagauggcuccgcaucagguguuagcgaaugccgguuucucaagauucgcgaggggagaaucauuaaagagaucuucccuaccggaagggugaagcauacggaagaguguacuugcggcuuugcuaguaacaagacaaucgaaugugccugccgggacaauucuuacaccgcgaaacgcccauucgucaagcugaacguggagacugauacagccgaaauucgauuaaugugcaccgacacguaucuggauacccccagaccugacgauggcuccauaacagggccaugugagagcaacggagacaaagguucgggcgggaucaagggaggcuuuguacaccagaggauggcaucuaaaauuggucggugguacucccguacuaugucaaagaccgagcgcauggggaugggccucuauguuaaauacgacggagaucccugggcugacagugaugcccuugcuuucagcggcgugauggucuccaugaaggaaccggggugguacucuuuuggauucgagaucaaggacaaaaagugcgaugugccuuguauagguauugaaauggugcaugacggcgggaaagagacauggcacagcgccgcaacugccaucuauugccugaugggaucaggccaauugcuaugggauaccgucacagguguugacauggcucuguga

SEQ ID NO: 156890 - RNA, 1401 nt, Artificial Sequence
  derived and/or modified CDS sequence (opt3) from neuraminidase__InfluenzaB__AEO80082
augcugcccagcaccauccagacacucacucuuuuccugacguccggcgggguguuguuaucucuguacgucucagccagucuaagcuaucuccuguacuccgacauucuucugaaguuuucucaaaccggaauaacagcuccuaucaugccauuggauugcgcaaacgccucgaauguucaggcggugaacagaucagcuacuaaagguguaacccuccugcugccggagcccgaauggacauauccuaggcucagcuguccaggcaguaccuuccagaaggccuuacugauuucuccccaccgguuuggggagacuaaaggaaauuccgcaccucuuaucauucgcgaaccauucaucgccugcggccccacagaguguaaguacuuugcuuugacccauuaugcagcccagccugguggguacuauaacggaacgcgagaagaccguaauaaacugagacaccuaauaagcgugaagcucggcaagaucccaacugucgagaacuccauuuuccauauggcugccuggucaggcagugcgugccacgaugggaaagaguggaccuacaucggaguggacgguccggauagcaaugcacugcuuaagauuaaauacggcgaagccuauacagacacuuaccauucuuaugcuaagaacauccugaggacccaagaguccgccuguaauugcauagggggagauuguuacuugaugauuacagacggccccgcaucagguaucagcgaaugccgguuucucaaaauucgcgaggggagaaucaucaaggagauuuucccuaccggaaggguuaagcacacggaagaguguacuugcggcuuugcuaguaacaaaacaauagaaugugccugccgggauaauucuuauaccgcgaagcgcccauucgugaaacugaacgucgagacugacacagccgaaauccgauuaaugugcaccgagacguaccuggauacccccagaccuaaugacggcuccauuacagggccaugugagagcgauggagacaaggguucgggcgggaucaaaggaggcuuugugcaccagaggauggcaucuaagauaggucggugguauucccguacuaugucaaaaaccaagcgcauggggaugggccucuacguaaaguacgacggagaucccuggacagacagugaagcucuugcccugagcggcguuaugguguccauggaggaaccggggugguauucuuucggauuugagauuaaagauaagaaaugcgacgucccuuguaucgguaucgaaauggugcaugauggcgggaagacuaccuggcacagcgcugccacagcaauuuacugcuugaugggaucaggccagcuacugugggacaccgugacuggugucgauauggcccucuga

SEQ ID NO: 156891 - RNA, 1401 nt, Artificial Sequence; identical to SEQ ID NO: 156730
  derived and/or modified CDS sequence (opt3) from neuraminidase__InfluenzaB__AEO80090

SEQ ID NO: 156892 - RNA, 1401 nt, Artificial Sequence; identical to SEQ ID NO: 156675
  derived and/or modified CDS sequence (opt3) from neuraminidase__InfluenzaB__AEO80101

SEQ ID NO: 156893 - RNA, 1401 nt, Artificial Sequence; identical to SEQ ID NO: 156771
  derived and/or modified CDS sequence (opt3) from neuraminidase__InfluenzaB__AEO80149

SEQ ID NO: 156894 - RNA, 1401 nt, Artificial Sequence; identical to SEQ ID NO: 156683
  derived and/or modified CDS sequence (opt3) from neuraminidase__InfluenzaB__AEO80158

SEQ ID NO: 156895 - RNA, 1401 nt, Artificial Sequence; identical to SEQ ID NO: 156683
  derived and/or modified CDS sequence (opt3) from neuraminidase__InfluenzaB__AEO80167

SEQ ID NO: 156896 - RNA, 1401 nt, Artificial Sequence; identical to SEQ ID NO: 156771
  derived and/or modified CDS sequence (opt3) from neuraminidase__InfluenzaB__AEO80176

SEQ ID NO: 156897 - RNA, 1401 nt, Artificial Sequence
  derived and/or modified CDS sequence (opt3) from neuraminidase__InfluenzaB__AEO80187
augcugcccagcaccauccagacacucacucuuuuccugacguccggcgggguguuguuaucucuguacgucucagccagucuaagcuaucuccuguacuccgacauucuucugaaguuuucuccuaccgagauaacagcuccaacuaugccguugggaugcgcaaacgccucgaauguucaagcggugaacagaucagcuaccaaagguguaacacuccugcugcccgaaccugaguggaccuauccaaggcucagcugucccggcaguacuuuccagaaggccuuacugaucuccccucaccgguuuggggaaacaaaaggaaauucugcaccacuuauuauccgcgagcccuucauugccugcggcccuaacgaauguaagcauuuugcuuugacccacuacgcagcccagccagguggguauuacaauggaacgcgaggcgaucguaacaaacugagacaucuaaucagcgugaagcucggcaagauaccgacugucgaaaauuccaucuuccacauggcugccuggucagggagugcgugccaugacggaaaagaguggaccuauauugguguggauggccccgacaacaaugcacugcuuaagaucaaauacggggaggccuacacagauacuuaucacagcuacgcuaacaagauucugaggacccaggagucugccuguaauugcaucggaggcaacuguuauuugaugauaacagacgguuccgcaucagggguuagcgaaugccgguuucucaaaauucgcgagggaagaaucauuaaggagaucuucccuaccggcagggugaagcacacggaagaguguacuugcggcuuugcuaguaauaaaacaaucgaaugugccugccgggauaacucuuacaccgcgaagcgcccauucgucaaacugaauguggagacugacacagccgaaauucgauuaaugugcaccgauacguaucuggacacccccagaccugaugacggguccauaacaggaccaugugagagcaacggugauaggggcucugggggaaucaagggcgguuuuguacaucaacggauggcaucgaaaauugggcguugguacucccgcacuaugucaaagaccgagagaaugggcaugggacucuauguuaaauacgacggcgaccccugggcugauagugacgcccuugcuuucagcggggugauggucuccaugaaggaaccgggaugguacucuuuugguuucgagaucaaggauaaaaagugcgacgugccuuguauaggcauugaaauggugcacgaugggggaaaagagacauggcauagcgccgcaacugccaucuauugccugaugggcucaggucaguugcuaugggacaccgucacagggguugauauggcucuguga

SEQ ID NO: 156898 - RNA, 1401 nt, Artificial Sequence
  derived and/or modified CDS sequence (opt3) from neuraminidase__InfluenzaB__AEO80198
augcugcccagcaccauccagacacucacucuuuuccugacguccggcgggguguuguuaucucuguacgucucagccagucuaagcuaucuccuguacuccgacauucuucugaaguuuucuccuaccgagauaacagcuccaacuaugccguuggauugcgcaaacgccucgaauguucaagcggugaacagaucagcuaccaaaggaguaacacuccugcugcccgaaccugaguggaccuauccaaggcucagcugucccgguaguacuuuccagaaggccuuacugaucuccccucaccgguuuggcgaaacaaaaggaaauucugcaccacuuauuauccgcgagcccuucauugccugcgggccuaacgaauguaagcauuuugcuuugacccacuacgcagcccagccaggcgguuauuacaaugggacgcgaggagaccguaacaaacugagacaucuaaucagcgugaagcucggcaagauaccgacugucgaaaauuccaucuuccacauggcugccuggucaggcagugcgugccaugaugggaaagaguggaccuauauuggaguggacggucccgauaacaaugcacugcuuaagaucaaauacggcgaggccuacacagacacuuaucacagcuacgcuaacaagauucugaggacccaggagucugccuguaauugcaucgggggaaacuguuauuugaugauaacagauggcuccgcaucagguguuagcgaaugccgguuucucaaaauucgcgaggggagaaucauuaaggagaucuucccuaccggaagggugaagcacacggaagaguguacuugcggcuuugcuaguaauaaaacaaucgaaugugccugccgggacaacucuuacaccgcgaagcgcccauucgucaaacugaauguggagacugauacagccgaaauucgauuaaugugcaccgacacguaucuggauacccccagaccugacgauggcuccauaacagggccaugugagagcaacggagacagggguucgggcgggaucaagggaggcuuuguacaucaacggauggcaucuaaaauuggucguugguacucccgcacuaugucaaagaccgagagaauggggaugggccucuauguuaaauacgacggagaucccugggcugacagugaugcccuugcuuucaggggcgugauggucagcaugaaggaaccggggugguacuccuuuggauucgagaucaaggacaaaaagugcgaugugccuuguauagguauugaaauggugcacgacggcgggaaagagacauggcauucugccgcaacugccaucuauugccugaugggaagcggccaguugcuaugggauaccgucacagguguugacauggcucuguga

SEQ ID NO: 156899 - RNA, 1401 nt, Artificial Sequence; identical to SEQ ID NO: 156839
  derived and/or modified CDS sequence (opt3) from neuraminidase__InfluenzaB__AEO80209

SEQ ID NO: 156900 - RNA, 1401 nt, Artificial Sequence
  derived and/or modified CDS sequence (opt3) from neuraminidase__InfluenzaB__AEO80220
augcugcccagcaccauccagacacucacucuuuuccugacguccggcgggguguuguuaucucuguacgucucagccagucuaagcuaucuccuguacuccgacauucuucugaaguuuucuccuaccgagauaacagcuccaacuaugccguuggauugcgcaaacgccucgaauguucaagcggugaacagaucagcuaccaaaggacucacacugcugcuccccgaaccugaguggaccuauccaagguuaagcugucccgguaguacuuuccagaaggcccugcuuaucuccccucaccgguuuggcgaaacaaaaggaaauucugcaccauugauuauccgcgagcccuucauugccugcgggccuaacgaauguaagcauuuugcucugacccacuacgcagcccagccaggcgguuauuacaaugggacgcgaggagaccguaacaaacuaagacaucucaucagcguaaagcugggcaagauaccgacuguggagaccuccaucuuccacauggcugccuggucaggcagugcgugccaugaugggaaagaguggacauauauuggagucgacggucccgauaauaacgcacuucugaagaucaaauacggcgaagccuacacugacaccuaucacagcuacgcuaauaagauuuugaggacacaggagucugccuguaacugcaucgggggaaauuguuaucucaugauaaccgauggcuccgcaucaggugugagcgaaugccgguuucugaaaauucgcgaggggagaaucauuaaggagaucuucccuacgggaaggguuaagcacacugaagaguguacaugcggcuuugcuaguaacaaaaccaucgaaugugccugccgggacaauucuuacacugcgaagcgcccauucgugaaauuaaacgucgagacagauaccgccgaaauucgacugaugugcacggacaccuaucucgauacacccagaccugacgauggcuccauaacugggccaugugagagcaauggagacagggguucgggcgggaucaagggaggcuuugugcaucaacggauggcaucuaaaauuggucguugguacucccgcaccaugucaaagacagagagaauggggaugggccuuuauguaaaauacgacggagaucccugggcugacagugaugcccuggcuuucagcggcguuaugguguccaugaaggaaccggggugguacucuuuuggauucgagaucaaggacaaaaagugcgaugucccuuguauagguauugaaauggugcacgacggcgggaaagagacuuggcauagcgccgcaaccgccaucuauugcuugaugggaucaggccagcuacugugggauacagugaccggugucgacauggcucucuga

SEQ ID NO: 156901 - RNA, 1401 nt, Artificial Sequence; identical to SEQ ID NO: 156836
  derived and/or modified CDS sequence (opt3) from neuraminidase__InfluenzaB__AEO80231

SEQ ID NO: 156902 - RNA, 1401 nt, Artificial Sequence; identical to SEQ ID NO: 156839
  derived and/or modified CDS sequence (opt3) from neuraminidase__InfluenzaB__AEO80242

SEQ ID NO: 156903 - RNA, 1401 nt, Artificial Sequence; identical to SEQ ID NO: 156683
  derived and/or modified CDS sequence (opt3) from neuraminidase__InfluenzaB__AEP20182

SEQ ID NO: 156904 - RNA, 1401 nt, Artificial Sequence
  derived and/or modified CDS sequence (opt3) from neuraminidase__InfluenzaB__AEP20193
augcugcccagcaccauccagacacucacucuuuuccugacguccggcgggguguuguuaucucuguacgucucagccagucuaagcuaucuccuguacuccgacauucuucugaaguuuucuccuaccgagauaacagcuccaacuaugccguuggauugcgcaaacgccucgaauguucacgcggugaacagaucagcuaccaaaggaguaacacuccugcugcccgaaccugaguggaccuauccaaggcucagcugucccgguaguacuuuccaaaaggccuuacugaucuccccucaucgguuuggcgaaacaaaaggaaauucugcaccacuuauuauccgcgagcccuucauugccugcgggccuaacgaauguaagcacuuugcuuugacccauuacgcagcccagccaggcgguuauuacaaugggacgcgaggagaccguaacaaacugagacaccuaaucagcgugaagcucggcaagauaccgacugucgaaaauuccaucuuccauauggcugccuggucaggcagugcgugccacgaugggaaagaguggaccuauauuggaguggacggucccgauaacaaugcacugcuuaagaucaaauacggcgaggccuacacagacacuuaucacagcuacgcuaacaauauucugaggacccaggagucugccuguaacugcaucgggggaaauuguuauuugaugauaacagauggcuccgcaucagguguuagcgaaugccgguuucucaagauucgcgaggggagaaucauuaaagagaucuucccuaccggaagggugaagcauacggaagaguguacuugcggcuuugcuaguaacaagacaaucgaaugugccugccgggacaauucuuacaccgcgaaacgcccauucgucaagcugaacguggagacugauacagccgaaauucgauuaaugugcaccgacacguaucuggauacccccagaccugacgauggcuccauaacagggccaugugagagcaacggagacaaagguucgggcgggaucaagggaggcuuuguacaccagaggauggcaucuaaaauuggucggugguacucccguacuaugucaaagaccgagcgcauggggaugggccucuauguuaaauacgacggagaucccugggcugacagugaugcccuugcuuucagcggcgugauggucuccgugaaggaaccggggugguacucuuuuggauucgagaucaaggacaaaaagugcgaugugccuuguauagguauugaaaugguccaugacggcgggaaagagacauggcacagcgccgcaacugccaucuauugccugaugggaucaggccaauugcuaugggauaccguuacagguguggacauggcucuguga

SEQ ID NO: 156905 - RNA, 1401 nt, Artificial Sequence
  derived and/or modified CDS sequence (opt3) from neuraminidase__InfluenzaB__AEP20204
augcugcccagcaccauccagacacucacucuuuuccugacguccggcgggguguuguuaucucuguacgucucagccagucuaagcuaucuccuguacuccgacauucuucugaaguuuucuccuaccgagauaacagcuccaacuaugccguuggauugcgcaaacgccucgaauguucaagcggugaacagaucagcuaccaaaggaguaacacuccugcugcccgaaccugaguggaccuauccaaggcucagcugucccgguaguacuuuccagaaggccuuacugaucuccccucaccgguuuggcgaaacaaaaggaaauucugcaccacuuauuauccgcgagcccuucauugccugcgggccuaacgaauguaagcauuuugcuuugacccacuacgcagcccagccaggcgguuauuacaaugggacgcgaggagaccguaacaaacugagacaucuaaucagcgugaagcucggcaagauaccgacugucgaaaauuccaucuuccacauggcugccuggucaggcagugcgugccaugaugggaaagaguggaccuauauuggaguggacggucccgauaacaaugcacugcuuaagaucaaauacggcgaggccuacacagacacuuaucacagcuacgcuaacaagauucugaggacccaggagucugccuguaauugcaucgggggaaacuguuauuugaugauaacagauggcuccgcaucagguguuagcgaaugccgguuucucaaaauucgcgaggggagaaucauuaaggagaucuucccuaccggaagggugaagcacacggaagaguguacuugcggcuuugcuaguaauaaaacaaucgaaugugccugccgggacaacucuuacaccgcgaagcgcccauucgucaaacugaauguggagacugauacagccgaaauucgauuaaugugcaccgacacguaucuggauacccccagaccugacgauggcuccauaacagggccaugugagagcaacggagacaaggguucgggcgggaucaaaggaggcuuuguacaucaaaggauggcaucuaagauuggucggugguacucccguacuaugucaaaaaccgagcgcauggggaugggccucuauguuaaguacgacggagaucccugggcugacagugaugcccuugcuuucagcggcgugauggucuccaucaaggaaccggggugguacucuuuuggauucgagauaaaagacaagaaaugcgaugugccuuguauugguaucgaaauggugcacgacggcgggaaggagacauggcauagcgccgcaacugccaucuauugccugaugggaucaggccaguugcuaugggauaccgucacagguguugacauggcucuguga

SEQ ID NO: 156906 - RNA, 1401 nt, Artificial Sequence; identical to SEQ ID NO: 156735
  derived and/or modified CDS sequence (opt3) from neuraminidase__InfluenzaB__AEP20215

SEQ ID NO: 156907 - RNA, 1401 nt, Artificial Sequence
  derived and/or modified CDS sequence (opt3) from neuraminidase__InfluenzaB__AEP20237
augcugcccagcaccauccagacacucacucuuuuccugacguccggcgggguguuguuaucucuguacgucucagccagucuaagcuaucuccuguacuccgacauucuucugaaguuuucuccuaccgagauaacagcuccaacuaugccguuggauugcgcaaacgccucgaauguucaagcggugaacagaucagcuaccaaaggaguaacacuccugcugcccgaaccugaguggaccuauccaaggcucagcugucccgguaguacuuuccagaaggccuuacugaucuccccucaccgguuuggcgaaacaaaaggaaauucugcaccacuuauuauccgcgagcccuucauugccugcgggccuaaggaauguaaacauuuugcuuugacccacuacgcagcccagccaggcgguuauuacaacgggacgcgaggagaccguaauaagcugagacaucuaaucagcgugaagcucggcaaaauaccgacugucgagaacuccaucuuccacauggcugccuggucaggcagugcgugccaugaugggaaggaguggaccuauauuggaguggacggucccgauagcaaugcacugcuuaaaaucaaguacggcgaagccuacacagacacuuaucacucuuacgcuaacaauauucugaggacccaggaguccgccuguaacugcaucgggggaaauuguuauuugaugauaacagauggcucagcaagcgguauuagugaaugccgguuucucaaaauccgcgaggggagaauuaucaaggagaucuucccuaccggaaggguuaagcacacggaagaguguacuugcggcuuugcuucuaacaaaacaauugaaugugccugccgggacaauuccuacaccgcgaagcgcccauucgugaaacugaacgucgagacugaugccgcagaaauacgauuaaugugcacagagaccuaucuggacacgcccagaccugaugacggcagcaucaccgggccaugugagucgaauggagauaaggguucuggcgggauuaaaggaggcuuugugcaucaaaggauggcuuccaagaucggucggugguacucacguacaaugaguaaaacuaagcgcauggggaugggccucuauguaaaguacgacggagaccccuggaccgauagcgacgcccuugcucuguccggcguuauggugucuauggaggaaccggggugguacagcuucggauuugaaauaaaagauaagaaaugcgacgucccuuguauugguaucgagauggugcacgauggcgggaaggaaacauggcauucagccgcaacugccaucuauugcuugaugggaaguggccagcuacugugggacaccgugacaggugucgauauggcucucuga

SEQ ID NO: 156908 - RNA, 1401 nt, Artificial Sequence; identical to SEQ ID NO: 156735
  derived and/or modified CDS sequence (opt3) from neuraminidase__InfluenzaB__AEP20248

SEQ ID NO: 156909 - RNA, 1401 nt, Artificial Sequence
  derived and/or modified CDS sequence (opt3) from neuraminidase__InfluenzaB__AEP20259
augcugcccagcaccauccagacacucacucuuuuccugacguccggcgggguguuguuaucucuguacgucucagccagucuaagcuaucuccuguacuccgacauucuucugaaguuuucuccuaccgagauaacagcuccaacuaugccguuggauugcgcaaacgccucgaauguucaagcggugaacagaucagcuaccaaaggaguaacacuccugcugcccgaaccugaguggaccuauccaaggcucagcugucccgguaguacuuuccagaaggccuuacugaucuccccucaccgguuuggcgaaacaaaaggaaauucugcaccacuuauuauccgcgagcccuucauugccugcgggccuaacgaauguaagcauuuugcuuugacccacuacgcagcccagccaggcgguuauuacaaugggacgcgaggagaccguaacaaacugagacaucuaaucagcgugaagcucggcaagauaccgacugucgaaaauuccaucuuccacauggcugccuggucaggcagugcgugccaugaugggaaagaguggaccuauauuggaguggacggucccgauaacaaugcacugcuuaagaucaaauacggcgaggccuacacagacacuuaucacagcuacgcuaacaauauucugaggacccaggagucugccuguaacugcaucgggggaaauuguuauuugaugauaacagauggcuccgcaucagguguuagcgaaugccgguuucucaagauucgcgaggggagaaucauuaaagagaucuucccuaccggaagggugaagcacacggaagaguguacuugcggcuuugcuaguaacaagaucauugaaugugccugccgggacaauucuuacacagcgaaacgcccauucgucaagcugaacguggagaccgauacugccgaaauacgauuaaugugcacagagaccuaucuggacacgcccagaccugaugacggcuccaucaccgggccaugugagagcaacggagauaaagguucgggcgggauuaagggaggcuuuguacaucaaaggauggcaucuaaaaucggucggugguacucccguacaaugucaaagacugaacgcauggggaugggccucuauguuaaauacgacggagaccccugggcugauagugacgcccuugcucugagcggcgugauggucuccauggaggaaccggggugguacucuuucggauuugagauaaaggauaagaaaugcgacgugccuuguauugguaucgaaauggugcacgauggcgggaaggagaccuggcauagcgccgcaacagccaucuauugcuugaugggaucaggccagcuacugugggacacugucaccgguguugauauggcucucuga

SEQ ID NO: 156910 - RNA, 1401 nt, Artificial Sequence
  derived and/or modified CDS sequence (opt3) from neuraminidase__InfluenzaB__AEP20281
augcugcccagcaccauccagacacucacucuuuuccugacguccggcgggguguuguuaucucuguacgucucagccagucuaagcuaucuccuguacuccgacauucuucugaaguuuucuccuaccgagauaacagcuccaacuaugccguuggauugcgcaaacgccucgaauguucaagcggugaacagaucaaccacaaaaggaguaacccuccugcugcccgaaccugaguggacuuauccaaggcucagcugucccgguaguacauuccagaaggcuuuacugaucuccccucaccgguuuggcgaaaccaaaggaaauucugccccacuuauuauccgcgagcccuucauugcaugcgggccuaacgaauguaagcauuuugccuugacgcacuacgcugcacagccaggcgguuauuacaaugggacucgaggagaccguaacaaacugagacaucuaaucagcgugaagcucggcaagauaccgaccgucgaaaauuccaucuuccacauggccgcuuggucaggcagugccugccaugaugggaaagaguggacauauauuggaguggacggucccgauaacaaugcgcugcuuaagaucaaauacggcgaggcauacacugacaccuaucacagcuacgccaacaauauucugaggacacaggagucugcuuguaacugcaucgggggaaauuguuauuugaugauaaccgauggcuccgccucagguguuagcgaaugccgguuucucaagauucgcgaggggagaaucauuaaagagaucuucccuacgggaagggugaagcacacugaagaguguacaugcggcuuugcaaguaacaagaccaucgaaugugcuugccgggacaauucuuacacugccaaacgcccauucgucaagcugaacguggagacagauaccgcggaaauucgauuaaugugcacggagaccuaucuggacacacccagaccugaugacggcuccauaacugggccaugugagagcaacggagauaaagguucgggcgggaucaagggaggcuuuguacaucaaaggauggccucuaaaauuggucggugguacucccguaccaugucaaagacagaacgcauggggaugggccucuauguuaaauacgacggagaccccugggcagauagugacgcucuugcccugagcggcgugauggucuccauggaggaaccggggugguacucuuucggauuugagaucaaggauaagaaaugcgacgugccuuguauagguauugaaauggugcacgauggcgggaaggagacuuggcauagcgcugccaccgcaaucuauugcuugaugggaucaggccagcuacugugggacacagucaccgguguugauauggcccucuga

SEQ ID NO: 156911 - RNA, 1401 nt, Artificial Sequence; identical to SEQ ID NO: 156683
  derived and/or modified CDS sequence (opt3) from neuraminidase__InfluenzaB__AEP20292

SEQ ID NO: 156912 - RNA, 1401 nt, Artificial Sequence; identical to SEQ ID NO: 156675
  derived and/or modified CDS sequence (opt3) from neuraminidase__InfluenzaB__AEP20303

SEQ ID NO: 156913 - RNA, 1401 nt, Artificial Sequence
  derived and/or modified CDS sequence (opt3) from neuraminidase__InfluenzaB__AEP20314
augcugcccagcaccauccagacacucacucuuuuccugacguccggcgggguguuguuaucucuguacgucucagccagucuaagcuaucuccuguacuccgacauucuucugaaguuuucucaaaccggaauaacagcuccuaucaugccauuggauugcgcaaacgccucgaauguucaggcggugaacagaucagcuacuaaagguguaacccuccugcugccggagcccgaauggacauauccuaggcucagcuguccaggcaguaccuuccagaaggccuuacugauuucuccccaccgguuuggggagacuaaaggaaauuccgcaccucuuaucauucgcgaaccauucaucgccugcggccccaaggaguguaaacauuuugcuuugacacacuacgcagcccagccugguggguauuacaacggaacccgagaagaccguaauaagcugagacaucuaauaagcgugaagcucggcaaaaucccaacggucgagaacuccauuuuccacauggcugccuggucaggcagugcgugccaugaugggagggaguggacuuauaucggaguggacgguccggauagcaaugcacugcuuaagauuaaauacggcgaagccuacaccgacacauaucacucuuacgcuaagaacauccugcggacucaagaguccgccuguaauugcauagggggagauuguuauuugaugauuaccgacggccccgcaucagguaucagcgaaugccgcuuucucaaaauuagagaggggaggaucaucaaggagauuuucccuacaggacggguuaagcacaccgaagaguguacgugcggcuuugcuaguaacaaaacuauagaaugugccugccgcgauaauucuuacacagcgaagcgaccauucgugaaacugaacgucgagaccgacacugccgaaaucagauuaaugugcacagagaccuaucuggauacgcccaggccuaaugacggcuccauuaccgggccaugugagagcaacggagauaaggguucgggcgggaucaaaggaggcuuugugcaucagcggauggcaucuaagauaggucguugguacucccgcacaaugucaaaaacuaagagaauggggaugggccucuauguaaaguacgacggagaccccuggaccgauagugaagcucuugcccugagcggcguuaugauuuccauggaggaaccggggugguacucuuucggauuugagaucaaagacaagaaaugcgaugugccuuguaucgguauugaaaugguccacgacggcgggaagacaacuuggcauagcgcugccaccgcaaucuauugcuugaugggaucaggccagcuacugugggauacagugaccgguguggacauggcccucuga

SEQ ID NO: 156914 - RNA, 1401 nt, Artificial Sequence
  derived and/or modified CDS sequence (opt3) from neuraminidase__InfluenzaB__AEP20336
augcugcccagcaccauccagacacucacucuuuuccugacguccggcgggguguuguuaucucuguacgucucagccagucuaagcuaucuccuguacuccgacauucuucugaaguuuucuccuaccgagauaacagcuccaacuaugccguuggauugcgcaaacgccucgaauguucaagcggugaacagaucagcuaccaaaggaguaacacuccugcugcccgaaccugaguggaccuauccaaggcucagcugucccgguaguacuuuccagaaggccuuacugaucuccccucaccgguuuggcgaaacaaaaggaaauucugcaccacuuauuauccgcgagcccuucauugccugcgggccuaacgaauguaagcauuuugcuuugacccacuacgcagcccagccaggcgguuauuacaaugggacgcgaggagaccguaacaaacugagacaucuaaucagcgugaagcucggcaagauaccgacugucgaaaauuccaucuuccacauggcugccuggucaggcagugcgugccaugaugggaaagaguggaccuauauuggaguggacggucccgauaacaaugcacugcuuaagaucaaauacggcgaggccuacacagacacuuaucacagcuacgcuaacaauauucugaggacccaggagucugccuguaacugcaucgggggaaauuguuauuugaugauaacagauggcuccgcaucagguguuagcgaaugccgguuucucaagauucgcgaggggagaaucauuaaagagaucuucccuaccggaagggugaagcacacggaagaguguacuugcggcuuugcuaguaacaagacaaucgaaugugccugccgggacaauucuuacaccgcgaaacgcccauucgucaagcugaacguggagacugauacagccgaaauucgauuaaugugcaccgagacguaucuggacacccccagaccugaugacggcuccauaacagggccaugugagagcaacggagauaaagguucgggcgggaucaagggaggcuuuguacaucaaaggauggcaucuaaaauuggucggugguacucccguacuaugucaaagaccgaacgcauggggaugggccucuauguuaaauacgacggagaccccugggcugauagugacgcccuuacacugagcggcgugauggucuccauggaggaaccggggugguacucuuucggauuugagaucaaggauaagaaaugcgacgugccuuguauagguauugaaauggugcacgauggcgggaaggagacuuggcauagcgcugccaccucaaucuauugcuugaugggaaguggccagcuacugugggacacagucaccgguguugauauggcacucuga

SEQ ID NO: 156915 - RNA, 1401 nt, Artificial Sequence
  derived and/or modified CDS sequence (opt3) from neuraminidase__InfluenzaB__AEP20347
augcugcccagcaccauccagacacucacucuuuuccugacguccggcgggguguuguuaucucuguacgucucagccagucuaagcuaucuccuguacuccgacauucuucugaaguuuucucaaaccgagauaacagcuccuaucaugccauuggauugcgcaaacgccucgaauguucaggcggugaacagaucagcuacuaaaggaguaacccuccugcugccggaacccgaguggacauauccuaggcucagcuguccagguaguaccuuccagaaggccuuacugauuucuccccaccgguuuggcgaaacuaaaggaaauuccgcaccucuuaucauucgcgagccauucaucgccugcgggcccacagaauguaagcauuuugcuuugacccacuacgcagcccagccuggcgguuauuacaacgggacgcgagaggaccguaauaaacugagacaucuaauaagcgugaagcucggaaagaucccaacugucgagaacuccauuuuccacauggcugccuggucaggcagugcgugccaugauggcaaagaauggaccuauaucgggguggacggaccggauagcaaugcacugcuuaagauuaaauacggugaggccuacacagacacuuaucacucuuacgcuaagaacauccugaggacccaagaauccgccuguaauugcauaggcggggauuguuauuugaugauuacagacggacccgcaucaggcaucagcgagugccgguuucucaaaauucgcgaggguagaaucaucaaggaaauuuucccuaccgggaggguuaagcacacggaggaauguacuugcggauuugcuaguaacaaaacaauagagugugccugccgggauaauucuuacaccgcgaagcgcccauucgugaaacugaacgucgaaacugacacagccgagauccgauuaaugugcaccgagacguaucuggauacccccagaccuaaugacggcuccauuacaggcccaugugaaagcgauggggacaagggaucggguggcaucaaagggggauuugugcaucagaggauggcaucuaagauaggccggugguacucccguacuaugucaaaaaccaagcgcauggguauggggcucuauguaaaguacgacggcgaucccuggacagacagugaggcucuugcccugagcggaguuauggugccgauggaggaaccuggcugguacuccuucggguuugaaauuaaagauaagaaaugcgacguccccuguaucggaaucgagauggugcacgaugguggcaagacuaccuggcauucugcugccacagcaauuuauugcuugauggggagcggacagcuacugugggacaccgugacuggcgucgauauggcccucuga

SEQ ID NO: 156916 - RNA, 1401 nt, Artificial Sequence; identical to SEQ ID NO: 156915
  derived and/or modified CDS sequence (opt3) from neuraminidase__InfluenzaB__AEP20358

SEQ ID NO: 156917 - RNA, 1401 nt, Artificial Sequence; identical to SEQ ID NO: 156915
  derived and/or modified CDS sequence (opt3) from neuraminidase__InfluenzaB__AEP20369

SEQ ID NO: 156918 - RNA, 1401 nt, Artificial Sequence; identical to SEQ ID NO: 156915
  derived and/or modified CDS sequence (opt3) from neuraminidase__InfluenzaB__AEP20380

SEQ ID NO: 156919 - RNA, 1401 nt, Artificial Sequence
  derived and/or modified CDS sequence (opt3) from neuraminidase__InfluenzaB__AEP20391
augcugcccagcaccauccagacacucacucuuuuccugacguccggcgggguguuguuaucucuguacgucucagccagucuaagcuaucuccuguacuccgacauucuucugaaguuuucuccuaccgagauaacagcuccaacuaugccguuggauugcgcaaacgccucgaauguucaagcggugaacagaucagcuaccaaaggaguaacacuccugcugcccgaaccugaguggaccuauccaaggcucagcugucccgguaguacuuuccagaaggccuuacugaucuccccucaccgguuuggcgaaacaaaaggaaauucugcaccacuuauuauccgcgagcccuucauugccugcgggccuaacgaauguaagcauuuugcuuugacccacuacgcagcccagccaggcgguuauuacaaugggacgcgaggagaccguaacagacugaggcaucuaaucagcgugaaacucggcaagauaccgacugucgaaaauuccaucuuccacauggcugccuggucaggcagugcgugccaugaugggaaggaguggaccuauauuggaguggacggucccgauaacaaugcacugcuuaaaaucaaguacggcgaggccuacacagacacuuaucacagcuacgcuaacaauauucugcggacccaggagucugccuguaacugcaucgggggaaauuguuauuugaugauaacagauggcuccgcaucagguguuagcgaaugccgcuuucucaaaauuagagaggggaggaucauuaaggagaucuucccuaccggacgggugaaacacacggaagaguguacuugcggcuuugcuaguaacaagacaaucgaaugugccugccgcgacaauucuuacaccgcgaagcgaccauucgucaaacugaacguggagacugauacagccgaaauuagauuaaugugcaccgacacguaucuggauacccccaggccugacgauggcuccauaacagggccaugugagagcaacggagacaaggguucgggcgggaucaaaggaggcuuuguacaucaacggauggcaucuaagguuggucguugguacucccgcacuaugucaaaaaccgagagaauggggaugggccucuaugugaaguacgacggagaucccugggcugacagugaugcccuugcuuucagcggcgucaugguguccaugaaagaaccggggugguacucuuuuggauucgagauuaaggacaagaaaugcgaugugccuuguaucgguauagaaaugguccacgacggcgggaaggagacauggcauagcgccgcaacugccauuuauugccugaugggaucaggccaguugcuaugggauaccguuacagguguggacauggcucuguga

SEQ ID NO: 156920 - RNA, 1401 nt, Artificial Sequence
  derived and/or modified CDS sequence (opt3) from neuraminidase__InfluenzaB__AEP20413
augcugcccagcaccauccagacacucacucuuuuccugacguccggcgggguguuguuaucucuguacgucucagcccuacucaguuaucugcuuuacagcgacauucuguugaaguuuuccccuaccgagauaaucgcuccaacaaugucucucgauugcgcaaacgccucgaauguucaagcggugaacagaucagcuacuaaaggaguaaccuuccugcugccggaacccgaguggacauauccuaggcucagcuguccagguaguaccuuucagaaggccuuacugauuucuccccaccgguucggcgaaacuaaaggaaauuccgcaccucuuaucauucgcgagccauuuaucgccugcgggcccaacgaauguaagcauuucgcuuugacacacuacgcagcccagccuggcgguuauuacaaugggacccgaggagaccguaacaaacugagacaucuaauaagcgugaagcucggcaagaucccaacggucgaaaauuccauuuuucacauggcugccuggucaggcagugcgugccaugaugggaaagaguggacuuauaucggaguggacgguccggauaacgacgcacugcuuaagguuaaauacggcgaggccuacaccgauacauaucacagcuacgcuaauaagauucugaggacucaggagucugccuguaacugcaucgggggaaauuguuauuugaugauaaccgacggcuccgcaucaggugugagcgaaugccgguuccucaaaauucgcgaggggagaaucauuaaggagaucuuucccacaggaagggucaagcacaccgaagaguguacgugcggcuucgcuaguaacaaaacuaucgaaugugccugccgggauaauucuuacacagcgaagcgcccuuuugugaaacugaacguagagaccgacacugccgaaauucgauuaaugugcacagauaccuaucuggacacgccaagacccgaugacggcuccauaaccgggccuugugagagcaauggagacaaggguucgggcgggaucaaaggaggcuucguucaucaaaggauggagucuaagauuggucggugguacucccguacaaugucaaaaacugaacgcauggggaugggccucuaugugaaguacaacggagauccaugggcagacagugaugcucuugccuuuagcggcgucaugguguccaugaaggagcccgggugguacucuuucggauucgaaaucaaagacaagaaaugcgaugugccguguauagguauugagaugguccacgacggcgggaaggaaaccuggcauagcgcugccacagcaaucuauugccugaugggaucaggccaguugcuaugggauacuguuaccgguguggacauggcccuguga

SEQ ID NO: 156921 - RNA, 1401 nt, Artificial Sequence; identical to SEQ ID NO: 156920
  derived and/or modified CDS sequence (opt3) from neuraminidase__InfluenzaB__AEP20435

SEQ ID NO: 156922 - RNA, 1401 nt, Artificial Sequence; identical to SEQ ID NO: 156915
  derived and/or modified CDS sequence (opt3) from neuraminidase__InfluenzaB__AEQ39031

SEQ ID NO: 156923 - RNA, 1401 nt, Artificial Sequence
  derived and/or modified CDS sequence (opt3) from neuraminidase__InfluenzaB__AEQ39275
augcugcccagcaccauccagacacucacucuuuuccugacguccggcgggguguuguuaucucuguacgucucagccagucuaagcuaucuccuguacuccgacauucuucugaaguuuucuccuaaagagauaaccgcuccaacaaugccguuggauugcgcaaacgccucgaauguucaagcggugaaccacucagcuacuaagggaguaacccuccugcugcccgaaccugaguggacauauccaagacucagcugucccgguaguaccuuccagaaagccuuacugaucuccccucauagguuuggcgaaacuaagggaaauucugcaccacuuauuauccgggagcccuucauugccugcgggccuaacgaauguaaacacuuugcuuugacacauuacgcagcccagccaggcgguuauuacaaugggacccgcggagaccgaaacaagcugcgucaccuaaucagcgugaagcucggcaaaauaccgacggucgaaaauuccaucuuccauauggcugccuggucaggcagugcgugccacgaugggaaggaguggacuuauauuggaguggacggucccgauaacaaugcacugcuuaaaguuaaguacggcgaggccuacaccgacacauaucacagcuacgcuaacaaaauccugagaacucaggagucugccuguaauugcauugggggaaacuguuauuugaugaucaccgauggcuccgcaucaggugugagcgaaugcagguuucucaagauacgggaggggcgcauuaucaaggagauuuucccuacaggaagagucaaacauaccgaagaguguacgugcggcuuugcuaguaauaagacuaucgaaugugccugcagggacaacucuuacacagcgaaacggccauucgugaagcugaauguagagaccgauacugccgaaauccgcuuaaugugcacagacaccuaucuggauacgccccgaccugacgauggcuccauuaccgggccaugugagagcaacggagacaaagguucgggcgggauaaagggaggcuuuguucaccaaagaauggagucuaaaaucgguaggugguacucccggacaaugucaaagacugaacguauggggaugggccucuaugugaaguacgacggagaucccugggcagacagugaugcucuugccuucagcggcgucaugguguccaugaaagagccggggugguacucuuuuggauucgaaauuaaggacaaaaagugcgaugugccuuguaucgguauagagaugguccaugacggcgggaaagaaaccuggcacagcgcugccacagcaauuuauugccugaugggaucaggccaguugcuaugggauacuguuaccgguguggacauggcccuguga

SEQ ID NO: 156924 - RNA, 1401 nt, Artificial Sequence; identical to SEQ ID NO: 156923
  derived and/or modified CDS sequence (opt3) from neuraminidase__InfluenzaB__AEQ39286

SEQ ID NO: 156925 - RNA, 1401 nt, Artificial Sequence; identical to SEQ ID NO: 156923
  derived and/or modified CDS sequence (opt3) from neuraminidase__InfluenzaB__AEQ39297

SEQ ID NO: 156926 - RNA, 1401 nt, Artificial Sequence; identical to SEQ ID NO: 156923
  derived and/or modified CDS sequence (opt3) from neuraminidase__InfluenzaB__AEQ39308

SEQ ID NO: 156927 - RNA, 1401 nt, Artificial Sequence; identical to SEQ ID NO: 156923
  derived and/or modified CDS sequence (opt3) from neuraminidase__InfluenzaB__AEQ39319

SEQ ID NO: 156928 - RNA, 1401 nt, Artificial Sequence
  derived and/or modified CDS sequence (opt3) from neuraminidase__InfluenzaB__AEQ39330
augcugcccagcaccauccagacacucacucuuuuccugacguccggcgggguguuguuaucucuguacgucucagccagucuaagcuaucuccuguacuccgacauucuucugaaguuuucuccuaaagagauaaccgcuccaacaaugccguuggauugcgcaaacgccucgaauguucaagcggugaaccacucagcuacuaagggaguaacccuccugcugcccgaaccugaguggacauauccaagacucagcugucccgguaguaccuuccagaaagccuuacugaucuccccucauagguuuggcgaaacuaagggaaauucugcaccacuuauuauccgggagcccuucauugccugcgggccuaacgaauguaaacacuuugcuuugacacauuacgcagcccagccaggcgguuauuacaaugggacccgcggagaccgaaacaagcugcgucaccuaaucagcgugaagcucggcaaaauaccgacggucgaaaauuccaucuuccauauggcugccuggucaggcagugcgugccacgaugggaaggaguggacuuauauuggaguggacggucccgauaacaaugcacugcuuaaaguuaaguacggcgaggccuacaccgacacauaucacagcuacgcuaacaaaauccugagaacucaggagucugccuguaauugcauugggggaaacuguuauuugaugaucaccgauggcuccgcaucaggugugagcgaaugcagguuucucaagauacgggaggggcgcauuaucaaggagauuuucccuacaggaagagucaaacauaccgaagaguguacgugcggcuuugcuaguaauaagacuaucgaaugugccugcagggacaacucuuacacagcgaaacggccauucgugaagcugaauguagagaccgauacugccgaaauccgcuuaaugugcacagacaccuaucuggauacgccccgaccugacgauggcuccauuaccgggccaugugagagcaacggagacaaagguucgggcgggauaaagggaggcuuuguucaccaaagaauggagucuaaaaucgguaggugguacucccggacaaugucaaagacugaacguauggggaugggccucuaugugaaguacgacggagaucccugggcagacagugaugcucuugccuucagcggcgucaugguguccaugaaagagccggggugguacucuuuuggauucgaaauuaaggacaaaaagugcgaugugccuuguaucgguauagagaugguccaugacggcgggaaagaaaccuggcacagcgcugccacagcaauuuauugccugaugggaucaggccaguugcuaugggauacuguuaccgguguggacaucgcccuguga

SEQ ID NO: 156929 - RNA, 1401 nt, Artificial Sequence; identical to SEQ ID NO: 156923
  derived and/or modified CDS sequence (opt3) from neuraminidase__InfluenzaB__AEQ39341

SEQ ID NO: 156930 - RNA, 1401 nt, Artificial Sequence; identical to SEQ ID NO: 156923
  derived and/or modified CDS sequence (opt3) from neuraminidase__InfluenzaB__AEQ39352

SEQ ID NO: 156931 - RNA, 1401 nt, Artificial Sequence; identical to SEQ ID NO: 156923
  derived and/or modified CDS sequence (opt3) from neuraminidase__InfluenzaB__AEQ39363

SEQ ID NO: 156932 - RNA, 1401 nt, Artificial Sequence; identical to SEQ ID NO: 156889
  derived and/or modified CDS sequence (opt3) from neuraminidase__InfluenzaB__AEQ39374

SEQ ID NO: 156933 - RNA, 1401 nt, Artificial Sequence
  derived and/or modified CDS sequence (opt3) from neuraminidase__InfluenzaB__AEQ39385
augcugcccagcaccauccagacacucacucuuuuccugacguccggcgggguguuguuaucucuguacgucucagccagucuaagcuaucuccuguacuccgacauucuucugaaguuuucuccuaccgagauaacagcuccaacuaugccguuggauugcgcaaacgccucgaauguucaagcggugaacagaucagcuaccaaaggaguaacacuccugcugcccgaaccugaguggaccuauccaaggcucagcugucccgguaguacuuuccagaaggccuuacugaucuccccucaccgguuuggcgaaacaaaaggaaauucugcaccacuuauuauccgcgagcccuucauugccugcgggccuaaggaauguaaacauuuugcuuugacccacuacgcagcccagccaggcgguuauuacaacgggacgcgaggagaccguaauaagcugagacaucuaaucagcgugaagcucggcaaaauaccgacugucgagaacuccaucuuccacauggcugccuggucaggcagugcgugccaugaugggaaggaguggaccuauauuggaguggacggucccgauagcaaugcacugcuuaaaaucaaguacggcgaagccuacacagacacuuaucacucuuacgcuaacaauauucugaggacccaggaguccgccuguaacugcaucgggggaaauuguuauuugaugauaacagauggcucagcaagcgguauuagugaaugccgguuucucaaaauccgcgaggggagaauuaucaaggagaucuucccuaccggaaggguuaagcacacggaagaguguacuugcggcuuugcuucuaacaaaacaauugaaugugccugccgggacaauuccuacaccgcgaagcgcccauucgugaaacugaacgucgagacugauacagccgaaauacgauuaaugugcaccgagacguaucuggacacccccagaccugaugacggcagcaucacagggccaugugagucgaauggagauaaggguucuggcgggauuaaaggaggcuuugugcaucaaaggaugacuuccaagaucggucggugguacucacguaccaugaguaaaacaaagcgcauggggaugggccucuauguaaaguacgacggagaccccuggacugauagcgacgcacuugcucuguccggcguuauggugucuauggaggaaccggggugguacagcuucggauuugaaauaaaagauaagaaaugcgacgucccuuguauugguaucgagauggugcacgauggcgggaaggaaaccuggcauucagccgcuacagccaucuauugcuugaugggaaguggccagcuacugugggacaccgugacuggugucgauauggcacucuga

SEQ ID NO: 156934 - RNA, 1401 nt, Artificial Sequence
  derived and/or modified CDS sequence (opt3) from neuraminidase__InfluenzaB__AEQ39444
augcugcccagcaccauccagacacucacucuuuuccugacguccggcgggguguuguuaucucuguacgucucagccagucuaagcuaucuccuguacuccgacauucuucugaaguuuucucaaaccgagauaaucgcuccuauuaugccauuggauugcgcaaacgccucgaauguucaggcggugaacagaucagcuacaaaaggaguaacucuccugcugccggaacccgaguggaccuauccuaggcucagcuguccagguaguacauuccagaaggccuuacugaucucuccccaccgguuuggcgaaaccaaaggaaauuccgcaccucuuauuauccgcgagccauucauagccugcgggcccacugaauguaagcauuuugcuuugacacacuacgcagcccagccuggcgguuauuacaacgggacccgagaggaccguaauaaacugagacaucuaaucagcgugaagcucggaaagauuccaacggucgagaacuccaucuuccacauggcugccuggucaggcagugcgugccaugauggcaaagaauggacuuauauugggguggacggaccggauagcaaugcacugcuuaagaucaaauacggugaggccuacaccgacacauaucacucuuacgcuaagaacauacugaggacucaagaauccgccuguaauugcauuggcggggauuguuauuugaugaucaccgacggacccgcaucaggcauuagcgagugccgguuucucaaaauccgcgaggguagaaucauuaaggaaauauucccuacagggaggguuaagcacaccgaggaauguacgugcggauuugcuaguaacaaaacuaucgagugugccugccgggauaauucuuacacagcgaagcgcccauucgugaaacugaacgucgaaaccgacacugccgagauucgauuaaugugcacagagaccuaucuggauacgcccagaccuaaugacggcuccaucaccggcccaugugaaagcgauggggacaagggaucggguggcauaaaagggggauuugugcaucagaggauggcaucuaagauuggccggugguacucccguacaaugucaaaaacuaagcgcauggguauggggcucuauguaaaguacgacggcgaucccuggaccgacagugaggcucuugcccugagcggaguuaugguguccauggaggaaccgggcugguacucuuucggguuugaaaucaaagauaagaaaugcgacgucccuuguaucggaauugagauggugcacgaugguggcaagacaacuuggcauagcgcugccaccgcaaucuauugcuugauggggucaggacagcuacugugggacacagugaccggcgucgauauggcccucuga

SEQ ID NO: 156935 - RNA, 1401 nt, Artificial Sequence; identical to SEQ ID NO: 156836
  derived and/or modified CDS sequence (opt3) from neuraminidase__InfluenzaB__AEQ39455

SEQ ID NO: 156936 - RNA, 1401 nt, Artificial Sequence
  derived and/or modified CDS sequence (opt3) from neuraminidase__InfluenzaB__AEQ39466
augcugcccagcaccauccagacacucacucuuuuccugacguccggcgggguguuguuaucucuguacgucucagccagucuaagcuaucuccuguacuccgacauucuucugaaguuuucuccuaccgagauaacagcuccaacuaugccguuggauugcgcaaacgccucgaauguucaagcggugaacagaucagcuaccaaaggaguaacacuccugcugcccgaaccugaguggaccuauccaaggcucagcugucccgguaguacuuuccagaaggccuuacugaucuccccucaccgguuuggcgaaacaaaaggaaauucugcaccacuuauuauccgcgagcccuucauugccugcgggccuaacgaauguaagcauuuugcuuugacccacuacgcagcccagccaggcgguuauuacaaugggacgcgaggagaccguaacaaacugagacaucuaaucagcgugaagcucggcaagauaccgacugucgaaaauuccaucuuccacauggcugccuggucaggcagugcgugccaugaugggaaagaguggaccuauauuggaguggacggucccgauaacaaugcacugcuuaagaucaaauacggcgaggccuacacagacacuuaucacagcuacgcuaacaauauucugaggacccaggagucugccuguaacugcaucgggggaaauuguuauuugaugauaacagauggcuccgcaucagguguuagcgaaugccgguuucucaagauucgcgaggggagaaucauuaaagagaucuucccuaccggaagggugaagcacacggaagaguguacuugcggcuuugcuaguaacaagacaaucgaaugugccugccgggacaauucuuacaccgcgaaacgcccauucgucaagcugaacguggagacugauacagccgaaauucgauuaaugugcaccgacacguaucuggauacccccagaccugacgauggcuccauaacagggccaugugagagcaacggagacaaagguucgggcgggaucaagggaggcuuuguacaucaaaggauggcaucuaaaguuggucggugguacucccguacuaugucaaagaccgagcgcauggggaugggccucuaugugaaauacgacggagaucccugggcugacagugaugcccuugcuuucagcggcgucaugguguccaugaaggaaccggggugguacucuuuuggauucgagauuaaggacaaaaagugcgaugugccuuguaucgguauagaaaugguccacgacggcgggaaagagacauggcauagcgccgcaacugccauuuauugccugaugggaucaggccaguugcuaugggauaccguuacagguguggacauggcucuguga

SEQ ID NO: 156937 - RNA, 1401 nt, Artificial Sequence; identical to SEQ ID NO: 156923
  derived and/or modified CDS sequence (opt3) from neuraminidase__InfluenzaB__AEQ39477

SEQ ID NO: 156938 - RNA, 1401 nt, Artificial Sequence
  derived and/or modified CDS sequence (opt3) from neuraminidase__InfluenzaB__AEQ39488
augcugcccagcaccauccagacacucacucuuuuccugacguccggcgggguguuguuaucucuguacgucucagccagucuaagcuaucuccuguacuccgacauucuucugaaguuuucuccuaccgagauaacagcuccaacuaugccguuggauugcgcaaacgccucgaauguucaagcggugaacagaucagcuaccaaaggaguaacacuccugcugcccgaaccugaguggaccuauccaaggcucagcugucccgguaguacuuuccagaaggccuuacugaucuccccucaccgguuuggcgaaacaaaaggaaauucugcaccacuuauuauccgcgagcccuucauugccugcgggccuaacgaauguaagcauuuugcuuugacccacuacgcagcccagccaggcgguuauuacaaugggacgcgaggagaccguaacaaacugagacaucuaaucagcgugaagcucggcaagauaccgacugucgaaaauuccaucuuccacauggcugccuggucaggcagugcgugccaugaugggaaagaguggaccuauauuggaguggacggucccgauaacaaugcacugcuuaagguuaaauacggcgaggccuacacagacacuuaucacagcuacgcuaacaagauccugaggacccaggagucugccuguaauugcauugggggaaacuguuauuugaugaucacagauggcuccgcaucaggugugagcgaaugccgguuucucaaaauacgcgaggggagaauuaucaaggagauuuucccuaccggaagggucaagcacacggaagaguguacuugcggcuuugcuaguaauaaaacaaucgaaugugccugccgggacaacucuuacaccgcgaagcgcccauucgugaaacugaauguagagacugauacagccgaaauccgauuaaugugcaccgacacguaucuggauacccccagaccuaacgacggcuccauuacagggccaugugagagcaacggagauaaggguucgggcgggauaaaaggaggcuuuguucaucaaaggauggagucucggaucggucguugguacucccgcacuaugucaaagaccgaaagaauggggaugggccucuaugugaaauacgacggagaccccuggacagauagugacgcacuugcuuucagcggcgucaugguguccaugaaggagccggggugguacucuuuuggauucgaaauuaaggauaaaaagugcgacgugccuuguaucgguauagagaugguccacgauggcgggaaagaaacuuggcauagcgccgcuaccgccauuuauugccugaugggaucaggccaguugcuaugggacacaguuaccgguguggauauggcacuguga

SEQ ID NO: 156939 - RNA, 1401 nt, Artificial Sequence; identical to SEQ ID NO: 156889
  derived and/or modified CDS sequence (opt3) from neuraminidase__InfluenzaB__AEQ39499

SEQ ID NO: 156940 - RNA, 1401 nt, Artificial Sequence; identical to SEQ ID NO: 156735
  derived and/or modified CDS sequence (opt3) from neuraminidase__InfluenzaB__AEQ39510

SEQ ID NO: 156941 - RNA, 1401 nt, Artificial Sequence
  derived and/or modified CDS sequence (opt3) from neuraminidase__InfluenzaB__AEQ49685
augcugcccagcaccauccagacacucacucuuuuccugacguccggcgggguguuguuaucucuguacgucucagccagucuaagcuaucuccuguacuccgacauucuucugaaguuuucuccuaccgagauaacagcuccaacuaugccguuggauugcgcaaacgccucgaauguucaagcggugaacagaucagcuaccaaaggaguaacacuccugcugcccgaaccugaguggaccuauccaaggcucagcugucccgguaguacuuuccagaaggccuuacugaucuccccucaccgguuuggcgaaacaaaaggaaauucugcaccacuuauuauccgcgagcccuucauugccugcgggccuaacgaauguaagcauuuugcuuugacccacuacgcagcccagccaggcgguuauuacaaugggacgcgaggagaccguaacaaacugagacaucuaaucagcgugaagcucggcaagauaccgacugucgaaaauuccaucuuccacauggcugccuggucaggcagugcgugccaugaugggaaagaguggaccuauauuggaguggacggucccgauaacaaugcacugcuuaagguuaaauacggcgaggccuacacagacacuuaucacagcuacgcuaacaagauccugaggacccaggagucugccuguaauugcauugggggaaacuguuauuugaugaucacagauggcuccgcaucaggugugagcgaaugccgguuucucaaaauacgcgaggggagaauuaucaaggagauuuucccuaccggaagggucaagcacacggaagaguguacuugcggcuuugcuaguaauaaaacaaucgaaugugccugccgggacaacucuuacaccgcgaagcgcccauucgugaaacugaauguagagacugauacagccgaaauccgauuaaugugcaccgacacguaucuggauacccccagaccuaacgacggcuccauuacagggccaugugagagcgauggagacaaggguucgggcgggauaaaaggaggcuuuguucaucaaaggauggagucuaagaucggucggugguacucccguacuaugucaaaaaccgaacgcauggggaugggccucuaugugaaguacgacggagaucccugggcagacagugaugcucuugccuucagcggcgucaugguguccaugaaggagccggggugguacucuuuuggauucgaaauuaaagacaagaaaugcgaugugccuuguaucgguauagagaugguccacgacggcgggaaggaaacauggcauagcgcugccacugcaauuuauugccugaugggaucaggccaguugcuaugggauaccguuacagguguggacauggaucuguga

SEQ ID NO: 156942 - RNA, 1401 nt, Artificial Sequence
  derived and/or modified CDS sequence (opt3) from neuraminidase__InfluenzaB__AEQ49686
augcugcccagcaccauccagacacucacucuuuuccugacguccggcgggguguuguuaucucuguacgucucagccagucuaagcuaucuccuguacuccgacauucuucugaaguuuucuccuaccgagauaacagcuccaacuaugccguuggauugcgcaaacgccucgaauguucaagcggugaacagaucagcuaccaaaggaguaacacuccugcugcccgaaccugaguggaccuauccaaggcucagcugucccgguaguacuuuccagaaggccuuacugaucuccccucaccgguuuggcgaaacaaaaggaaauucugcaccacuuauuauccgcgagcccuucauugccugcgggccuaacgaauguaagcauuuugcuuugacccacuacgcagcccagccaggcgguuauuacaaugggacgcgaggagaccguaacaaacugagacaucuaaucagcgugaagcucggcaagauaccgacugucgaaaauuccaucuuccacauggcugccuggucaggcagugcgugccaugaugggaaagaguggaccuauauuggaguggacggucccgauaacgacgcacugcuuaagguuaaauacggcgaggccuacacagauacuuaucacagcuacgcuaauaagauccugaggacccaggagucugccuguaacugcauugggggaaauuguuauuugaugaucacagacggcuccgcaucaggugugagcgaaugccgguuucucaaaauacgcgaggggagaauuaucaaggagauuuucccuaccggaagggucaagcacacggaagaguguacuugcggcuuugcuaguaacaaaacaaucgaaugugccugccgggauaauucuuacaccgcgaagcgcccauucgugaaacugaacguagagacugacacagccgaaauccgauuaaugugcaccgauacguaucuggacacccccagaccugaugacggcuccauuacagggccaugugagagcaauggagacaaggguucgggcgggauaaaaggaggcuuuguucaucaaaggauggagucuaagaucggucggugguacucccguacuaugucaaaaaccgaacgcauggggaugggccucuaugugaaguacgauggagaccccugggcagauagugacgcucuugccuucagcggcgucaugguguccaugaaggagccggggugguacucuuuuggauucgaaauuaaagauaagaaaugcgacgugccuuguaucgguauagagaugguccacgauggcgggaaggaaacauggcauagcgcugccacugcaauuuauugccugaugggaucaggccaguugcuaugggacaccguuacagguguggauauggcccuguga

SEQ ID NO: 156943 - RNA, 1401 nt, Artificial Sequence
  derived and/or modified CDS sequence (opt3) from neuraminidase__InfluenzaB__AEQ49687
augcugcccagcaccauccagacacucacucuuuuccugacguccggcgggguguuguuaucucuguacgucucagcccuacucaguuaucugcuuuacagcgacauucuguugaaguuuuccccuaccgagauaacagcuccaacuaugucucucgauugcgcaaacgccucgaauguucaagcggugaacagaucagcuaccaaaggaguaacauuccugcugccggaacccgaguggaccuauccuaggcucagcuguccagguaguacuuuucagaaggccuuacugaucucuccccaccgguucggcgaaacaaaaggaaauuccgcaccucuuauuauccgcgagccauuuauugccugcgggcccaacgaauguaagcauuucgcuuugacccacuacgcagcccagccuggcgguuauuacaaugggacgcgaggagaccguaacaaacugagacaucuaaucagcgugaagcucggcaagauaccaacugucgaaaauuccaucuuucacauggcugccuggucaggcagugcgugccaugaugggaaagaguggaccuauauuggaguggacgguccggauaacgacgcacugcuuaagguuaaauacggcgaggccuacacagauacuuaucacagcuacgcuaauaagauccugaggacccaggagucugccuguaacugcauugggggaaauuguuauuugaugaucacagacggcuccgcaucaggugugagcgaaugccgguuccucaaaauacgcgaggggagaauuaucaaggagauuuuucccaccggaagggucaagcacacggaagaguguacuugcggcuucgcuaguaacaaaacaaucgaaugugccugccgggauaauucuuacaccgcgaagcgcccuuuugugaaacugaacguagagacugacacagccgaaauccgauuaaugugcaccgauacguaucuggacaccccaagacccgaugacggcuccauuacagggccuugugagagcaauggagacaaggguucgggcgggauaaaaggaggcuucguucaucaaaggauggagucuaagaucggucggugguacucccguacuaugucaaaaaccgaacgcauggggaugggccucuaugugaaguacgauggagacccaugggcagauagugacgcucuugccuuuagcggcgucaugguguccaugaaggagcccgggugguacucuuucggauucgaaauuaaagauaagaaaugcgacgugccguguaucgguauagagaugguccacgauggcgggaaggaaacauggcauagcgcugccacugcaauuuauugccugaugggaucaggccaguugcuaugggacaccguuacagguguggauauggcccuguga

SEQ ID NO: 156944 - RNA, 1401 nt, Artificial Sequence
  derived and/or modified CDS sequence (opt3) from neuraminidase__InfluenzaB__AEQ49688
augcugcccagcaccauccagacacucacucuuuuccugacguccggcgggguguuguuaucucuguacgucucagccagucuaagcuaucuccuguacuccgacauucuucugaaguuuucuagaaccgagauaacagcuccuaucaugccauugggaugcgcaaacgccucgaauguucaagcggugaacaggucagcuacuaaagguguaacccuccugcugccggaacccgaguggacauauccucggcucagcuguccaggcaguaccuuccagaaggccuuacugauuucuccccaccgcuuuggggaaacuaaaggaaauuccgcaccucuuaucauucgagagccauucaucgccugcggccccaaggaauguaaacauuuugcuuugacacacuacgcagcccagccugguggguauuacaacggaacccgugaggauagaaauaagcugaggcaucuaauaagcgugaagcucggcaaaaucccaacggucgagaacuccauuuuccacauggcugccuggucaggcagugcgugccaugacgggcgggaauggacuuauaucggaguggaugguccggacagcaaugcacugcuuaagauuaaauacggcgaggccuacaccgauacauaucacucuuacgcuaagaacauccugcgcacucaggaauccgccuguaauugcauagggggagacuguuauuugaugauuaccgauggccccgcaucagguaucagcgagugcagauuucucaaaauuagggaggggcggaucaucaaggaaauuuucccuacaggacgcguuaagcacaccgaggaauguacgugcggcuuugcuaguaacaaaacuauagagugugccugccgagacaauucuuacacagcgaagagaccauucgugaaacugaacgucgaaaccgauacugccgagaucagguuaaugugcacagagaccuaucuggacacgccccggccuaaugauggcuccauuaccgggccaugugaaagcaacggagacaaggguucgggcgggaucaaaggaggcuuugugcaucaacguauggcaucuaagauaggucgcugguacuccagaacaaugucaaaaacuaagaggauggggaugggccucuauguaaaguacgauggagaccccuggaccgacagugaggcucuugcccugagcggcguuaugguguccauggaggaaccggggugguacucuuucggauuugaaauuaaagauaagaaaugcgacgucccuuguaucgguaucgagauggugcacgauggcgggaagacaacuuggcauagcgcugccaccgcaauuuauugcuugaugggaucaggccagcuacugugggacacagugaccggugucaauaugacucucuga

SEQ ID NO: 156945 - RNA, 1401 nt, Artificial Sequence
  derived and/or modified CDS sequence (opt3) from neuraminidase__InfluenzaB__AEQ49691
augcugcccagcaccauccagacacucacucuuuuccugacguccggcgggguguuguuaucucuguacgucucagcccuacucaguuaucugcuuuacagcgacauucuguugaaguuuuccccuaccgagauaacagcuccaacuaugucucucgauugcgcaaacgccucgaauguucaagcggugaacagaucagcuaccaaaggaguaacauuccugcugccggaacccgaguggaccuauccuaggcucagcuguccagguaguacuuuucagaaggccuuacugaucucuccccaccgguucggcgaaacaaaaggaaauuccgcaccucuuauuauccgcgagccauuuauugccugcgggcccaacgaauguaagcauuucgcuuugacccacuacgcagcccagccuggcgguuauuacaaugggacgcgaggagaccguaacaaacugagacaucuaaucagcgugaagcucggcaagauaccaacugucgaaaauuccaucuuucacauggcugccuggucaggcagugcgugccaugaugggaaagaguggaccuauauuggaguggacgguccggauaacgacgcacugcuuaagguuaaauacggcgaggccuacacagauacuuaucacagcuacgcuaauaagauccugaggacccaggagucugccuguaacugcauugggggaaauuguuauuugaugaucacagacggcuccgcaucaggugugagcgaaugccgguuccucaaaauacgcgaggggagaauuaucaaggagauuuuucccaccggaagggucaagcacacggaagaguguacuugcggcuucgcuaguaacaaaacaaucgaaugugccugccgggauaauucuuacaccgcgaagcgcccuuuugugaaacugaacguagagacugacacagccgaaauccgauuaaugugcaccgauacguaucuggacaccccaagacccgaugacggcuccauuacagggccuugugagagcaauggagacagggguucgggcgggauaaagggaggcuucguucaucaacggauggagucuaaaaucggucguugguacucccgcacuaugucaaagaccgaaagaauggggaugggccucuaugugaaauacgauggagacccaugggcagauagugacgcucuugccuuuagcggcgucaugguguccaugaaggagcccgggugguacucuuucggauucgaaauuaaggauaaaaagugcgacgugccguguaucgguauagagaugguccacgauggcgggaaagaaacauggcauagcgcugccacugcaauuuauugccugaugggaucaggccaguugcuaugggacaccguuacagguguggauauggcccuguga

SEQ ID NO: 156946 - RNA, 1401 nt, Artificial Sequence
  derived and/or modified CDS sequence (opt3) from neuraminidase__InfluenzaB__AEQ49692
augcugcccagcaccauccagacacucacucuuuuccugacguccggcgggguguuguuaucucuguacgucucagccagucuaagcuaucuccuguacuccgacauucuucugaaguuuucuccuaccgagacaacugcuccaaccaugucguuggauugcgcaaacgccucaaauguucaagcggugaacagaagcgcuacaaaaggaguaaccuuccuccugccggaacccgaguggacuuauccuaggcugaguuguccagguuccacauuucagaaggcccucuuaauaucuccccaccgguucggcgaaaccaaagggaauagcgcaccucugaucauucgcgagccauuuaucgccugcggacccaacgaauguaagcauuucgcucuuacgcacuacgcagcccagccuggcgguuauuacaaugggacucgaggagaccguaacaaauugagacaucugauuuccgugaagcuaggcaagaucccaaccgucgaaaauucaauauuucacauggcugccuggaguggcagcgcgugccaugaugggaaagaguggacauauaucggaguggacgguccggauaacgacgcacuccugaagguuaaauacggcgaggccuacacugauaccuaucacucuuacgcuaauaagauucuuaggacacaggaguccgccuguaacugcaucgggggaaauuguuaucugaugauuaccgacggcucagcaagcggugugagugaaugccgguucuugaaaauccgcgaggggagaauaauuaaggagaucuuucccacgggaagggucaagcacacugaagaguguacaugcggcuucgcuucuaacaaaaccauugaaugugccugccgggauaauuccuacacugcgaagcgcccuuuugugaaacucaacguagagacagacaccgccgaaauccgacugaugugcacggauaccuauuuagacacaccaagacccgaugacggcagcaucacugggccuugugagucgaauggagacaaggguucuggcgggauuaaaggaggcuucguucaucaaaggauggaguccaagauaggucggugguacucacguaccaugaguaaaacagaacgcauggggaugggccuguaugugaaguacgauggagacccaugggcagauagcgacgcucucgccuuuuccggcgucauggugucuaugaaggagcccgggugguacagcuucggauucgaaaucaaagauaagaaaugcgacgugccguguauugguaucgagaugguccacgauggcgggaaggaaacuuggcauucagcugccaccgcaauauauugccuuaugggaaguggccagcuguugugggacacaguuaccgguguggauauggcccuauga

SEQ ID NO: 156947 - RNA, 1401 nt, Artificial Sequence
  derived and/or modified CDS sequence (opt3) from neuraminidase__InfluenzaB__AEQ49693
augcugcccagcaccauccagacacucacucuuuuccugacguccggcgggguguuguuaucucuguacgucucagccagucuaagcuaucuccuguacuccgacauucuucugaaguuuucuccuaccgagauaacagcuccaacuaugccguuggauugcgcaaacgccucgaauguucaagcggugaacagaucagcuaccaaaggaguaacacuccugcugcccgaaccugaguggaccuauccaaggcucagcugucccgguaguacuuuccagaaggccuuacugaucuccccucaccgguuuggcgaaacaaaaggaaauucugcaccacuuauuauccgcgagcccuucauugccugcgggccuaacgaauguaagcauuuugcuuugacccacuacgcagcccagccaggcgguuauuacaaugggacgcgaggagaccguaacaaacugagacaucuaaucagcgugaagcucggcaagauaccgacugucgaaaauuccaucuuccacauggcugccuggucaggcagugcgugccaugaugggaaagaguggaccuauauuggaguggacggucccgauaacaaugcacugcuuaagguuaaauacggcgaggccuacacagacacuuaucacagcuacgcuaacaagauccugaggacccaggagucugccuguaauugcauugggggaaacuguuauuugaugaucacagauggcuccgcaucaggugugagcgaaugccgguuucucaaaauacgcgaggggagaauuaucaaggagauuuucccuaccggaagggucaagcacacggaagaguguacuugcggcuuugcuaguaaucggacaaucgaaugugccugccgcgacaacucuuacaccgcgaaacgaccauucgugaagcugaauguagagacugauacagccgaaaucagauuaaugugcaccgacacguaucuggauacccccaggccuaacgacggcuccauuacagggccaugugagagcgauggagacaaagguucgggcgggauaaagggaggcuuuguucaucaacggauggagucuaaaaucggucguugguacucccgcacuaugucaaagaccgaaagaauggggaugggccucuaugugaaauacgacggagaucccugggcagacagugaugcucuugccuucagcggcgucaugguguccaugaaggagccggggugguacucuuuuggauucgaaauuaaggacaaaaagugcgaugugccuuguaucgguauagagaugguccacgacggcgggaaagaaacauggcauagcgcugccacugcaauuuauugccugaugggaucaggccaguugcuaugggauaccguuacagguguggacauggcccuguga

SEQ ID NO: 156948 - RNA, 1401 nt, Artificial Sequence
  derived and/or modified CDS sequence (opt3) from neuraminidase__InfluenzaB__AEQ49695
augcugcccagcaccauccagacacucacucuuuuccugacguccggcgggguguuguuaucucuguacgucucagccagucuaagcuaucuccuguacuccgacauucuucugaaguuuucuccuaccgagauaacagcuccaacuaugccguuggauugcgcaaacgccucgaauguucaagcggugaacagaucagcuaccaaaggaguaacacuccugcugcccgaaccugaguggaccuauccaaggcucagcugucccgguaguacuuuccagaaggccuuacugaucuccccucaccgguuuggcgaaacaaaaggaaauucugcaccacuuauuauccgcgagcccuucauugccugcgggccuaacgaauguaagcauuuugcuuugacccacuacgcagcccagccaggcgguuauuacaaugggacgcgaggagaccguaacaaacugagacaucuaaucagcgugaagcucggcaagauaccgacugucgaaaauuccaucuuccacauggcugccuggucaggcagugcgugccaugaugggaaagaguggaccuauauuggaguggacggucccgauaacaaugcacugcuuaagguuaaauacggcgaggccuacacagacacuuaucacagcuacgcuaacaagauccugaggacccaggagucugccuguaauugcauugggggaaacuguuauuugaugaucacagauggcuccgcaucaggugugagcgaaugccgguuucucaaaauacgcgaggggagaauuaucaaggagauuuucccuaccggaagggucaagcacacggaagaguguacuugcggcuuugcuaguaauaaaacaaucgaaugugccugccgggacaacucuuacaccgcgaagcgcccauucgugaaacugaauguagagacugauacagccgaaauccgauuaaugugcaccgacacguaucuggauacccccagaccuaacgacggcuccauuacagggccaugugagagcgauggagacaaggguucgggcgggauaaaaggaggcuuuguucaucaaaggauggagucuaagaucggucggugguacucccguacuaugucaaaaaccgaacgcauggggaugggccucuaugugaaguacgacggagaucccugggcagacagugaugcucuugccuucagcggcgucaugguguccaugaaggagccggggugguacucuuuuggauucgaaauuaaagacaagaaaugcgaugugccuuguaucgguauagagaugguccacgacggcgggaaggaaacauggcauagcgcugccacugcaauuuauugccugaugggaucaggccaguugcuaugggauaccguuacagguguggacauggcccuguga

SEQ ID NO: 156949 - RNA, 1401 nt, Artificial Sequence
  derived and/or modified CDS sequence (opt3) from neuraminidase__InfluenzaB__AEQ49697
augcugcccagcaccauccagacacucacucuuuuccugacguccggcgggguguuguuaucucuguacgucucagccagucuaagcuaucuccuguacuccgacauucuucugaaguuuucuccuaccgagauaacagcuccaacuaugucguuggauugcgcaaacgccucaaauguucaagcggugaacagaagcgcuaccaaaggaguaacauuccuccugccggaacccgaguggaccuauccuaggcugaguuguccagguuccacuuuucagaaggcccucuuaaucucuccccaccgguucggcgaaacaaaagggaauagcgcaccucugauuauccgcgagccauuuauugccugcggacccaacgaauguaagcauuucgcucuuacccacuacgcagcccagccuggcgguuauuacaaugggacgcgaggagaccguaacaaauugagacaucugaucuccgugaagcuaggcaagauaccaacugucgaaaauucaaucuuucacauggcugccuggaguggcagcgcgugccaugaugggaaagaguggaccuauauuggaguggacgguccggauaacgacgcacuccugaagguuaaauacggcgaggccuacacagauacuuaucacucuuacgcuaauaagauccuuaggacccaggaguccgccuguaacugcauugggggaaauuguuaucugaugaucacagacggcucagcaagcggugugagugaaugccgguucuugaaaauacgcgaggggagaauuaucaaggagauuuuucccaccggaagggucaagcacacggaagaguguacuugcggcuucgcuucuaacaaaacaaucgaaugugccugccgggauaauuccuacaccgcgaagcgcccuuuugugaaacucaacguagagacugacacagccgaaauccgacugaugugcaccgauacguauuuagacaccccaagacccgaugacggcagcauuacagggccuugugagucgaauggagacaaggguucuggcgggauaaaaggaggcuucguucaucaaaggauggaguccaagaucggucggugguacucacguacuaugaguaaaaccgaacgcauggggaugggccuguaugugaaguacgauggagacccaugggcagauagcgacgcucucgccuuuuccggcgucauggugucuaugaaggagcccgggugguacagcuucggauucgaaauuaaagauaagaaaugcgacgugccguguaucgguauagagaugguccacgauggcgggaaggaaacauggcauucagcugccacugcaauuuauugccuuaugggaaguggccagcuguugugggacaccguuacagguguggauauggcccuauga

SEQ ID NO: 156950 - RNA, 1401 nt, Artificial Sequence; identical to SEQ ID NO: 156949
  derived and/or modified CDS sequence (opt3) from neuraminidase__InfluenzaB__AEQ49698

SEQ ID NO: 156951 - RNA, 1401 nt, Artificial Sequence; identical to SEQ ID NO: 156949
  derived and/or modified CDS sequence (opt3) from neuraminidase__InfluenzaB__AEQ49699

SEQ ID NO: 156952 - RNA, 1401 nt, Artificial Sequence; identical to SEQ ID NO: 156949
  derived and/or modified CDS sequence (opt3) from neuraminidase__InfluenzaB__AEQ49700

SEQ ID NO: 156953 - RNA, 1401 nt, Artificial Sequence; identical to SEQ ID NO: 156946
  derived and/or modified CDS sequence (opt3) from neuraminidase__InfluenzaB__AEQ49701

SEQ ID NO: 156954 - RNA, 1401 nt, Artificial Sequence; identical to SEQ ID NO: 156949
  derived and/or modified CDS sequence (opt3) from neuraminidase__InfluenzaB__AEQ49702

SEQ ID NO: 156955 - RNA, 1401 nt, Artificial Sequence; identical to SEQ ID NO: 156946
  derived and/or modified CDS sequence (opt3) from neuraminidase__InfluenzaB__AEQ49703

SEQ ID NO: 156956 - RNA, 1401 nt, Artificial Sequence; identical to SEQ ID NO: 156949
  derived and/or modified CDS sequence (opt3) from neuraminidase__InfluenzaB__AEQ49705

SEQ ID NO: 156957 - RNA, 1401 nt, Artificial Sequence
  derived and/or modified CDS sequence (opt3) from neuraminidase__InfluenzaB__AEQ49706
augcugcccagcaccauccagaugcucacacuuuuccugacuuugggcgggguguuacugucccuauacgucucugccucacucaguuaucugcuuuaccuggacauuuugcucaaguuuccuccaacggagauaaccgcuccgacaaugccccuggauugcgcaaacgccagcaauguucaagcggugaacagauccgcuacuaaaggaguaaccuuccugcucccugaaccagaguggacauaucccagguuaucuuguccugguucgaccuuucagaaggcccugcuuaucucaccacaccgguucggcgaaacuaaagggaauagcgcacccuugauuauccgcgagccuuuuauugccugcggaccaaaggaauguaaacauuucgcucugacacacuacgcagcccagccgggcgguuauuacaacgggacccgaggagaccguaauaagcuaagacaucucaucagugugaagcugggcaaaauacccacggucgagaacuccaucuuucacauggcugccuggucuggcagcgcgugccaugaugggaaggaguggacuuauauuggaguggacgguccugauaauaacgcacuucugaaaaucaaguacggcgaagccuucaccgacacauaccacuccuaugcuaauaacauuuugaggacucaggagucagccuguaauugcaucgggggaaacuguuaccucaugauaaccgauggcagugcaagcgguguuucugaaugccgguuucugaaaauucgcgaggggagaaucauuaaggagaucuucccaacaggaagggugaagcacaccgaagaguguacgugcggcuuugcuuccaauaaaacuaucgaaugugccugccgggacaacucauauacagcgaagcgccccuucgucaaauuaaauguggagaccgauacugccgaaauucgacugaugugcacagacaccuaccucgauacgccuagaccagacgauggcagcauaaccgggcccugugagaguaacggagacaaggguucuggcgggaucaaaggaggcuuuguacaucaaaggauggcauccaagauuggucggugguauagccguacaaugucgaaaacugagcgcauggggaugggccuuuacguuaaguaugacggagauccgugggcugacucugaugcccuggcuuucuccggcgugauggucucaaugaaggaaccugggugguacaguuucggauuugagaucaaagacaagaaaugcgaugugcccuguauagguauugaaauggugcacgacggcgggaaggagaccuggcauagcgccgcaacagccaucuacugcuugaugggauccggccagcuacugugggauacugucaccgguguuaacauggcucucuga

SEQ ID NO: 156958 - RNA, 1401 nt, Artificial Sequence; identical to SEQ ID NO: 156949
  derived and/or modified CDS sequence (opt3) from neuraminidase__InfluenzaB__AEQ49707

SEQ ID NO: 156959 - RNA, 1401 nt, Artificial Sequence; identical to SEQ ID NO: 156949
  derived and/or modified CDS sequence (opt3) from neuraminidase__InfluenzaB__AEQ49708

SEQ ID NO: 156960 - RNA, 1401 nt, Artificial Sequence
  derived and/or modified CDS sequence (opt3) from neuraminidase__InfluenzaB__AEQ49709
augcugcccagcaccauccagacacucacucuuuuccugacguccggcgggguguuguuaucucuguacgucucagcccuacucaguuaucugcuuuacagcgacauucuguugaaguuuuccccuaccgagauaacagcuccaacuaugucucucgauugcgcaaacgccucgaauguucaagcggugaacagaucagcuaccaaaggaguaacauuccugcugccggaacccgaguggaccuauccuaggcucagcuguccagguaguacuuuucagaaggccuuacugaucucuccccaccgguucggcgaaacaaaaggaaauuccgcaccucuuauuauccgcgagccauuuauugccugcgggcccaacgaauguaagcauuucgcuuugacccacuacgcagcccagccuggcgguuauuacaaugggacgcgaggagaccguaacaaacugagacaucuaaucagcgugaagcucggcaagauaccaacugucgaaaauuccaucuuucacauggcugccuggucaggcagugcgugccaugaugggaaagaguggaccuauauuggaguggacgguccggauaacgacgcacugcuuaagguuaaauacggcgaggccuacacagauacuuaucacagcuacgcuaauaagauccugaggacccaggagucugccuguaacugcauugggggaaauuguuauuugaugaucacagacggcuccgcaucaggugugagcgaaugccgguuccucaaaauacgcgaggggagaauuaucaaggagauuuuucccaccggaagggucaagcacacggaagaguguacuugcggcuucgcuaguaacaaaacaaucgaaugugccugccgggauaauucuuacaccgcgaagcgcccuuuugugaaacugaacguagagacugacacagccgaaauccgauuaaugugcaccgauacguaucuggacaccccaagacccgaugacggcuccauuacagggccuugugagagcaauggagacaaggguucgggcgggauaaaaggaggcuucguucaucaaaggauggagucuaagaucggucggugguacucccguacuaugucaaaaaccgaacgcauggggaugggccucuaugugaaguacgauggagacccaugggcagauagugacgcucuugccuuuagcggcgucaugguguccaugaaggagcccgggugguacucuuucggauucgaaauuaaagauaagaaaugcgacgugccguguaucgguauagagaugguccacgauggcgggaaggaaacauggcauagcgcugccacugcaauuuauugccugaugggaucaggccacuugcuaugggacaccguuacagguguggauauggcccuguga

SEQ ID NO: 156961 - RNA, 1401 nt, Artificial Sequence; identical to SEQ ID NO: 156923
  derived and/or modified CDS sequence (opt3) from neuraminidase__InfluenzaB__AEQ49710

SEQ ID NO: 156962 - RNA, 1401 nt, Artificial Sequence; identical to SEQ ID NO: 156920
  derived and/or modified CDS sequence (opt3) from neuraminidase__InfluenzaB__AER27042

SEQ ID NO: 156963 - RNA, 1401 nt, Artificial Sequence; identical to SEQ ID NO: 156948
  derived and/or modified CDS sequence (opt3) from neuraminidase__InfluenzaB__AER27053

SEQ ID NO: 156964 - RNA, 1401 nt, Artificial Sequence; identical to SEQ ID NO: 156920
  derived and/or modified CDS sequence (opt3) from neuraminidase__InfluenzaB__AER27064

SEQ ID NO: 156965 - RNA, 1401 nt, Artificial Sequence; identical to SEQ ID NO: 156923
  derived and/or modified CDS sequence (opt3) from neuraminidase__InfluenzaB__AET43128

SEQ ID NO: 156966 - RNA, 1401 nt, Artificial Sequence; identical to SEQ ID NO: 156923
  derived and/or modified CDS sequence (opt3) from neuraminidase__InfluenzaB__AET43139

SEQ ID NO: 156967 - RNA, 1401 nt, Artificial Sequence
  derived and/or modified CDS sequence (opt3) from neuraminidase__InfluenzaB__AET43150
augcugcccagcaccauccagacacucacucuuuuccugacguccggcgggguguuguuaucucuguacgucucagccagucuaagcuaucuccuguacuccgacauucuucugaaguuuucuccuaaagagauaaccgcuccaacaaugccguuggauugcgcaaacgccucgaauguucaagcggugaaccacucagcuacuaagggaguaacccuccugcugcccgaaccugaguggacauauccaagacucagcugucccgguaguaccuuccagaaagccuuacugaucuccccucauagguuuggcgaaacuaagggaaauucugcaccacuuauuauccgggagcccuucauugccugcgggccuaacgaauguaaacacuuugcuuugacacauuacgcagcccagccaggcgguuauuacaaugggacccgcggagaccgaaacaagcugcgucaccuaaucagcgugaagcucggcaaaauaccgacggucgaaaauuccaucuuccauauggcugccuggucaggcagugcgugccacgaugggaaggaguggacuuauauuggaguggacggucccgauaacaaugcacugcuuaaaguuaaguacggcgaggccuacaccgacacauaucacagcuacgcuaacaaaauccugagaacucaggagucugccuguaauugcauugggggaaacuguuauuugaugaucaccgauggcuccgcaucaggugugagcgaaugcagguuucucaagauacgggaggggcgcauuaucaaggagauuuucccuacaggaagagucaaacauaccgaagaguguacgugcggcuuugcuaguaauaagacuaucgaaugugccugcagggacaacucuuacacagcgaaacggccauucgugaagcugaauguagagaccgauacugccgaaauccgcuuaaugugcacagacaccuaucuggauacgccccgaccugacgauggcuccauuaccgggccaugugagagcaacggagacaaagguucgggcgggauaaagggaggcuuuguucaccaaagaauggagucuaaaaucgguaggugguacucccggacaaugucaaagacugaacguauggggaugggccucuaugugaaguacgacggagaucccugggcagacagugaugcucuuaccuucagcggcgucaugguguccaugaaagagccggggugguacucuuuuggauucgaaauuaaggacaaaaagugcgaugugccuuguaucgguauagagaugguccaugacggcgggaaagaaacauggcacagcgccgcuacugccauuuauugccugaugggaucaggccaguugcuaugggauaccguuacagguguggacauggcacuguga

SEQ ID NO: 156968 - RNA, 1401 nt, Artificial Sequence; identical to SEQ ID NO: 156923
  derived and/or modified CDS sequence (opt3) from neuraminidase__InfluenzaB__AET43161

SEQ ID NO: 156969 - RNA, 1401 nt, Artificial Sequence; identical to SEQ ID NO: 156923
  derived and/or modified CDS sequence (opt3) from neuraminidase__InfluenzaB__AET43172

SEQ ID NO: 156970 - RNA, 1401 nt, Artificial Sequence; identical to SEQ ID NO: 156923
  derived and/or modified CDS sequence (opt3) from neuraminidase__InfluenzaB__AET43183

SEQ ID NO: 156971 - RNA, 1401 nt, Artificial Sequence; identical to SEQ ID NO: 156923
  derived and/or modified CDS sequence (opt3) from neuraminidase__InfluenzaB__AET43194

SEQ ID NO: 156972 - RNA, 1401 nt, Artificial Sequence; identical to SEQ ID NO: 156923
  derived and/or modified CDS sequence (opt3) from neuraminidase__InfluenzaB__AET43216

SEQ ID NO: 156973 - RNA, 1401 nt, Artificial Sequence; identical to SEQ ID NO: 156923
  derived and/or modified CDS sequence (opt3) from neuraminidase__InfluenzaB__AET43227

SEQ ID NO: 156974 - RNA, 1401 nt, Artificial Sequence
  derived and/or modified CDS sequence (opt3) from neuraminidase__InfluenzaB__AET50947
augcugcccagcaccauccagacacucacucuuuuccugacguccggcgggguguuguuaucucuguacgucucagccagucuaagcuaucuccuguacuccgacauucuucugaaguuuucuccuaaagagauaaccgcuccaacaaugccguuggauugcgcaaacgccucgaauguucaagcggugaaccacucagcuacuaagggaguaacccuccugcugcccgaaccugaguggacauauccaagacucagcugucccgguaguaccuuccagaaagccuuacugaucuccccucauagguuuggcgaaacuaagggaaauucugcaccacuuauuauccgggagcccuucauugccugcgggccuaacgaauguaaacacuuugcuuugacacauuacgcagcccagccaggcgguuauuacaaugggacccgcggagaccgaaacaagcugcgucaccuaaucagcgugaagcucggcaaaauaccgacggucgaaaauuccaucuuccauauggcugccuggucaggcagugcgugccacgaugggaaggaguggacuuauauuggaguggacggucccgauaacaaugcacugcuuaaaguuaaguacggcgaggccuacaccgacacauaucacagcuacgcuaacaaaauccugagaacucaggagucugccuguaauugcauugggggaaacuguuauuugaugaucaccgauggcuccgcaucaggugugagcgaaugcagguuucucaagauacgggaggggcgcauuaucaaggagauuuucccuacaggaagagucaaacauaccgaagaguguacgugcggcuuugcuaguaauaagacuaucgaaugugccugcagggacaacucuuacacagcgaaacggccauucgugaagcugaauguagagaccgauacugccgaaauccgcuuaaugugcacagacaccuaucuggauacgccccgaccugacgauggcuccauuaccgggccaugugagagcaacggagacaaagguucgggcgggauaaagggaggcuuuguucaccaaagaauggagucuaaaaucgguaggugguacucccggacaaugucaaagacugaacguauggggaugggccucuaugugaaguacgacggagaucccugggcagacagugaugcucuugccuucagcggcgucaugauuuccaugaaagagccggggugguacucuuuuggauucgaaaucaaggacaaaaagugcgaugugccuuguauagguauugagauggugcaugacggcgggaaagaaaccuggcacagcgcugccacagcaaucuauugccugaugggaucaggccaguugcuaugggauacugucaccgguguugacauggcccuguga

SEQ ID NO: 156975 - RNA, 1401 nt, Artificial Sequence
  derived and/or modified CDS sequence (opt3) from neuraminidase__InfluenzaB__AET50958
augcugcccagcaccauccagacacucacucuuuuccugacguccggcgggguguuguuaucucuguacgucucagccagucuaagcuaucuccuguacuccgacauucuucugaaguuuucuccuaaagagauaaccgcuccaacaaugccguuggauugcgcaaacgccucgaauguucaagcggugaaccacucagcuacuaagggaguaacccuccugcugcccgaacucgaguggacauauccuagauuaagcuguccagguaguaccuuccagaaagcccugcuuaucucuccccauagguuuggcgaaacuaagggaaauuccgcaccuuugauuauccgggagccauucauugccugcgggcccaacgaauguaaacacuuugcucugacacauuacgcagcccagccuggcgguuauuacaaugggacccgcggagaccgaaacaagcuacgucaccucaucagcgugaagcugggcaaaauaccaacggucgaaaauuccaucuuccauauggcugccuggucaggcagugcgugccacgaugggaaggaguggacuuauauuggaguggacgguccggauaacaaugcacuucugaaaguuaaguacggcgaggccuacaccgacacauaucacagcuacgcuaacaaaaucuugagaacucaggagucugccuguaauugcauugggggaaacuguuaucucaugaucaccgauggcuccgcaucaggugugagcgaaugcagguuucugaagauacgggaggggcgcauuaucaaggagauuuuccccacaggaagagucaaacauaccgaagaguguacgugcggcuuugcuaguaauaagacuaucgaaugugccugcagggacaacucuuacacagcgaaacggccuuucgugaaguuaaauguagagaccgauacugccgaaauccgccugaugugcacagacaccuaucucgauacgccacgacccgacgauggcuccauuaccgggccuugugagagcaacggagacaaagguucgggcgggauaaagggaggcuuuguucaccaaagaauggagucuaaaaucgguaggugguacucccggacaaugucaaagacugaacguauggggaugggccuuuaugugaaguacgacggagauccaugggcagacagugaugcucuggccuucagcggcgucaugguguccaugaaagagcccgggugguacucuuuuggauucgaaauuaaggacaaaaagugcgaugugccguguaucgguauagagaugguccaugacggcgggaaagaaaccuggcacagcgcugccacagcaauuuauugcuugaugggaucaggccagcuacugugggauacuguuaccgguguggacauggcccucuga

SEQ ID NO: 156976 - RNA, 1401 nt, Artificial Sequence; identical to SEQ ID NO: 156923
  derived and/or modified CDS sequence (opt3) from neuraminidase__InfluenzaB__AET50969

SEQ ID NO: 156977 - RNA, 1401 nt, Artificial Sequence; identical to SEQ ID NO: 156923
  derived and/or modified CDS sequence (opt3) from neuraminidase__InfluenzaB__AET50980

SEQ ID NO: 156978 - RNA, 1401 nt, Artificial Sequence; identical to SEQ ID NO: 156923
  derived and/or modified CDS sequence (opt3) from neuraminidase__InfluenzaB__AET74259

SEQ ID NO: 156979 - RNA, 1401 nt, Artificial Sequence; identical to SEQ ID NO: 156923
  derived and/or modified CDS sequence (opt3) from neuraminidase__InfluenzaB__AET74270

SEQ ID NO: 156980 - RNA, 1401 nt, Artificial Sequence; identical to SEQ ID NO: 156974
  derived and/or modified CDS sequence (opt3) from neuraminidase__InfluenzaB__AET74281

SEQ ID NO: 156981 - RNA, 1401 nt, Artificial Sequence; identical to SEQ ID NO: 156923
  derived and/or modified CDS sequence (opt3) from neuraminidase__InfluenzaB__AET74292

SEQ ID NO: 156982 - RNA, 1401 nt, Artificial Sequence; identical to SEQ ID NO: 156923
  derived and/or modified CDS sequence (opt3) from neuraminidase__InfluenzaB__AET74303

SEQ ID NO: 156983 - RNA, 1401 nt, Artificial Sequence; identical to SEQ ID NO: 156923
  derived and/or modified CDS sequence (opt3) from neuraminidase__InfluenzaB__AET74314

SEQ ID NO: 156984 - RNA, 1401 nt, Artificial Sequence; identical to SEQ ID NO: 156923
  derived and/or modified CDS sequence (opt3) from neuraminidase__InfluenzaB__AET74333

SEQ ID NO: 156985 - RNA, 1401 nt, Artificial Sequence
  derived and/or modified CDS sequence (opt3) from neuraminidase__InfluenzaB__AET74344
augcugcccagcaccauccagacacucacucuuuuccugacguccggcgggguguuguuaucucuguacgucucagccagucuaagcuaucuccuguacuccgacauucuucugaaguuuucuccuaaagagauaaccgcuccaacaaugccguuggauugcgcaaacgccucgaauguucaagcggugaaccacucagcuacuaagggaguaacccuccugcugcccgaaccugaguggacauauccaagacucagcugucccgguaguaccuuccagaaagccuuacugaucuccccucauagguuuggcgaaacuaagggaaauucugcaccacuuauuauccgggagcccuucauugccugcgggccuaacgaauguaaacacuuugcuuugacacauuacgcagcccagccaggcgguuauuacaaugggacccgcggagaccgaaacaagcugcgucaccuaaucagcgugaagcucggcaaaauaccgacggucgaaaauuccaucuuccauauggcugccuggucaggcagugcgugccacgaugggaaggaguggacuuauauuggaguggacggucccgauaacaaugcacugcuuaaaguuaaguacggcgaggccuacaccgacacauaucacagcuacgcuaacaaaauccugagaacucaggagucugccuguaauugcauugggggaaacuguuauuugaugaucaccgauggcuccgcaucaggugugagcgaaugcagguuucucaagauacgggaggggcgcauuaucaaggagauuuucccuacaggaagagucaaacauaccgaagaguguacgugcggcuuugcuaguaauaagacuaucgaaugugccugcagggacaacucuuacacagcgaaacggccauucgugaagcugaauguagaggccgauaccgcagaaauccgcuuaaugugcacugacacauaucuggauacgccccgaccugacgauggcuccauuaccgggccaugugagagcaacggagacaaagguucgggcgggauaaagggaggcuuuguucaccaaagaauggagucuaaaaucgguaggugguacucccggaccaugucaaagacagaacguauggggaugggccucuaugugaaguacgacggagaucccugggcugacagugaugcccuugcuuucagcggcgucaugguguccaugaaagagccggggugguacucuuuuggauucgaaauuaaggacaaaaagugcgaugugccuuguaucgguauagagaugguccaugacggcgggaaagaaacuuggcacagcgccgcaaccgccauuuauugccugaugggaucaggccaguugcuaugggauacaguuacugguguggacauggcucuguga

SEQ ID NO: 156986 - RNA, 1401 nt, Artificial Sequence; identical to SEQ ID NO: 156923
  derived and/or modified CDS sequence (opt3) from neuraminidase__InfluenzaB__AET74355

SEQ ID NO: 156987 - RNA, 1404 nt, Artificial Sequence
  derived and/or modified CDS sequence (opt3) from neuraminidase__InfluenzaB__AEY75594
augcugcccagcaccauccagaugcucacacuuuuccugacuuccggcgggguguuguuaucucuguacgucucagccagucuaagcuaucuccuguacuccgacauucuucugaaguuuucuccuacggagauaaccgcuccaacaaugccguuggauugcgcaaacgccucgaauguucacgcggugaacagaucagcuacuaaaggaguaaccuuccuccugcugcccgaaccugaguggacauauccaaggcucagcugucccgguaguaccuuucaaaaggccuuacugaucuccccucaucgguucggcgaaacuaaaggaaauucugcaccacuuauuauccgcgagcccuuuauugccugcgggccuaacgaauguaagcacuucgcuuugacacauuacgcagcccagccaggcgguuauuacaaugggacccgaggagaccguaacaaacugagacaccuaaucagcgugaagcucggcaagauaccgacggucgaaaauuccaucuuucauauggcugccuggucaggcagugcgugccacgaugggaaagaguggacuuauauuggaguggacggucccgauaacaaugcacugcuuaagaucaaauacggcgaggccuacaccgacacauaucacagcuacgcuaacaauauucugaggacucaggagucugccuguaacugcaucgggggaaauuguuauuugaugauaaccgauggcuccgcaucagguguuagcgaaugccgguuccucaagauucgcgaggggagaaucauuaaagagaucuuuccuacaggaagggugaagcauaccgaagaguguacgugcggcuucgcuaguaacaagacuaucgaaugugccugccgggacaauucuuacacagcgaaacgcccauuugucaagcugaacguggagaccgauacugccgaaauucgauuaaugugcacagacaccuaucuggauacgcccagaccugacgauggcuccauaaccgggccaugugagagcaacggagacaaagguucgggcgggacaaagggaggcuucguacaccagaggauggcaucuaaaaucggucggugguacucccguacuaugucaaagaccgagcgcaaagggaugggccucuauguuaaguacgacggagaucccuggacagacagugaugcucuugccuuuagaggcgugauggucagcaugaaggaaccggggugguacuccuucggauucgagauuaaagacaagaaaugcgaugugccuuguaucgguauagaaauggugcaugacggcgggaaggagacuuggcacucugcugccaccgcaauuuauugccugaugggaagcggccaauugcuaugggauacagucaccgguguugacauggcccuguga

SEQ ID NO: 156988 - RNA, 1401 nt, Artificial Sequence
  derived and/or modified CDS sequence (opt3) from neuraminidase__InfluenzaB__AFA45223
augcugcccagcaccauccagacacucacucuuuuccugacguccggcgggguguuguuaucucuguacgucucagcccuacucaguuaucugcuuuacagcgacauucugccuaaguuuuccccaaccgagauaacagcuccgacuaugucuuuggauugcgcaaacgccucgaauguucaagcggugaacagaucagcuaccaaaggaguaacauuccuccugagcgaacccgaguggaccuauccuaggcugaguuguccagguuccacuuuucagaaggcccucuuaaucucuccccaccgguucggcgaaacaaaagggaauagcgcaccucugauuauccgcgagccauuuauugccugcggacccaacgaauguaagcauuucgcucuuacccacuacgcagcccagccuggcgguuauuacaaugggacgcgaggagaccguaacaaauugagacaucugaucuccgugaagcuaggcaagauaccaacugucgaaaauucaaucuuucacauggcugccuggaguggcagcgcgugccaugaugggaaagaguggaccuauauuggaguggacgguccggauaacgacgcacuccugaagguuaaauacggcgaggccuacacagauacuuaucacucuuacgcuaauaagauccuuaggacccaggaguccgccuguaacugcauugggggaaauuguuaucugaugaucacagacggcucagcaagcggugugagugaaugccgguucuugaaaauacgcgaggggagaauuaucaaggagauuuuucccaccggaagggucaagcacacggaagaguguacuugcggcuucgcuucuaacaaaacaaucgaaugugccugccgggauaauuccuacaccgcgaagcgcccuuuugugaaacucaacguagagacugacacagccgaaauccgacugaugugcaccgauacguauuuagacaccccaagacccgaugacggcagcauuacagggccuugugagucgaauggagacaaggguucuggcgggauaaaaggaggcuucguucaucaaaggauggaguccaagaucggucggugguacucacguacuaugaguaaaaccgaacgcauggggaugggccuguaugugaaguacgauggagacccaugggcagauagcgacgcucucgccuuuuccggcgucauggugucuaugaaggagcccgggugguacagcuucggauucgaaauuaaagauaagaaaugcgacgugccguguaucgguauagagaugguccacgauggcgggaaggaaacauggcauucagcugccacugcaauuuauugccuuaugggaaguggccagcuguugugggacaccguuacagguguggauauggcccuauga

SEQ ID NO: 156989 - RNA, 1401 nt, Artificial Sequence
  derived and/or modified CDS sequence (opt3) from neuraminidase__InfluenzaB__AFA45226
augcugcccagcaccauccagacacucacucuuuuccugacguccggcgggguguuguuaucucuguacgucucagccagucuaagcuaucuccuguacuccgacauucuucugaaguuuucuccuaccgagacaacugcuccaaccaugucguuggauugcgcaaacgccucaaauguucaagcggugaacagaagcgcuacaaaaggaguaaccuuccuccugccggaacccgaguggacuuauccuaggcugaguuguccagguuccacauuucagaaggcccucuuaauaucuccccaccgguucggcgaaaccaaagggaauagcgcaccucugaucauucgcgagccauuuaucgccugcggacccaacgaauguaagcauuucgcucuuacgcacuacgcagcccagccuggcgguuauuacaaugggacucgaggagaccguaacaaauugagacaucugauuuccgugaagcuaggcaaggucccaaccguggaaaauucaaucuuucacauggcugccuggaguggcagcgcgugccaugaugggaaagaguggacauauauaggaguugacgguccggauaacgacgcacuccugaaggugaaauacggcgaggccuacacugauaccuaucacucuuacgcuaauaagauccuuaggacacaggaguccgccuguaacugcauugggggaaauuguuaucugaugaucaccgacggcucagcaagcggugucagugaaugccgguucuugaaaauucgcgaggggagaaucauaaaggagauuuuucccacgggaagggugaagcacacugaagaguguacaugcggcuucgcuucuaacaaaaccaucgaaugugccugccgggauaauuccuacacugcgaagcgcccuuuuguaaaacucaacguugagacagacaccgccgaaauucgacugaugugcacggauaccuauuuagacacaccaagacccgaugacggcagcaucacugggccuugugagucgaauggagacaaggguucuggcgggaucaaaggaggcuucgugcaucaaaggauggaguccaagauuggucggugguacucacguaccaugaguaaaacagaacgcauggggaugggccuguaugucaaguacgauggagacccaugggcagauagcgacgcucucgccuuuuccggcgugauggugucuaugaaggagcccgggugguacagcuucggauucgaaauaaaagauaagaaaugcgacgucccguguaucgguauugagaugguucacgauggcgggaagggaacuuggcauucagcugccaccgcaaucuauugccuuaugggcaguggucagcuguugugggacacagugaccgggguagauauggcccuauga

SEQ ID NO: 156990 - RNA, 1401 nt, Artificial Sequence
  derived and/or modified CDS sequence (opt3) from neuraminidase__InfluenzaB__AFA45229
augcugcccagcaccauccagacacucacucuuuuccugacguccggcgggguguuguuaucucuguacgucucagcccuacucaguuaucugcuuuacagcgacauucuguugaaguuuuccccuaccgagauaacagcuccaacuaugccgcucgauugcgcaaacgccucuaauguucaagcggugaacagaucggcuaccaaaggaguaacauuccugcugcccgaaccugaguggaccuauccaaggcucucaugucccgguagcacuuuucagaaggccuuacugaucaguccucaccgguucggcgaaacaaaaggaaauuccgcaccacuuauuauccgcgagcccuuuauugccugcgggccuaacgaauguaagcauuucgcuuugacccacuacgcagcccagccaggcgguuauuacaaugggacgcgaggagaccguaacaaacugagacaucuaaucucugugaagcucggcaagauaccgacugucgagaauagcaucuuucacauggcugccugguccggcucagcgugccaugaugggaaagaguggaccuauauuggaguggacggucccgauaacgacgcacugcuuaagguuaaauacggcgaagccuacacagauacuuaucacaguuacgcuaauaagauccugaggacccaggagagcgccuguaacugcauugggggaaauuguuauuugaugaucacagacggcucugcauccggugugucagaaugccgguuccucaaaauacgcgaggggagaauuaucaaggagauuuuuccuaccggaagggucaagcacacggaagaguguacuugcggcuucgcuagcaacaaaacaaucgaaugugccugccgggauaauaguuacaccgcgaagcgcccauuugugaaacugaacguagagacugacacagccgaaauccgauuaaugugcaccgauacguaucuggacacccccagaccugaugacggcucuauuacagggccaugugaguccaauggagacaaggguagcggcgggauaaaaggaggcuucguucaucaaaggauggagucgaagaucggucggugguacucucguacuauguccaaaaccgaacgcauggggaugggccucuaugugaaguacgauggagaccccugggcagauucagacgcucuugccuuuaguggcgucauggugagcaugaaggagccggggugguacuccuucggauucgaaauuaaagauaagaaaugcgacgugccuuguaucgguauagagaugguccacgauggcgggaaggaaacauggcauucugcugccacugcaauuuauugccugaugggaagcggccaguugcuaugggacaccguuacagguguggauauggcccuguga

SEQ ID NO: 156991 - RNA, 1401 nt, Artificial Sequence; identical to SEQ ID NO: 156943
  derived and/or modified CDS sequence (opt3) from neuraminidase__InfluenzaB__AFA45235

SEQ ID NO: 156992 - RNA, 1401 nt, Artificial Sequence
  derived and/or modified CDS sequence (opt3) from neuraminidase__InfluenzaB__AFA45238
augcugcccagcaccauccagacacucacucuuuuccugacguccggcgggguguuguuaucucuguacgucucagccagucuaagcuaucuccuguacuccgacauucuucugaaguuuucuccuaccaaaacaacugcuccaaccaugucguuggauugcgcaaacgccucaaauguucaagcggugaacagaagcgcuacaaagggaguaaccuuccuccugccggagcccgaauggacuuauccuaggcugaguuguccagguuccacauuucagaaagcccucuuaauaucuccccaccgguucggcgagaccaaggggaauagcgcaccucugaucauucgcgaaccauuuaucgccugcggacccaacgaguguaaacauuucgcucuuacgcacuacgcagcccagccuggcgguuauuacaaugggacucgaggagaccguaacaaguugagacaucugauuuccgugaagcuaggcaaaaucccaaccgucgaaaauucaauauuucacauggcugccuggaguggcagcgcgugccaugaugggaaggaguggacauauaucggaguggacgguccggauaacgacgcacuccugaaaguuaaguacggcgaggccuacacugauaccuaucacucuuacgcuaauaaaauucuuaggacacaggaauccgccuguaacugcaucgggggaaauuguuaucugaugauuaccgacggcucagcaagcggugugagugagugccgguucuugaagauccgcgaagggagaauaauuaaggagaucuuucccacgggaagggucaaacacacugaggaauguacaugcggcuucgcuucuaacaagaccauugagugugccugccgggauaauuccuacacugcgaaacgcccuuuugugaagcucaacguagaaacagacaccgccgagauccgacugaugugcacggauaccuauuuagacacaccaagacccgaugacggcagcaucacugggccuugugaaucgaauggagacaaagguucuggcgggauuaagggaggcuucguucaucaaaggauggaguccaaaauaggucggugguacucacguaccaugaguaagacagagcgcauggggaugggccuguaugugaaguacgauggagacccaugggcagauagcgacgcucucgccuuuuccggcgucauggugucuaugaaagaacccgggugguacagcuucggauucgagaucaaggauaaaaagugcgacgugccguguauugguaucgaaaugguccacgauggcgggaaagagacuuggcauucagcugccaccgcaauauauugccuuaugggaaguggccagcuguugugggacacaguuaccgguguggauauggcccuauga

SEQ ID NO: 156993 - RNA, 1401 nt, Artificial Sequence
  derived and/or modified CDS sequence (opt3) from neuraminidase__InfluenzaB__AFA45241
augcugcccagcaccauccagacacucacucuuuuccugacguccggcgggguguuguuaucucuguacgucucagccagucuaagcuaucuccuguacuccgacauucuucugaaguuuucuccuaccgagauaacagcuccaacuaugccguuggauugcgcaaacgccucgaauguucaagcggugaacagaucagcuaccaaaggaguaaucuuccuccugcccgaaccugaguggacauauccaaggcugagcugucccgguaguaccuuucagaaggcccucuuaauuuccccucaccgguucggcgaaacuaaaggaaauucugcaccacugaucauucgcgagcccuuuaucgccugcgggccuaacgaauguaagcauuucgcucuuacacacuacgcagcccagccaggcgguuauuacaaugggacccgaggagaccguaacaaauugagacaucugauaagcgugaagcuaggcaagaucccgacggucgaaaauuccauuuuucacauggcugccuggucaggcagugcgugccaugaugggaaagaguggacuuauaucggaguggacggucccgauaacaaugcacuccugaagguuaaauacggcgaggccuacaccgacacauaucacagcuacgcuaacaagauucuuaggacucaggagucugccuguaauugcaucgggggaaacuguuaucugaugauaaccgauggcuccgcaucaggugugagcgaaugccgguucuugaaaauucgcgaggggagaaucauuaaggagaucuuuccuacaggaagggucaagcacaccgaagaguguacgugcggcuucgcuaguaauaaaacuaucgaaugugccugccgggacaacucuuacacagcgaagcgcccauuugugaaacucaauguagagaccgauacugccgaaauucgacugaugugcacagacaccuauuuagauacgcccagaccugacgauggcuccauaaccgggccaugugagagcaacggagacaaggguucgggcgggaucaaaggaggcuucguucaucaaaggauggagucuaagauuggucggugguacucccguacaaugucaaaaacugaacgcauggggaugggccuguaugugaaguacgacggagaucccugggcagacagugaugcucucaccuuuagcggcgucaugguguccaugaaggagccggggugguacucuuucggauucgaaaucaaagacaagaaaugcgaugugccuuguauagguauugagaugguccacgacggcgggaaggaaacauggcauagcgccgcuacugccaucuauugccuuaugggaucaggccagcuguugugggauaccguuacagguguggacauggcacuauga

SEQ ID NO: 156994 - RNA, 1401 nt, Artificial Sequence
  derived and/or modified CDS sequence (opt3) from neuraminidase__InfluenzaB__AFA45244
augcugcccagcaccauccagacacucacucuuuuccugacguccggcgggguguuguuaucucuguacgucucagccagucuaagcuaucuccuguacuccgacauucuucugaaguuuucuccuaccgagacaacugcuccaaccaugucguuggauugcgcaaacgccucaaauguucaagcggugaacagaagcgcuacaaaaggaguaaccuuccuccugccggaacccgaguggacuuauccuaggcugaguuguccagguuccacauuucagaaggcccucuuaauaucuccccaccgguucggcgaaaccaaagggaauagcgcaccucugaucauucgcgagccauuuaucgccugcggacccaacgaauguaagcauuucgcucuuacgcacuacgcagcccagccuggcgguuauuacaaugggacucgaggagaccguaacaaauugagacaucugauuuccgugaagcuaggcaagaucccaaccgucgaaaauucaauauuucacauggcugccuggaguggcagcgcgugccaugaugggaaagaguggacauauaucggaguggacgguccggauaacgacgcacuccugaagguuaaauacggcgaggccuacacugauaccuaucacucuuacgcuaauaagauucuuaggacacaggaguccgccuguaacugcaucgggggaaauuguuaucugaugauuaccgacggcucagcaagcggugugagugaaugccgguucuugaaaauccgcgaggggagaauaauuaaggagaucuuucccacgggaagggucaagcacacugaagaguguacaugcggcuucgcuucuaacaaaaccauugaaugugccugccgggauaauuccuacacugcgaagcgcccuuuugugaaacucaacguagagacagacaccgccgaaauccgacugaugugcacggauaccuauuuagacacaccaagacccgaugacggcagcaucacugggccuugugagucgaauggagacaaggguucuggcgggauuaaaggaggcuucguucaucaaaggauggaguccaagauaggucggugguacucacguaccaugaguaaaacagaacgcauggggaugggccuguaugugaaguacgauggagacccaugggcagauagcgacgcucucgccuuuuccggcgucauggugucuaugaaggagcccgggugguacagcuucggauucgaaaucaaagauaagaaaugcgacgugccguguauugguaucgagaugguccacgauggcgggaagaaaacuuggcauucagcugccaccgcaauauauugccuuaugggaaguggccagcuguugugggacacaguuaccgguguggauauggcccuauga

SEQ ID NO: 156995 - RNA, 1401 nt, Artificial Sequence
  derived and/or modified CDS sequence (opt3) from neuraminidase__InfluenzaB__AFA45247
augcugcccagcaccauccagacacucacucuuuuccugacguccggcgggguguuguuaucucuguacgucucagccagucuaagcuaucuccuguacuccgacauucuucugaaguuuucuaccacagagauaacugcuccuaccaugccauuggauugcgcaaacgccucgaauguucaagcggugaacagaucagcuacaaaaggaguaacccuccugcugccggaacccgaguggacuuauccuaggcucagcuguccagguaguacauuccagaaggccuuacugaucucuccccaccgguuuggcgaaaccaaaggaaauuccgcaccucuuauuauccgcgagccauucauugccugcgggcccaacgaauguaagcauuuugcuuugacgcacuacgcagcccagccuggcgguuauuacaaugggacucgaggagaccguaacaaacugagacaucuaaucagcgugaagcucggcaagauaccaaccgucgaaaauuccaucuuccacauggcugccuggucaggcagugcgugccaugaugggaaagaguggacauauauuggaguggacgguccggauaacaaugcacugcuuaagguuaaauacggcgaggccuacacugacaccuaucacagcuacgcuaacaagauccugaggacacaggagucugccuguaauugcauugggggaaacuguuauuugauggugaccgauggcuccgcaucaggugucagcgaaugccgguuucucaaaauccgcgaggggagaauaauuaaggagaucuuccccacgggaagggugaagcacacugaagaguguacaugcggcuuugcuaguaauaaaaccauugaaugugccugccgggacaacucuuacacugcgaagcgcccuuucguaaaacugaauguugagacagauaccgccgaaauccgauuaaugugcacggacaccuaucuggauacaccaagacccgacgauggcuccaucacugggccuugugagagcaacggagacaaggguucgggcgggauuaaaggaggcuuugugcaucaaaggauggagucuaagauaggucggugguacucccguaccaugucaaaaacagaacgcauggggaugggccucuaugucaaguacgacggagauccaugggcagacagugaugcucuuguguucagcggcgugauggucuccaugaaggagcccgggugguacucuuuuggauucgaaaucaaagacaagaaaugcgauguuccguguauugguaucgagauggugcacgacggcgggaaggaaacuuggcauagcgccgcuaccgccauauauugccugaugggaucaggccaguugcuaugggauacaguaaccgguguggacauggcacuguga

SEQ ID NO: 156996 - RNA, 1401 nt, Artificial Sequence; identical to SEQ ID NO: 156946
  derived and/or modified CDS sequence (opt3) from neuraminidase__InfluenzaB__AFA45250

SEQ ID NO: 156997 - RNA, 1401 nt, Artificial Sequence
  derived and/or modified CDS sequence (opt3) from neuraminidase__InfluenzaB__AFA45253
augcugcccagcaccauccagacacucacucuuuuccugacguccggcgggguguuguuaucucuguacgucucagcccuacucaguuaucugcuuuacagcgacauucuguugaaguuuuccccuaccgagauaacagcuccaacuaugucucucgauugcgcaaacgccucgaauguucaagcggugaacagaucagcuaccaaaggaguaacauuccugcugccggaacccgaguggaccuauccuaggcucagcuguccagguaguacuuuucagaaggccuuacugaucucuccccaccgguucggcgaaacaaaaggaaauuccgcaccucuuauuauccgcgagccauuuauugccugcgggcccaacgaauguaagcauuucgcuuugacccacuacgcagcccagccuggcgguuauuacaaugggacgcgaggagaccguaacaaacugagacaucuaaucagcgugaagcucggcaagauaccaacugucgaaaauuccaucuuucacauggcugccuggucaggcagugcgugccaugaugggaaagaguggaccuauauuggaguggacgguccggauaacgacgcacugcuuaagguuaaauacggcgaggccuacacagauacuuaucacagcuacgcuaauaagauccugaggacccaggagucugccuguaacugcauugggggaaauuguuauuugaugaucacagacggcuccgcaucaggugugagcgaaugccgguuccucaaaauacgcgaggggagaauuaucaaggagauuuuucccaccggaagggucaagcacacggaagaguguacuugcggcuucgcuaguaacaaaacaaucgaaugugugugccgggauaauucuuacaccgccaagcgcccuuuuguaaaacugaacguugagacugacacagcggaaauccgauuaaugugcaccgauacguaucuggacaccccaagacccgaugacggcuccauuacagggccuugugagagcaauggagacaaggguucgggcgggauaaaaggaggcuucgugcaucaaaggauggagucuaagaucggucggugguacucccguacuaugucaaaaaccgaacgcauggggaugggccucuaugucaaguacgauggagacccaugggccgauagugacgcacuugcuuuuagcggcgugaugguguccaugaaggagcccgggugguacucuuucggauucgaaauuaaagauaagaaaugcgacgucccguguaucgguauagagaugguucacgauggcgggaaggaaacauggcauagcgccgcuacugccauuuauugccugaugggaucaggccaguugcuaugggacaccgugacagguguagauauggcacuguga

SEQ ID NO: 156998 - RNA, 1401 nt, Artificial Sequence
  derived and/or modified CDS sequence (opt3) from neuraminidase__InfluenzaB__AFB77645
augcugcccagcaccauccagacacucacucuuuuccugacguccggcgggguguuguuaucucuguacgucucagccagucuaagcuaucuccuguacuccgacauucuucugaaguuuucuccuaccgagauaacagcuccagcaaugccguuggauugcgccaacgcgucgaauguucaagcugugaacagaucagccacuaaaggaguaacccuccugcugcccgaaccugaguggacauauccaaggcucagcugucccgguaguaccuuccagaaggcauuacugaucuccccucaccgguuuggcgaaacuaaaggaaauucugccccacuuauuauccgcgagcccuucauugcuugcgggccuaacgaauguaagcauuuugcauugacacacuacgccgcucagccaggcgguuauuacaaugggacccgaggagaccguaacaaacugagacaucuaaucagcgugaagcucggcaagauaccgacggucgaaaauuccaucuuccacauggccgcguggucaggcagugcaugccaugaugggaaagaguggacuuauauuggaguggacggucccgauaacaaugcccugcuuaagguuaaauacggcgaggcuuacaccgacacauaucacagcuacgccaacaagauccugaggacucaggagucugcauguaauugcauugggggaaacuguuauuugaugaucaccgauggcuccgcuucaggugugagcgaaugccgguuucucaaaauacgcgaggggagaauuaucaaggagauuuucccuacaggaagggucaagcacaccgaagaguguacgugcggcuuugccaguaauaaaacuaucgaaugugcgugccgggacaacucuuacacagccaagcgcccauucgugaaacugaauguagagaccgauacugcagaaauccgauuaaugugcacagacaccuaucuggauacgcccagaccuaacgacggcuccauuaccgggccaugugagagcgauggagacaaggguucgggcgggauaaaaggaggcuuuguucaucaaaggauggagucuaagaucggucggugguacucccguacaaugucaaaaacugaacgcauggggaugggccucuaugugaaguacgacggagaucccugggcugacagugaugcccuugucuucagcggcgugaugguguccaugaaggagccggggugguacucuuuuggauucgaaauuaaagacaagaaaugcgaugucccuuguaucgguauagagaugguucacgacggcgggaaggaaaccuggcauagcgcugccacagcaauuuauugccugaugggaucaggccaguugcuaugggauacugugaccgguguagacauggcccuguga

SEQ ID NO: 156999 - RNA, 1401 nt, Artificial Sequence
  derived and/or modified CDS sequence (opt3) from neuraminidase__InfluenzaB__AFB77647
augcugcccagcaccauccagacacucacucuuuuccugacguccggcgggguguuguuaucucuguacgucucagccagucuaagcuaucuccuguacuccgacauucuucugaaguuuucuccuaccgagauaacagcuccagcaaucccguuggauugcgccaacgcgucgaauguucaagcugugaacagaucagccacuaaaggaguaacccuccugcugcccgaaccugaguggacauauccaaggcucagcugucccgguaguaccuuccagaaggcauuacugauuuccccucaccgguuuggcgaaacuaaaggaaauucugccccacuuaucauucgcgagcccuucaucgcuugcgggccuaacgaauguaagcauuuugcauugacacacuacgccgcucagccaggcgguuauuacaaugggacccgaggagaccguaacaaacugagacaucuaauaagcgugaagcucggcaagaucccgacggucgaaaauuccauuuuccacauggccgcguggucaggcagugcaugccaugaugggaaagaguggacuuauaucggaguggacggucccgauaacaaugcccugcuuaagguuaaauacggcgaggcuuacaccgacacauaucacagcuacgccaacaagauucugaggacucaggagucugcauguaauugcaucgggggaaacuguuauuugaugauaaccgauggcuccgcuucaggugugagcgaaugccgguuucucaaaauucgcgaggggagaaucauuaaggagaucuucccuacaggaagggucaagcacaccgaagaguguacgugcggcuuugccaguaauaaaacuaucgaaugugcgugccgggacaacucuuacacagccaagcgcccauucgugaaacugaauguagagaccgauacugcagaaauucgauuaaugugcacagacaccuaucuggauacgcccagaccuaacgacggcuccauaaccgggccaugugagagcgauggagacaaggguucgggcgggaucaaaggaggcuuuguucaucaaaggauggagucuaagauuggucggugguacucccguacaaugucaaaaacugaacgcauggggaugggccucuaugugaaguacgacggagaucccugggcugacagugaugcccuugcuuucagcggcgucaugguguccaugaaggagccggggugguacucuuuuggauucgaaaucaaagacaagaaaugcgaugugccuuguauagguauugagaugguccacgacggcgggaaggaaaccuggcauagcgccgcaacagccaucuauugccugaugggaucaggccaguugcuaugggauacuguuaccgguguggacauggcucuguga

SEQ ID NO: 157000 - RNA, 1401 nt, Artificial Sequence
  derived and/or modified CDS sequence (opt3) from neuraminidase__InfluenzaB__AFB77649
augcugcccagcaccauccagacacucacucuuuuccugacguccggcgggguguuguuaucucuguacgucucagccagucuaagcuaucuccuguacuccgacauucuucugaaguuuucuccuaccgagauaacagcuccagcaaugccguuggauugcgccaacgcgucgaauguucaagcugugaacagaucagccacuaaaggaguaacccuccugcugcccgaaccugaguggacauauccaaggcucagcugucccgguaguaccuuccagaaggcauuacugaucuccccucaccgguuuggcgaaacuaaaggaaauucugccccacuuauuauccgcgagcccuucauugcuugcgggccuaacgaauguaagcauuuugcauugacacacuacgccgcucagccaggcgguuauuacaaugggacccgaggagaccguaacaaacugagacaucuaaucagcgugaagcucggcaagauaccgacggucgaaaauuccaucuuccacauggccgcguggucaggcagugcaugccaugaugggaaagaguggacuuauauuggaguggacggucccgauaacaaugcccugcuuaagguuaaauacggcgaggcuuacaccgacacauaucacagcuacgccaacaagauccugaggacucaggagucugcauguaauugcauugggggaaacuguuauuugaugaucaccgauggcuccgcuucaggugugagcgaaugccgguuucucaaaauacgcgaggggagaauuaucaaggagauuuucccuacaggaaggaucaagcacaccgaagaguguacgugcggcuuugccaguaauaaaacuaucgaaugugcgugccgggacaacucuuacacagccaagcgcccauucgucaaacugaauguggagaccgauacugcagaaauucgauuaaugugcacagacaccuaucuggauacgcccagaccuaacgacggcuccauaaccgggccaugugagagcgauggagacaaggguucgggcgggaucaaaggaggcuuuguacaucaaaggauggagucuaagauuggucggugguacucccguacaaugucaaaaacugaacgcauggggaugggccucuauguuaaguacgacggagaucccugggcugacagugaugcccuugcuuucagcggcgugauggucuccaugaaggagccggggugguacucuuuuggauucgaaaucaaagacaagaaaugcgaugugccuuguauagguauugagauggugcacgacggcgggaaggaaaccuggcauagcgccgcaacagccaucuauugccugaugggaucaggccaguugcuaugggauacugucaccgguguugacauggcucuguga

SEQ ID NO: 157001 - RNA, 1401 nt, Artificial Sequence
  derived and/or modified CDS sequence (opt3) from neuraminidase__InfluenzaB__AFB77651
augcugcccagcaccauccagacacucacucuuuuccugacguccggcgggguguuguuaucucuguacgucucagccagucuaagcuaucuccuguacuccgacauucuucugaaguuuucuccuaccgagauaacagcuccagcaaugccguuggauugcgccaacgcgucgaauguucaagcugugaacagaucagccacuaaaggaguaacccuccugcugcccgaaccugaguggacauauccaaggcucagcugucccgguaguaccuuccagaaggcauuacugaucuccccucaccgguuuggcgaaacuaaaggaaauucugccccacuuauuauccgcgagcccuucauugcuugcgggccuaacgaauguaagcauuuugcauugacacacuacgccgcucagccaggcgguuauuacaaugggacccgaggagaccguaacaaacugagacaucuaacgagcgugaagcucggcaagaucccgacugucgaaaauuccauauuccacauggccgcguggucaggcagugcaugccaugaugggaaagaguggaccuauaucggaguggacggucccgauaacaaugcccugcuuaagguuaaauacggcgaggcuuacacagacacuuaucacagcuacgccaacaagauucugaggacccaggagucugcauguaauugcaucgggggaaacuguuauuugaugauuacagauggcuccgcuucaggugugagcgaaugccgguuucucaaaauccgcgaggggagaauaauuaaggagaucuucccuaccggaagggucaagcacacggaagaguguacuugcggcuuugccaguaauaaaacaauugaaugugcgugccgggacaacucuuacaccgccaagcgcccauucgugaaacugaauguagagacugauacagcagaaauccgauuaaugugcaccgacacguaucuggauacccccagaccuaacgacggcuccaucacagggccaugugagagcgauggagacaaggguucgggcgggauuaaaggaggcuuuguucaucaaaggauggagucuaagauaggucggugguacucccguacuaugucaaaaaccgaacgcauggggaugggccucuaugugaaguacgacggagaucccugggcugacagugaugcccuugcuuucagcggcgucaugguguccaugaaggagccggggugguacucuuuuggauucgaaaucaaagacaagaaaugcgaugugccuuguauugguaucgagaugguccacgacggcgggaaggaaacauggcauagcgccgcaacugccauauauugccugaugggaucaggccaguugcuaugggauaccguuacagguguggacauggcucuguga

SEQ ID NO: 157002 - RNA, 1401 nt, Artificial Sequence
  derived and/or modified CDS sequence (opt3) from neuraminidase__InfluenzaB__AFE00364
augcugcccagcaccauccagaugcucacacuuuuccugacuuccggcgggguguuguuaucucuguacgucucagccagucuaagcuaucuccuguacuccgacauucuucugaaguuuucuccuacggagauaaccgcuccaacaaugccguuggauugcgcaaacgccucgaauguucacgcggugaacagaucagcuacuaaaggaguaaccuuccuccugcccgaaccugaguggacauauccaaggcugagcugucccgguaguaccuuucaaaaggcccucuuaaucuccccucaucgguucggcgaaacuaaaggaaauucugcaccacugauuauccgcgagcccuuuauugccugcgggccuaacgaauguaagcacuucgcucuuacacauuacgcagcccagccaggcgguuauuacaaugggacccgaggagaccguaacagauugaggcaccugaucagcgugaaacuaggcaagauaccgacggucgaaaauuccaucuuucauauggcugccuggucaggcagugcgugccacgaugggaaggaguggacuuauauuggaguggacggucccgauaacaaugcacuccugaaaaucaaguacggcgaggccuacaccgacacauaucacagcuacgcuaacaauauucuucggacucaggagucugccuguaacugcaucgggggaaauuguuaucugaugauaaccgauggcuccgcaucagguguuagcgaaugccgcuucuugaaaauuagagaggggaggaucauuaaggagaucuuuccuacaggacgggugaaacauaccgaagaguguacgugcggcuucgcuaguaacaagacuaucgaaugugccugccgcgacaauucuuacacagcgaagcgaccauuugucaaacucaacguggagaccgauacugccgaaauuagacugaugugcacagacaccuauuuagauacgcccaggccugacgauggcuccauaaccgggccaugugagagcaacggagacaaggguucgggcgggaucaaaggaggcuucguacaccagcggauggcaucuaagauuggucguugguacucccgcacaaugucaaaaacugagagaaaggggaugggccuguauguuaaauacgacggagaucccuggaccgacagugaugcucucgccuuuaggggcgugauggucagcaugaaggaaccggggugguacuccuucggauucgagaucaaggacaaaaagugcgaugugccuuguauagguauugaaauggugcaugacggcgggaaagagacauggcacucugcugccacugcaaucuauugccuuaugggaagcggccaacuguugugggauaccgucacagguguugacauggcccuauga

SEQ ID NO: 157003 - RNA, 1401 nt, Artificial Sequence
  derived and/or modified CDS sequence (opt3) from neuraminidase__InfluenzaB__AFF18536
augcugcccagcaccauccagaugcucacacuuuuccugacuuccggcgggguguuguuaucucuguacgucucagccagucuaagcuaucuccuguacuccgacauucuucugaaguuuucuccuacggagauaaccgcuccaacaaugccguuggauugcgcaaacgccucgaauguucacgcggugaacagaucagcuacuaaaggaguaaccuuccuccugcccgaaccugaguggacauauccaaggcugagcugucccgguaguaccuuucaaaaggcccucuuaaucuccccucaucgguucggcgaaacuaaaggaaauucugcaccacugauuauccgcgagcccuuuauugccugcgggccuaacgaaugucgacacuucgcucuuacacauuacgcagcccagccaggcgguuauuacaaugggacccguggagacagaaacaaguugaggcaccugaucagcgugaaacuaggcaagauaccgacggucgaaaauuccaucuuucauauggcugccuggucaggcagugcgugccacgaugggaaggaguggacuuauauuggaguggacggucccgauaacaaugcacuccugaaaaucaaguacggcgaggccuacaccgacacauaucacagcuacgcuaacaauauucuucggacucaggagucugccuguaacugcauccgcgggaauuguuaucugaugauaaccgauggauccgcaucaggcguuagcgaaugcagauucuugaaaauuagggagggucggaucauuaaggagaucuuuccuacagggcgcgugaaacauaccgaagaguguacgugcggauucgcuaguaacaagacuaucgaaugugccugccgagacaauucuuacacagcgaagagaccauuugucaaacucaacguggagaccgauacugccgaaauuaggcugaugugcacagacaccuauuuagauacgccccggccugacgauggcuccauaaccggcccaugugagagcaacggggacaagggaucggguggcaucaaagggggauucguacaccagcguauggcaucuaagauuggccgcugguacuccagaacaaugucaaaaacugagaggaaggguauggggcuguauguuaaauacgacggcgaucccuggaccgacagugaugcucucgccuuucggggagugauggucagcaugaaggaaccgggcugguacuccuucggguucgagaucaaggacaaaaagugcgaugugccuuguauaggaauugaaauggugcaugacgguggcaaagagacauggcacucugcugccacugcaaucuauugccuuauggggagcggacaacuguugugggauaccgucacaggcguugacauggcccuauga

SEQ ID NO: 157004 - RNA, 1401 nt, Artificial Sequence
  derived and/or modified CDS sequence (opt3) from neuraminidase__InfluenzaB__AFF18545
augcugcccagcaccauccagaugcucacacuuuuccugacuuccggcgggguguuguuaucucuguacgucucagccagucuaagcuaucuccuguacuccgacauucuucugaaguuuucuccuacggagauaaccgcuccaacaaugccguuggauugcgcaaacgccucgaauguucacgcggugaacagaucagcuacuaaaggaguaaccuuccuccugcccgaaccugaguggacauauccaaggcugagcugucccgguaguaccuuucaaaaggcccucuuaaucuccccucaucgguucggcgaaacuaaaggaaauucugcaccacugauuauccgcgagcccuuuauugccugcgggccuaacgaauguaagcacuucgcucuuacacauuacgcagcccagccaggcgguuauuacaaugggacccgaggagaccguaacaaauugagacaccugaucagcgugaagcuaggcaagauaccgacggucgaaaauuccaucuuucauauggcugccuggucaggcagugcgugccacgaugggaaagaguggacuuauauuggaguggacggucccgauaacaaugcacuccugaagaucaaauacggcgaggccuacaccgacacauaucacagcuacgcuaacaauauucuuaggacucaggagucugccuguaacugcaucgggggaaauuguuaucugaugauaaccgauggcuccgcaucagguguuagcgaaugccgguucuugaagauucgcgaggggagaaucauuaaagagaucuuuccuacaggaagggugaagcauaccgaagaguguacgugcggcuucgcuaguaacaagacuaucgaaugugccugccgggacaauucuuacacagcgaaacgcccauuugucaagcucaacguggagaccgauacugccgaaauucgacugaugugcacagacaccuauuuagauacgcccagaccugacgauggcuccauaaccgggccaugugagagcaacggagacaaagguucgggcgggaucaagggaggcuucguacaccagaggauggcaucuaaaauuggucggugguacucccguacaaugucaaagacugagcgcaaagggaugggccuguauguuaaguacgacggagaucccuggaccgacagugaugcucucgccuuuagaggcgugauggucagcaugaaggaaccggggugguacuccuucggauucgagaucaaagacaagaaaugcgaugugccuuguauagguauugaaauggugcaugacggcgggaaggagacauggcacucugcugccacugcaaucuauugccuuaugggaagcggccaacuguugugggauaccgucacagguguugacauggcccuauga

SEQ ID NO: 157005 - RNA, 1401 nt, Artificial Sequence; identical to SEQ ID NO: 156865
  derived and/or modified CDS sequence (opt3) from neuraminidase__InfluenzaB__AFH34933

SEQ ID NO: 157006 - RNA, 1401 nt, Artificial Sequence; identical to SEQ ID NO: 156865
  derived and/or modified CDS sequence (opt3) from neuraminidase__InfluenzaB__AFH34939

SEQ ID NO: 157007 - RNA, 1401 nt, Artificial Sequence; identical to SEQ ID NO: 156803
  derived and/or modified CDS sequence (opt3) from neuraminidase__InfluenzaB__AFH57869

SEQ ID NO: 157008 - RNA, 1401 nt, Artificial Sequence
  derived and/or modified CDS sequence (opt3) from neuraminidase__InfluenzaB__AFH57891
augcugcccagcaccauccagacacucacucuuuuccugacguccggcgggguguuguuaucucuguacgucucagccagucuaagcuaucuccuguacuccgacauucuucugaaguuuucucaaaccgagauaacagcuccuaucaugccauuggauuaugcaaacgccucgaauguucaggcggugaaccacucagcugccaaaggaguaacucuccugcugccggaacccgaguggaccuacccuagacucagcugcccagguaguacauuccagaaggcauuacugauuucuccccauagguuuggcgaaaccaaaggcaauuccgccccucuuaucauucgggagccauucaucgcuuguggacccacugaaugcaagcacuuugcauugacacauuaugccgcucagccuggcgguuacuauaacgggacccgcgaggaccgaaauaaacugcgucaccuaauaagcgugaagcucggaaagaucccaacggucgagaacuccauuuuccauauggccgcguggucaggcagugcaugucacgauggcaaagaauggacuuacaucgggguggacggaccggauagcaaugcccugcuuaagauuaaauacggugaggcuuauaccgacacauaccacucuuaugccaagaacauccugagaacucaagaauccgcaugcaauuguauaggcggggauugcuacuugaugauuaccgacggacccgcuucaggcaucagcgaguguagguuucucaaaauucgggagggucgcaucaucaaggaaauuuucccuacagggagaguuaagcauaccgaggaaugcacguguggauuugccaguaacaaaacuauagagugcgcguguagggauaauucuuauacagccaagcggccauucgugaaacugaacgucgaaaccgacacugcagagauccgcuuaaugugcacagagaccuaccuggauacgccccgaccuaaugacggcuccauuaccggcccaugcgaaagcgauggggacaagggaucggguggcaucaaagggggauuugugcaccagagaauggcuucuaagauagggaggugguauucccggacaaugucaaaaacuaagcguauggguauggggcucuacguaaaguacgacggcgaucccuggaccgacagugaggcccuugcucugagcggaguuaugguguccauggaggaaccgggcugguauucuuucggguuugaaauuaaagauaagaaaugugacgucccuugcaucggaaucgagauggugcaugaugguggcaagacaacuuggcacagcgccgcaaccgccauuuacuguuugauggggucaggacagcuacugugggacacagugaccggcgucgauauggcucucuga

SEQ ID NO: 157009 - RNA, 1401 nt, Artificial Sequence
  derived and/or modified CDS sequence (opt3) from neuraminidase__InfluenzaB__AFH57913
augcugcccagcaccauccagacacucacucuuuuccugacguccggcgggguguuguuaucucuguacgucucagccagucuaagcuaucuccuguacuccgacauucuucugaaguuuucuccuaccgagauaacagcuccaacuaugccguuggauugcgcaaacgccucgaauguucaagcggugaacagaucagcuaccaaaggaguaacacuccugcugcccgaaccugaguggaccuauccaaggcucagcugucccgguaguacuuuccagaaggccuuacugaucuccccucaccgguuuggcgaaacaaaaggaaauucugcaccacuuauuauccgcgagcccuucauugccugcgggccuaacgaauguaagcauuuugcuuugacccacuacgcagcccagccaggcgguuauuacaaugggacgcgaggagaccguaacaaacugagacaucuaaucagcgugaagcucggcaagauaccgacugucgaaaauuccaucuuccacauggcugccuggucaggcagugcgugccaugaugggaaagaguggaccuauauuggaguggacggucccgauaacaaugcacugcuuaagguuaaauacggcgaggccuacacagacacuuaucacagcuacgcuaacaagauccugaggacccaggagucugccuguaauugcauugggggaaacuguuauuugaugaucacagauggcuccgcaucaggugugagcgaaugccgguuucucaaaauacgcgaggggagaauuaucaaggagauuuucccuaccggaagggucaagcacacggaagaguguacuugcggcuuugcuaguaauaaaacaaucgaaugugccugccgggacaacucuuacaccgcgaagcgcccauucgugaaacugaauguagagacugauacagccgaaauccgauuaaugugcaccgacacguaucuggauacccccagaccuaacgacggcuccauuacagggccaugugagagcaacggagauaaggguucgggcgggauaaaaggaggcuuuguucaucaaaggauggagucuaagaucggucggugguacucccguacuaugucaaaaaccgaacgcauggggaugggccucuaugugaaguacgacggagaccccugggcagauagugacgcucuugccuucagcggcgucaugguguccaugaaggagccggggugguacucuuuuggauucgaaauuaaagauaagaaaugcgacgugccuuguaucgguauagagaugguccacgauggcgggaaggaaacauggcauagcgcugccacugcaauuuauugccugaugggaucaggccaguugcuaugggacaccguuacagguguggauauggcccuguga

SEQ ID NO: 157010 - RNA, 1401 nt, Artificial Sequence; identical to SEQ ID NO: 156865
  derived and/or modified CDS sequence (opt3) from neuraminidase__InfluenzaB__AFH57935

SEQ ID NO: 157011 - RNA, 1401 nt, Artificial Sequence; identical to SEQ ID NO: 156865
  derived and/or modified CDS sequence (opt3) from neuraminidase__InfluenzaB__AFH57946

SEQ ID NO: 157012 - RNA, 1401 nt, Artificial Sequence; identical to SEQ ID NO: 156865
  derived and/or modified CDS sequence (opt3) from neuraminidase__InfluenzaB__AFH57957

SEQ ID NO: 157013 - RNA, 1401 nt, Artificial Sequence; identical to SEQ ID NO: 156943
  derived and/or modified CDS sequence (opt3) from neuraminidase__InfluenzaB__AFH57968

SEQ ID NO: 157014 - RNA, 1401 nt, Artificial Sequence
  derived and/or modified CDS sequence (opt3) from neuraminidase__InfluenzaB__AFH57979
augcugcccagcaccauccagacacucacucuuuuccugacguccggcgggguguuguuaucucuguacgucucagcccuacucaguuaucugcuuuacagcgacauucuguugaaguuuuccccuaccgagauaacagcuccaacuaugucucucgauugcgcaaacgccucgaauguucaagcggugaacagaucagcuaccaaaggaguaaucuuccugcugccggaacccgaguggacauauccuaggcucagcuguccagguaguaccuuucagaaggccuuacugauuucuccccaccgguucggcgaaacuaaaggaaauuccgcaccucuuaucauucgcgagccauuuaucgccugcgggcccaacgaauguaagcauuucgcuuugacacacuacgcagcccagccuggcgguuauuacaaugggacccgaggagaccguaacaaacugagacaucuaauaagcgugaagcucggcaagaucccaacggucgaaaauuccauuuuucacauggcugccuggucaggcagugcgugccaugaugggaaagaguggacuuauaucggaguggacgguccggauaacgacgcacugcuuaagguuaaauacggcgaggccuacaccgauacauaucacagcuacgcuaauaagauucugaggacucaggagucugccuguaacugcaucgggggaaauuguuauuugaugauaaccgacggcuccgcaucaggugugagcgaaugccgguuccucaaaauucgcgaggggagaaucauuaaggagaucuuucccacaggaagggucaagcacaccgaagaguguacgugcggcuucgcuaguaacaaaacuaucgaaugugccugccgggauaauucuuacacagcgaagcgcccuuuugugaaacugaacguagagaccgacacugccgaaauucgauuaaugugcacagauaccuaucuggacacgccaagacccgaugacggcuccauaaccgggccuugugagagcaauggagacaaggguucgggcgggaucaaaggaggcuucguucaucaaaggauggagucuaagauuggucggugguacucccguacaaugucaaaaacugaacgcauggggaugggccucuaugugaaguacgauggagacccaugggcagauagugacgcucuugccuuuagcggcgucaugguguccaugaaggagcccgggugguacucuuucggauucgaaaucaaagauaagaaaugcgacgugccguguauagguauugagaugguccacgauggcgggaaggaaaccuggcauagcgcugccacagcaaucuauugccugaugggaucaggccaguugcuaugggacacuguuaccgguguggauauggcccuguga

SEQ ID NO: 157015 - RNA, 1401 nt, Artificial Sequence; identical to SEQ ID NO: 156632
  derived and/or modified CDS sequence (opt3) from neuraminidase__InfluenzaB__AFH58253

SEQ ID NO: 157016 - RNA, 1401 nt, Artificial Sequence; identical to SEQ ID NO: 156695
  derived and/or modified CDS sequence (opt3) from neuraminidase__InfluenzaB__AFH58264

SEQ ID NO: 157017 - RNA, 1401 nt, Artificial Sequence; identical to SEQ ID NO: 156836
  derived and/or modified CDS sequence (opt3) from neuraminidase__InfluenzaB__AFH58275

SEQ ID NO: 157018 - RNA, 1401 nt, Artificial Sequence; identical to SEQ ID NO: 156836
  derived and/or modified CDS sequence (opt3) from neuraminidase__InfluenzaB__AFH58286

SEQ ID NO: 157019 - RNA, 1401 nt, Artificial Sequence; identical to SEQ ID NO: 157009
  derived and/or modified CDS sequence (opt3) from neuraminidase__InfluenzaB__AFH58297

SEQ ID NO: 157020 - RNA, 1401 nt, Artificial Sequence
  derived and/or modified CDS sequence (opt3) from neuraminidase__InfluenzaB__AFH58308
augcugcccagcaccauccagacacucacucuuuuccugacguccggcgggguguuguuaucucuguacgucucagccagucuaagcuaucuccuguacuccgacauucuucugaaguuuucuagaaccgagacaacugcuccuauaaugccauuggauugcgcaaacgccucgaauguucaagcggugaacaggucagcuaccaaaggaguaacacuccugcugccggaacccgaguggaccuauccucggcucagcuguccagguaguacuuuccagaaggccuuacugaucucuccccaccgcuuuggcgaaacaaaaggaaauuccgcaccucuuauuauccgagagccauucauugccugcgggcccaaggaauguaaacauuuugcuuugacccacuacgcagcccagccuggcgguuauuacaacgggacgcgugaggacagaaauaagcugaggcaucuaaucagcgugaagcucggaaaaauaccaacugucgagaacuccaucuuccacauggcugccuggucaggcagugcgugccaugauggccgggaauggaccuauauugggguggacggaccggauagcaaugcacugcuuaagaucaaauacggugaggccuacacagacacuuaucacucuuacgcuaagaacauucugcgcacccaggaauccgccuguaauugcaucggcggggauuguuauuugaugauaacagacggacccgcaucaggcauuagcgagugcagauuucucaaaaucagggagggucggauuaucaaggaaaucuucccuaccgggcgcguuaagcacacggaggaauguacuugcggauuugcuaguaacaaaacaauugagugugccugccgagauaauucuuacaccgcgaagagaccauucgugaaacugaacgucgaaacugacacagccgagauaagguuaaugugcaccgagacguaucuggauacaccccggccuaaugacggcuccaucaccggcccaugugaaagcaacggggauaagggaucggguggcauuaaagggggauuugugcaucaacguauggcaucuaagaucggccgcugguacuccagaacuaugucaaaaaccaagaggauggguauggggcucuauguaaaguacgacggcgaccccuggacagauagugaggcucuugcccugagcggaguuaugguguccauggaggaaccgggcugguacucuuucggguuugaaauaaaagacaagaaaugcgaugucccuuguauuggaaucgagauggugcacgacgguggcaagacuaccuggcauagcgcugccacagcaaucuauugcuugauggggucaggacagcuacugugggauaccgugacuggcgucgacauggcccucuga

SEQ ID NO: 157021 - RNA, 1401 nt, Artificial Sequence; identical to SEQ ID NO: 157020
  derived and/or modified CDS sequence (opt3) from neuraminidase__InfluenzaB__AFH58319

SEQ ID NO: 157022 - RNA, 1401 nt, Artificial Sequence
  derived and/or modified CDS sequence (opt3) from neuraminidase__InfluenzaB__AFH58341
augcugcccagcaccauccagacacucacucuuuuccugacguccggcgggguguuguuaucucuguacgucucagccagucuaagcuaucuccuguacuccgacauucuucugaaguuuucuagaaccgagauaacagcuccuaucaugccauuggauugcgcaaacgccucgaauguucaagcggugaacaggucagcuacuaaaggaguaacccuccugcugccggaacccgaguggacauauccucggcucagcuguccagguaguaccuuccagaaggccuuacugauuucuccccaccgcuuuggcgaaacuaaaggaaauuccgcaccucuuaucauucgagagccauucaucgccugcgggcccaaggaauguaaacauuuugcuuugacacacuacgcagcccagccuggcgguuauuacaacgggacccgugaggacagaaauaagcugaggcaucuaauaagcgugcggcucggaaagaucccaacggucgagaacuccauuuuccacauggcugccuggucaggcagugcgugccaugauggccgcgaauggacuuauaucgggguggacggaccggauagcaaugcacugcuuaaaauuaaguacggugaggccuacaccgacacauaucacucuuacgcuaaaaacauccugagaacucaggaauccgccuguaauugcauaggcggggauuguuauuugaugauuaccgacggacccgcaucaggcaucagcgagugcagguuucucaagauucgggagggucgcaucaucaaagaaauuuucccuacagggcgaguuaagcacaccgaggaauguacgugcggauuugcuaguaacaagacuauagagugugccugcagagauaauucuuacacagcgaaaaggccauucgugaagcugaacgucgaaaccgacacugccgagauccgguuaaugugcacagagaccuaucuggauacgccccguccuaaugacggcuccauuaccggcccaugugaaagcaacggggauaaaggaucggguggcaucaaagggggauuugugcaucaacgcauggcaucuaagauaggcagaugguacuccaggacaaugucaaagacuaaacggauggguauggggcucuauguaaaguacgacggcgaccccuggaccgauagugaggcucuugcccugagcggaguuaugguguccauggaggaaccgggcugguacucuuucggguuugaaauuaaggacaaaaagugcgaugucccuuguaucggaaucgagauggugcacgacgguggcaaaacaacuuggcauagcgcugccaccgcaauuuauugcuugauggggucaggacagcuacugugggauacagugaccggcgucaauaugacucucuga

SEQ ID NO: 157023 - RNA, 1401 nt, Artificial Sequence
  derived and/or modified CDS sequence (opt3) from neuraminidase__InfluenzaB__AFH58363
augcugcccagcaccauccagacacucacucuuuuccugacguccggcgggguguuguuaucucuguacgucucagccagucuaagcuaucuccuguacuccgacauucuucugaaguuuccuucuaccgagauaacagcuccaacuaugccguuggauugcgcaaacgccucgaauguucaagcggugaacagaucagcuaccaaaggaguaacauuccuccugcccgaaccugaguggaccuauccaaggcugagcugucccgguaguacuuuucagaaggcccucuuaaucuccccucaccgguucggcgaaacaaaaggaaauucugcaccacugauuauccgcgagcccuuuauugccugcgggccuaaggaauguaaacauuucgcucuuacccacuacgcagcccagccaggcgguuauuacaacgggacgcgaggagaccguaauaaguugagacaucugaucagcgugaagcuaggcaaaauaccgacugucgagaacuccaucuuucacauggcugccuggucaggcagugcgugccaugaugggaaggaguggaccuauauuggaguggacggucccgauaauaacgcacuccugaaaaucaaguacggcgaagccuacacagacacuuaucacagcuacgcuaauaacauucuuaggacccaggagucugccuguaauugcaucgggggaaacuguuaucugaugauaacagauggcuccgcaucagguguuagcgaaugccgguucuugaaaauucgcgaggggagaaucauuaaggagaucuuuccuaccggaaggaucaagcacacggaagaguguacuugcggcuucgcuaguaauaaaacaauugaaugugccugccgggacaacucuuacaccgcgaagcgcccauuugugaaacucaaugucgagacugauacagccgaaauacgacugaugugcaccgagacguauuuagacacccccagaccugaugacggcuccaucacagggccaugugagagcaacggagguaagggcucugggggaauuaaaggcgguuucgugcaucaaaggauggcaucgaagaucgggcggugguacucccguacuaugucaaaaaccgaacgcaagggcaugggacuguauguaaaguacgauggcgaccccugggcugacagugaugcccucgcuuuuagcgggguuaugguguccauggaggaaccgggaugguacucuuucgguuucgagauaaaagacaagaaaugcgaugucccuuguauuggcaucgaaauggugcacgacgggggaaaggagacauggcauagcgccgcaacugccaucuauugccuuaugggcucaggucagcuguugugggauaccgugacaggggucaacauggcucuauga

SEQ ID NO: 157024 - RNA, 1401 nt, Artificial Sequence; identical to SEQ ID NO: 157023
  derived and/or modified CDS sequence (opt3) from neuraminidase__InfluenzaB__AFH58374

SEQ ID NO: 157025 - RNA, 1401 nt, Artificial Sequence; identical to SEQ ID NO: 157009
  derived and/or modified CDS sequence (opt3) from neuraminidase__InfluenzaB__AFH58385

SEQ ID NO: 157026 - RNA, 1401 nt, Artificial Sequence; identical to SEQ ID NO: 157009
  derived and/or modified CDS sequence (opt3) from neuraminidase__InfluenzaB__AFH58396

SEQ ID NO: 157027 - RNA, 1401 nt, Artificial Sequence; identical to SEQ ID NO: 157009
  derived and/or modified CDS sequence (opt3) from neuraminidase__InfluenzaB__AFH58407

SEQ ID NO: 157028 - RNA, 1401 nt, Artificial Sequence; identical to SEQ ID NO: 157009
  derived and/or modified CDS sequence (opt3) from neuraminidase__InfluenzaB__AFH58418

SEQ ID NO: 157029 - RNA, 1401 nt, Artificial Sequence
  derived and/or modified CDS sequence (opt3) from neuraminidase__InfluenzaB__AFH58429
augcugcccagcaccauccagacacucacucuuuuccugacguccggcgggguguuguuaucucuguacgucucagccagucuaagcuaucuccuguacuccgacauucuucugaaguuuucuccuaccgagauaacagcuccaacuaugccguuggauugcgcaaacgccucgaauguucaagcggugaacagaucagcuaccaaaggaguaacacuccugcugcccgaaccugaguggaccuauccaaggcucagcugucccgguaguacuuuccagaaggccuuacugaucuccccucaccgguuuggcgaaacaaaaggaaauucugcaccacuuauuauccgcgagcccuucauugccugcgggccuaacgaauguaagcauuuugcuuugacccacuacgcagcccagccaggcgguuauuacaaugggacgcgaggagaccguaacaaacugagacaucuaaucagcgugaagcucggcaagauaccgacugucgaaaauuccaucuuccacauggcugccuggucaggcagugcgugccaugaugggaaagaguggaccuauauuggaguggacggucccgauaacaaugcacugcuuaagguuaaauacggcgaggccuacacagacacuuaucacagcuacgcuaacaagauccugaggacccaggagucugccuguaauugcauugggggaaacuguuauuugaugaucacagauggcuccgcaucaggugugagcgaaugccgguuucucaaaauacgcgaggggagaauuaucaaggagauuuucccuaccggaagggucaagcacacggaagaguguacuugcggcuuugcuaguaaugaaacaaucgagugugccugccgggacaacucuuacaccgcgaaacgcccauucgugaagcugaauguagaaacugauacagccgagauccgauuaaugugcaccgacacguaucuggauacccccagaccuaacgacggcuccauuacagggccaugugagagcaacggagauaaagguucgggcgggauaaagggaggcuuuguucaucaaaggauggaaucuaaaaucggucggugguacucccguacuaugucaaagaccgagcgcauggggaugggccucuaugugaaauacgacggagaccccugggcagauagugacgcucuugccuucagcggcgucaugguguccaugaaggaaccggggugguacucuuuuggauucgagauuaaggauaaaaagugcgacgugccuuguaucgguauagaaaugguccacgauggcgggaaagagacauggcauagcgcugccacugcaauuuauugccugaugggaucaggccaguugcuaugggacaccguuacagguguggauauggcccuguga

SEQ ID NO: 157030 - RNA, 1401 nt, Artificial Sequence
  derived and/or modified CDS sequence (opt3) from neuraminidase__InfluenzaB__AFH58440
augcugcccagcaccauccagacacucacucuuuuccugacguccggcgggguguuguuaucucuguacgucucagccagucuaagcuaucuccuguacuccgacauucuucugaaguuuucuccuaccgagauaacagcuccaacuaugccguuggauugcgcaaacgccucgaauguucaagcggugaacagaucagcuaccaaaggaguaacacuccugcugcccgaaccugaguggaccuauccaaggcucagcugucccgguaguacuuuccagaaggccuuacugaucuccccucaccgguuuggcgaaacaaaaggaaauucugcaccacuuauuauccgcgagcccuucauugccugcgggccuaacgaauguaagcauuuugcuuugacccacuacgcagcccagccaggcgguuauuacaaugggacgcgaggagaccguaacaaacugagacaucuaaucagcgugaagcucggcaagauaccgacugucgaaaauuccaucuuccacauggcugccuggucaggcagugcgugccaugaugggaaagaguggaccuauauuggaguggacggucccgauaacaaugcacugcuuaagguuaaauacggcgaggccuacacagacacuuaucacagcuacgcuaacaagauccugaggacccaggagucugccuguaauugcauugggggaaacuguuauuugaugaucacagauggcuccgcaucaggugugagcgaaugccgguuucucaaaauacaagaggggcgcauuaucaaggagauuuucccuaccggaagagucaagcacacggaagaguguacuugcggcuuugcuaguaauaaaacaaucgaaugugccugcagggacaacucuuacaccgcgaagcggccauucgugaaacugaauguagagacugauacagccgaaauccgcuuaaugugcaccgacacguaucuggauacaccccgaccuaacgacggcuccauuaccgggccaugugagagcaacggagauaaggguucgggcgggauaaaaggaggcuuuguucaucagagaauggagucuaagaucgguaggugguacucccggacuaugucaaaaaccgaacguauggggaugggccucuaugugaaguacgacggagaccccugggcagauagugacgcucuugccuucagcggcgucaugguguccaugaaggagccggggugguacucuuuuggauucgaaauuaaagauaagaaaugcgacgugccuuguaucgguauagagaugguccacgauggcgggaaggaaacauggcauagcgcugccacugcaauuuauugccugaugggaucaggccaguugcuaugggacaccguuacagguguggauauggcccuguga

SEQ ID NO: 157031 - RNA, 1401 nt, Artificial Sequence
  derived and/or modified CDS sequence (opt3) from neuraminidase__InfluenzaB__AFH58462
augcugcccagcaccauccagacacucacucuuuuccugacguccggcgggguguuguuaucucuguacgucucagccagucuaagcuaucuccuguacuccgacauucuucugaaguuuucuccuaccgagauaacagcuccaacuaugccguuggauugcgcaaacgccucgaauguucaagcggugaacagaucagcuaccaaaggaguaacauuccuccugcccgaaccugaguggaccuauccaaggcugagcugucccgguaguacuuuucagaaggcccucuuaaucuccccucaccgguucggcgaaacaaaaggaaauucugcaccacugauuauccgcgagcccuuuauugccugcgggccuaacgaauguaagcauuucgcucuuacccacuacgcagcccagccaggcgguuauuacaaugggacgcgaggagaccguaacaaauugagacaucugaucagcgugaagcuaggcaagauaccgacugucgaaaauuccaucuuucacauggcugccuggucaggcagugcgugccaugaugggaaagaguggaccuauauuggaguggacggucccgauaacaaugcacuccugaagguuaaauacggcgaggccuacacagacacuuaucacagcuacgcuaacaagauccuuaggacccaggagucugccuguaauugcauugggggaaacuguuaucugaugaucacagauggcuccgcaucaggugugagcgaaugccgguucuugaaaauacgcgaggggagaauuaucaaggagauuuuuccuaccggaagggucaagcacacggaagaguguacuugcggcuucgcuaguaauaaaacaaucgaaugugccugccgggacaacucuuacaccgcgaagcgcccauuugugaaacucaauguagagacugauacagccgaaauccgacugaugugcaccgacacguauuuagauacccccagaccugacgauggcuccauuacagggccaugugagagcaacggagacgaggguucgggcgggauaaagggaggcuucguucaucaaaggauggaaucuaaaaucggucggugguacucccguacuaugucaaagaccgagcgcauggggaugggccuguaugugaaauacgacggagaucccugggcagacagugaugcucucgccuuuagcggcgucaugguguccaugaaggaaccggggugguacucuuucggauucgagauuaaggacaaaaagugcgaugugccuuguaucgguauagaaaugguccacgacggcgggaaagagacauggcauagcgcugccacugcaauuuauugccuuaugggaucaggccagcuguugugggauaccguuacagguguggacaugacccuauga

SEQ ID NO: 157032 - RNA, 1401 nt, Artificial Sequence; identical to SEQ ID NO: 157031
  derived and/or modified CDS sequence (opt3) from neuraminidase__InfluenzaB__AFH58473

SEQ ID NO: 157033 - RNA, 1401 nt, Artificial Sequence; identical to SEQ ID NO: 156865
  derived and/or modified CDS sequence (opt3) from neuraminidase__InfluenzaB__AFH58484

SEQ ID NO: 157034 - RNA, 1401 nt, Artificial Sequence; identical to SEQ ID NO: 156865
  derived and/or modified CDS sequence (opt3) from neuraminidase__InfluenzaB__AFH58495

SEQ ID NO: 157035 - RNA, 1401 nt, Artificial Sequence; identical to SEQ ID NO: 156865
  derived and/or modified CDS sequence (opt3) from neuraminidase__InfluenzaB__AFH58506

SEQ ID NO: 157036 - RNA, 1401 nt, Artificial Sequence
  derived and/or modified CDS sequence (opt3) from neuraminidase__InfluenzaB__AFH58517
augcugcccagcaccauccagacacucacucuuuuccugacguccggcgggguguuguuaucucuguacgucucagcccuacucaguuaucugcuuuacagcgacauucuguugaaguuuuccccuaccgagauaacagcuccaacuaugucucucgauugcgcaaacgccucgaauguucaagcggugaacagaucagcuaccaaaggaguaacauuccugcugccggaacccgaguggaccuauccuaggcucagcuguccagguaguacuuuucagaaggccuuacugaucucuccccaccgguucggcgaaacaaaaggaaauuccgcaccucuuauuauccgcgagccauuuauugccugcgggcccaacgaauguaagcauuucgcuuugacccacuacgcagcccagccuggcgguuauuacaaugggacgcgaggagaccguaacaaacugagacaucuaaucagcgugaagcucggcaagauaccaacugucgaaaauuccaucuuucacauggcugccuggucaggcagugcgugccaugaugggaaagaguggaccuauauuggaguggacgguccggauaacgacgcacugcuuaagguuaaauacggcgaggccuacacagauacuuaucacagcuacgcuaauaagauccugaggacccaggagucugccuguaacugcauugggggaaauuguuauuugaugaucacagacggcuccgcaucaggugugagcgaaugccgguuccucaaaauacgcgaggggagaauuaucaaggagauuuuucccaccggaagggucaagcacacggaagaguguacuugcggcuucgcuaguaacaaaacaaucgaaugugccugccgggauaauucuuacaccgcgaagcgcccuuuugugaaacugaacguagagacugacacagccgaaauccgauuaaugugcaccgauacguaucuggacaccccaagacccgaugacggcuccauuacagggccuugugagagcaauggagacaaggguucgggcgggauaaaaggaggcuucguucaucaaaggauggagucuaagaucggucggugguacucccguacuaugucaaaaaccgaacgcauggggaugggccucuaugugaaguacgauggagacccaugggcagauagugacgcucuugccuuuagcggcgucaugguguccaugaaggagcccgggugguacucuuucggauucgaaauuaaagauaagaaaugcgacgugccguguaucgguauagagaugguccacgauggcgggaaggaaacauggcauagcgcugccacugcaauuuauugccugaugggaucaggcagauugcuaugggacaccguuacagguguggauauggcccuguga

SEQ ID NO: 157037 - RNA, 1401 nt, Artificial Sequence; identical to SEQ ID NO: 156943
  derived and/or modified CDS sequence (opt3) from neuraminidase__InfluenzaB__AFH58528

SEQ ID NO: 157038 - RNA, 1401 nt, Artificial Sequence
  derived and/or modified CDS sequence (opt3) from neuraminidase__InfluenzaB__AFH58539
augcugcccagcaccgugcagacacucacucuucuguugacguccggcggggucuuacugucucuauacguuucagccagucucagcuaucugcuuuacuccgacgugcuguugaaguucucuucgaccaaaacaacugcuccuaccaugucacucgagugcacaaacgcaagcaaugcccaaaccguaaaccacagugcgacuaaggaaaugacauuuccaccgcccgagccugaauggaccuauccaagacuguccugucagggaucuacguuccagaaagcucugcucaucagcccccauagguuuggugagauuaagggcaauuccgccccuuuaauaauccgggaaccauucguggcaugcgggcccaaagagugucgccacuuugcccugacucauuacgcugcacagccuggaggcuauuacaacgguacccgaaaggaucguaauaaacuuagacacuuggucucagugaagcuggggaagauuccaacaguugagaacaguaucuuccauauggccgcuuggagcggaucugccugccacgacggcagggaauggacuuauauuggcguggaugggccggacaaugaugcgcuagucaaaaucaaguacggagaggcauacaccgacacauaucacuccuacgcccauaacauacuccggacccaagaaucagcuuguaauugcaucgguggcgauuguuaucugaugauuacggacgggagcgccaguggaaucucuaaaugccgcuuucuuaagauuagagagggcaggaucauaaaggagauucugcccacuggucggguggaacacacagaggaauguaccugcggguucgcauccaacaaaacuaucgagugugcuugccgcgauaauagcuacacagccaagcgaccuuuuguaaaauugaacguugaaaccgacacggcggagauuagacucaugugcaccaagacauaucuggauacuccaaggcccgacgauggaucgaucgccggcccuugugagucuaauggcgacaaaugguuagggggaaucaaggguggcuucgugcaucagcggauggcauccaaaauugggcguugguacucacgcaccaugaguaagacaaacagaaugggaauggaacuguaugucaaguacgacggcgauccauggacugacagcgaugcucucacccuuuccggugugauggugucuauagaggaacccgggugguacagcuuuggcuucgagaucaaagacaagaaaugcgaugucccguguauuggaaucgaaaugguucacgacggcgggaaggauacauggcacucagccgcuaccgccauauauugccugaugggaaguggucaguugcuaugggacacugcaacgggcguggauauggcccuguga

SEQ ID NO: 157039 - RNA, 1401 nt, Artificial Sequence
  derived and/or modified CDS sequence (opt3) from neuraminidase__InfluenzaB__AFH58550
augcugcccagcaccauccagacacucacucuuuuccugacguccggcgggguguuguuaucucuguacgucucagccagucuaagcuaucuccuguacuccgacauucuucugaaguuuucuccuaccgagauaacagcuccaacuaugccguuggauugcgcaaacgccucgaauguucaagcggugaacagaucagcuaccaaagaaaugacacuccugcugcccgagccugaauggaccuauccaaggcucagcugucccggaaguacuuuccagaaggccuuacugaucuccccucaccgguuuggugagacacgcggcaauucugcaccacuuaccauucgagaacccuucaucgccugcgggccuaaagaguguaagcauuuugcuuugacgcacuacgcagcccagccaggaggcuauuacaacgguacucgugaggacagaaauaaacugaggcaucuaauuagcguaaagcucgggaagaucccgaccguggaaaacuccauauuccacauggcugccuggucaggaagugcgugccaugauggccgggaguggacauauaucggcgucgacgggcccgauagcaaugcacugauuaaaaucaaguacggagaagccuacacugacaccuaucacucuuacgcuaacaauauucuucgcacacaggaguccgccuguaacugcaucgguggcgauuguuaucugaugauaaccgacgggucagcaagcggaauuaguaaaugcagauuuuugaagaucagggagggccggauuaucaaagaaaucuucccuacgggucgcguggagcacacugaagaguguacaugcggguuugcuucuaauaagaccauugaaugugccugccgagauaacuccuacacugcgaagagaccauucguuaaacucaauguggagacagacaccgccgagauaaggcugaugugcacggaaaccuauuuagauacaccccggccugacgauggaagcaucacuggcccaugugagucgaacggcgacaaggggcguggagguauuaaaggcggguuuguccaucaacgcauggcaucuaagaucggaagaugguacuccaggaccaugucaaaaacagaacggaugggcauggagcuguaugugaaguacgacggugaucccuggacugacagugaagcucucgccccgagcgggguaaugguuuccauggaggagccuggcugguacucuuucggauuugaaauaaaagauaagaagugcgacgugcccuguauuggcaucgagaugguccacgauggggguaaaaagaccuggcauagcgcugccacagcaaucuauugccuuaugggaucaggccagcuguugugggacaccgugacugggguggauauggcccuauga

SEQ ID NO: 157040 - RNA, 1401 nt, Artificial Sequence; identical to SEQ ID NO: 157039
  derived and/or modified CDS sequence (opt3) from neuraminidase__InfluenzaB__AFH58561

SEQ ID NO: 157041 - RNA, 1401 nt, Artificial Sequence
  derived and/or modified CDS sequence (opt3) from neuraminidase__InfluenzaB__AFJ69969
augcugcccagcaccauccagacacucacucuuuuccugacguccggcgggguguuguuaucucuguacgucucagccagucuaagcuaucuccuguacuccgacauucuucugaaguuuucuccuaccgagauaacagcuccaacuaugccguuggauugcgcaaacgccucgaauguucaagcggugaacagaucagcuaccaaaggaguaacacuccugcugcccgaaccugaguggaccuauccaaggcucagcugucccgguaguacuuuccagaaggccuuacugaucuccccucaccgguuuggcgaaacaaaaggaaauucugcaccacuuauuauccgcgagcccuucauugccugcgggccuaacgaauguaagcauuuugcuuugacccacuacgcagcccagccaggcgguuauuacaaugggacgcgaggagaccguaacaaacugagacaucuaaucagcgugaagcucggcaagauaccgacugucgaaaauuccaucuuccacauggcugccuggucaggcagugcgugccaugaugggaaagaguggaccuauauuggaguggacggucccgauaacaaugcacugcuuaagguuaaauacggcgaggccuacacagacacuuaucacagcuacgcuaacaagauccugaggacccaggagucugccuguaauugcauugggggaaacuguuauuugaugaucacagauggcuccgcaucaggugugagcgaaugccgguuucucaaaauacgcgaggggagaauuaucaaggagauuuucccuaccggaagggucaagcacacggaagaguguacuugcggcuuugcuaguaauaaaacaaucgaaugugccugccgggacaacucuuacaccgcgaagcgcccauucgugaaacugaauguagagacugauacagccgaaauccgauuaaugugcaccgacacguaucuggauacccccagaccuaacgacggcuccauuacagggccaugugagagcaacggagauaaggguucgggcgggauaaaaggaggcuuuguucaucaaaggauggagucuaagaucggucggugguacucccguacuaugucaaaaaccgaacgcauggggaugggccucuaugugaaguacgacggagaccccuggacagauagugacgcacuugcuuucagcggcgucaugguguccaugaaggagccggggugguacucuuuuggauucgaaauuaaagauaagaaaugcgacgugccuuguaucgguauagagaugguccacgauggcgggaaggaaacuuggcauagcgccgcuaccgccauuuauugccugaugggaucaggccaguugcuaugggacacaguuaccgguguggauauggcacuguga

SEQ ID NO: 157042 - RNA, 1401 nt, Artificial Sequence; identical to SEQ ID NO: 157004
  derived and/or modified CDS sequence (opt3) from neuraminidase__InfluenzaB__AFJ69971

SEQ ID NO: 157043 - RNA, 1401 nt, Artificial Sequence
  derived and/or modified CDS sequence (opt3) from neuraminidase__InfluenzaB__AFJ69973
augcugcccagcaccauccagaugcucacacuuuuccugacuuccggcgggguguuguuaucucuguacgucucagccagucuaagcuaucuccuguacuccgacauucuucugaaguuuucuccuacggagauaaccgcuccaacaaugccguuggauugcgcaaacgccucgaauguucacgcggugaacagaucagcuacuaaaggaguaaccuuccuccugcccgaaccugaguggacauauccaaggcugagcugucccgguaguaccuuucaaaaggcccucuuaaucuccccucaucgguucggcgaaacuaaaggaaauucugcaccacugauuauccgcgagcccuuuauugccugcgggccuaacgaauguaagcacuucgcucuuacacauuacgcagcccagccaggcgguuauuacaaugggacccgaggagaccguaacaaauugagacaccugaucagcgugaagcuaggcaagauaccgacggucgaaaauuccaucuuucauauggcugccuggucaggcagugcgugccacgaugggaaagaguggacuuauauuggaguggacggucccgauaacaaugcacuccugaagaucaaauacggcgaggccuacaccgacacauaucacagcuacgcuaacaauauucuuaggacucaggagucugccuguaacugcaucgggggaaauuguuaucugaugauaaccgauggcuccgcaucagguguuagcgcuugccgguucuugaagauucgcgaagggagaaucauuaaagagaucuuuccuacaggaagggugaagcauaccgaggaauguacgugcggcuucgccaguaacaagacuaucgagugugcgugccgggacaauucuuacacagccaaacgcccauuugucaagcucaacguggaaaccgauacugcagagauucgacugaugugcacagacaccuauuuagauacgcccagaccugacgauggcuccauaaccgggccaugugaaagcaacggagacaaagguucgggcgggaucaagggaggcuucguacaccagaggauggcuucuaaaauuggucggugguacucccguacaaugucaaagacugagcgcaaagggaugggccuguauguuaaguacgacggagaucccuggaccgacagugaugcccucgcuuuuagaggcgugauggucagcaugaaggagccggggugguacuccuucggauucgaaaucaaagacaagaaaugcgaugugccuuguauagguauugagauggugcaugacggcgggaaggaaacauggcacucugccgcaacugccaucuauugccuuaugggaagcggccaacuguugugggauaccgucacagguguugacauggcucuauga

SEQ ID NO: 157044 - RNA, 1401 nt, Artificial Sequence; identical to SEQ ID NO: 156865
  derived and/or modified CDS sequence (opt3) from neuraminidase__InfluenzaB__AFJ69975

SEQ ID NO: 157045 - RNA, 1401 nt, Artificial Sequence
  derived and/or modified CDS sequence (opt3) from neuraminidase__InfluenzaB__AFJ69979
augcugcccagcaccauccagacacucacucuuuuccugacguccggcgggguguuguuaucucuguacgucucagccagucuaagcuaucuccuguacuccgacauucuucugaaguuuucuccuaccgagauaacagcuccaacuaugccguuggauugcgcaaacaccucgaauguucaagccgugaaccacucagcgacaaaaggaguaacccuccugcugcccgaaccugaguggacuuauccaagacucagcugucccgguaguacauuccagaaggcuuuacugaucuccccucauagguuuggcgaaaccaaaggaaauucugccccacuuauuauccgggagcccuucauugcaugcgggccuaacgaauguaagcacuuugccuugacgcauuacgcugcacagccaggcgguuauuacaaugggacucgcggagaccgaaacaaacugcgucaccuaaucagcgugaagcucggcaagauaccgaccgucgaaaauuccaucuuccauauggccgcuuggucaggcagugccugccacgaugggaaagaguggacauauauuggaguggacggucccgauaacaaugcgcugcuuaagguuaaauacggcgaggcauacacugacaccuaucacagcuacgccaacaagauccugagaacacaggagucugcuuguaauugcauugggggaaacuguuauuugaugaucaccgauggcuccgccucaggugugagcgaaugcagguuucucaaaauacgggaggggcgcauuaucaaggagauuuucccuacgggaagagucaagcauacugaagaguguacaugcggcuuugcaaguaauaaaaccaucgaaugugcuugcagggacaacucuuacacugccaagcggccauucgugaaacugaauguagagacagauaccgcggaaauccgcuuaaugugcacggacaccuaucuggauacaccccgaccugacgauggcuccauuacugggccaugugagagcaacggagacaaggguucgggcgggauaaaaggaggcuuuguucaccaaagaauggagucuaagaucgguaggugguacucccggaccaugucaaaaacagaacguauggggaugggccucuaugugaaguacgacggagaucccugggccgacagugaugcacuugcuuucagcggcgucaugguguccaugaaggagccggggugguacucuuuuggauucgaaauuaaagacaagaaaugcgaugugccuuguaucgguauagagaugguccaugacggcgggaaggaaacuuggcacagcgccgcuaccgccauuuauugccugaugggaucaggccaguugcuaugggauacaguuaccgguguggacauggcacuguga

SEQ ID NO: 157046 - RNA, 1401 nt, Artificial Sequence; identical to SEQ ID NO: 157004
  derived and/or modified CDS sequence (opt3) from neuraminidase__InfluenzaB__AFJ69981

SEQ ID NO: 157047 - RNA, 1401 nt, Artificial Sequence
  derived and/or modified CDS sequence (opt3) from neuraminidase__InfluenzaB__AFJ69983
augcugcccagcaccauccagaugcucacacuuuuccugacuuccggcgggguguuguuaucucuguacgucucagccagucuaagcuaucuccuguacuccgacauucuucugaaguuuucuccuacggagauaaccgcuccaacaaugccguuggauugcgcaaacgccucgaauguucacgcggugaacagaucagcuacuaaaggaguaaccuuccuccugcccgaaccugaguggacauauccaaggcugagcugucccgguaguaccuuucaaaaggcccucuuaaucuccccucaucgguucggcgaaacuaaaggaaauucugcaccacugauuauccgcgagcccuuuauugccugcgggccuaacgaauguaagcacuucgcucuuacacauuacgcagcccagccaggcgguuauuacaaugggacccgaggagaccguaacaaauugagacaccugaucagcgugaagcuaggcaagauaccgacggucgaaaauuccaucuuucauauggcugccuggucaggcagugcgugccacgaugggaaagaguggacuuauauuggaguggacggucccgauaacaaugcacuccugaagaucaaauacggcgaggccuacaccgacacauaucacagcuacgcuaacaauauucuuaggacucaggagucugccuguaacugcaucgggggaaauuguuaucugaugauaaccgauggcuccgcaucagguguuagcgaaugccgguucuugaagauucgcgaggggagaaucauuaaagagauccucccuacaggaagggugaagcauaccgaagaguguacgugcggcuuugcuaguaacaagacuaucgaaugugccugccgggacaauucuuacacagcgaaacgcccauucgucaagcugaacguggagaccgauacugccgaaauucgauuaaugugcacagacaccuaucuggauacgcccagaccugacgauggcuccauaaccgggccaugugagagcaacggagguaaaggcucugggggaaucaagggcgguuuuguacaccagaggauggcaucgaaaauugggcggugguacucccguacaaugucaaagacugagcgcaaaggcaugggacucuauguuaaguacgacggcgaccccuggaccgauagugacgcucuugccuucagaggggugauggucagcaugaaggaaccgggaugguacuccuuugguuucgagaucaaagauaagaaaugcgacgugccuuguauaggcauugaaauggugcaugaugggggaaaggagacauggcacucugcugccacugcaaucuauugccugaugggcagcggucaauugcuaugggacaccgucacagggguugauauggcccuguga

SEQ ID NO: 157048 - RNA, 1401 nt, Artificial Sequence
  derived and/or modified CDS sequence (opt3) from neuraminidase__InfluenzaB__AFJ69987
augcugcccagcaccauccagacacucacucuuuuccugacguccggcgggguguuguuaucucuguacgucucagccagucuaagcuaucuccuguacuccgacauucuucugaaguuuucuccuaccgagauaacagcuccaacuaugccguuggauugcgcaaacgccucgaauguucaagcggugaacagaucagcuaccaaaggaguaacacuccugcugcccgaaccugaguggaccuauccaaggcucagcugucccgguaguacuuuccagaaggccuuacugaucuccccucaccgguuuggcgaaacaaaaggaaauucugcaccacuuauuauccgcgagcccuucauugccugcgggccuaacgaauguaagcauuuugcuuugacccacuacgcagcccagccaggcgguuauuacaaugggacgcgaggagaccguaacaaacugagacaucuaaucagcgugaagcucggcaagauaccgacugucgaaaauuccaucuuccacauggcugccuggucaggcagugcgugccaugaugggaaagaguggaccuauauuggaguggacggucccgauaacaaugcacugcuuaagguuaaauacggcgaggccuacacagacacuuaucacagcuacgcuaacaagauccugaggacccaggagucugccuguaauugcauugggggaaacuguuauuugaugaucacagauggcuccgcaucaggugugagcgaaugccgguuucucaaaauacgcgaggggagaauuaucaaggagauuuucccuaccggaagggucaagcacacggaagaguguacuugcggcuuugcuaguaauaaaacaaucgaaugugccugccgggacaaccgcuacaccgcgaagcgaccauucgugaaacugaauguagagacugauacagccgaaaucagauuaaugugcaccgacacguaucuggauacccccaggccuaacgacggcucuauuacagggccaugugaguccgauggagacaaggguagcggcgggacuaaaggaggcuuuguucaucaacggaugaagucgaaaauaggucguugguacucucgcaccauguccaagacagagagaauggggaugggccucuaugugaaguacgacggagaucccugggcagacucagaugcucuuacuuucaguggcgucauggugagcaugaaagaaccggggugguacuccuuuggauucgagaucaaggacaaaaagugcgaugugccuuguauugguaucgaaaugguccacgacggcgggaaagagaccuggcauucugccgcuacagccauauauugccugaugggaagcggccaguugcuaugggauaccguuacugguguggacauggcacuguga

SEQ ID NO: 157049 - RNA, 1401 nt, Artificial Sequence
  derived and/or modified CDS sequence (opt3) from neuraminidase__InfluenzaB__AFJ76228
augcugcccagcaccauccagacacucacucuuuuccugacguccggcgggguguuguuaucucuguacgucucagccagucuaagcuaucuccuguacuccgguauucuucugaaguuuucuccuaccgagauaacagcuccaacuaugccguugaacugcgcaaaugccucgaacguucaagcggugaauagaucagcuaccaaaggaguaacacuccugcugcccgaaccugaguggaccuauccaaggcucagcugucccggcaguacuuuccagaaggccuuacugaucuccccucaccgguuuggggaaacaaaaggaaacucugcaccacuuauuauccgcgagcccuucauugccugcggcccuaaggaauguaaacauuuugcuuugacccacuacgcagcccagccagguggguauuacaauggaacgcgagaggaccguaacaagcugagacaucuaaucagcgugaagcucggcaaaauaccgacugucgaaaauuccaucuuccacauggcugccuggucaggcagugcgugccaugaugggagggaauggaccuauauuggaguggacggucccgauagcaacgcacugcuuaagaucaaauacggcgaggccuacacagacacuuaucacucuuacgcuaauaacauucugcggacccaggaauccgccuguaauugcaucgggggagauuguuauuugaugauaacagacggcucagcaagcgguauuagugagugccgcuuucucaagaucagagaggggaggauuaucaaagaaaucuucccuaccggacggguugagcacacggaagaguguacuugcggcuuugcuucuaacaagacaauugaaugugccugccgcgauaauuccuacaccgcgaagcgaccauucgugaaacugaacgucgagacugacacagccgagauaagauuaaugugcaccgaaacguaucuggauacccccaggccugacgauggcagcaucacagggccaugugagucgaauggagacaaggguucuggcgggauuaaaggaggcuuugugcaucaacggauggcauccaagaucggucguugguacucacgcacuaugaguaaaaccaagagaauggggaugggccucuauguaaaauacgauggagaccccuggauagacagcgaugcucuuacacuguccggcguuauggugucuauggaggagccggggugguacagcuucggauuugaaauuaaggacaagaaaugcgaugucccuuguaucgguaucgagauggugcacgacggcgggaagaaaacuuggcauucagccgcuaccgccauuuauugcuugaugggaaguggccagcuacugugggauacagugaccggugucgacauggcacucuga

SEQ ID NO: 157050 - RNA, 1401 nt, Artificial Sequence; identical to SEQ ID NO: 156716
  derived and/or modified CDS sequence (opt3) from neuraminidase__InfluenzaB__AFJ76261

SEQ ID NO: 157051 - RNA, 1401 nt, Artificial Sequence
  derived and/or modified CDS sequence (opt3) from neuraminidase__InfluenzaB__AFJ76283
augcugcccagcaccauccagacacucacucuuuuccugacguccggcgggguguuguuaucucuguacgucucagccagucuaagcuaucuccuguacuccgacauucuucugaaguuuccuccaaccgagauaacagcuccgacuaugcccuuggauugcgcaaacgccucuaauguucaagcggugaacagaucggcuaccaaaggaguaacacuccugcugccugaaccagaguggaccuaucccaggcucucauguccugguagcacuuuccagaaggccuuacugaucaguccacaccgguuuggcgaaacaaaaggaaauuccgcaccccuuauuauccgcgagccuuucauugccugcgggccaaaggaauguaaacauuuugcuuugacccacuacgcagcccagccgggcgguuauuacaacgggacgcgaggagaccguaauaagcugagacaucuaaucucugugaagcucggcaaaauacccacugucgagaacagcaucuuccacauggcugccugguccggcucagcgugccaugaugggaaggaguggaccuauauuggaguggacgguccugauaauaacgcacugcuuaaaaucaaguacggcgaagccuacacagacacuuaucacaguuacgcuaauaacauucugaggacccaggagagcgccuguaauugcaucgggggaaacuguuauuugaugauaacagauggcucugcauccgguguuucagaaugccgguuucucaaaauucgcgaggggagaaucauuaaggagaucuucccaaccggaaggaucaagcacacggaagaguguacuugcggcuuugcuagcaauaaaacaauugaaugugccugccgggacaacaguuacaccgcgaagcgccccuucgugaaacugaaugucgagacugauacagccgaaauacgauuaaugugcaccgagacguaucuggacaccccuagaccagaugacggcucuaucacagggcccugugaguccaacggagauaaggguagcggcgggauuaaaggaggcuuugugcaucaaaggauggcaucgaagaucggucggugguacucucguacuauguccaaaaccgaacgcauggggaugggccucuauguaaaguacgacggagacccgugggcugauucagacgcccuuacauucaguggcguuauggugagcauggaggaaccugggugguacuccuuuggauucgagauaaaggauaaaaagugcgacguccccuguauugguaucgaaauggugcacgauggcgggaaagagacuuggcauucugcugccaccgcaaucuauugccugaugggaagcggccaguugcuaugggacacagugaccggugucaacauggcccuguga

SEQ ID NO: 157052 - RNA, 1401 nt, Artificial Sequence
  derived and/or modified CDS sequence (opt3) from neuraminidase__InfluenzaB__AFJ76305
augcugcccagcaccauccagacacucacucuuuuccugacguccggcgggguguuguuaucucuguacgucucagccagucuaagcuaucuccuguacuccgacauucuucugaaguuuccuucuaccgagauaacagcuccaacuaugccguuggauugcgcaaacgccucgaauguucaagcggugaacagaucagcuaccaaaggaguaacacuccugcugcccgaaccugaguggaccuauccaaggcucagcugucccgguaguacuuuccagcgggccuuacugaucuccccucaccgcuuuggcgaaacaaagggaaauucugcaccacuuauuauccgagagcccuucauugccugcgggccuaaagaauguaagcauuuugcuuugacccacuacgcagcccagccaggcgguuauuacaacgggacgcguggagacagaaauaaacugaggcaucuaaucagcgugaagcucggcaagauaccgacugucgagaacuccaucuuccacauggcugccuggucaggcagugcgugccaugaugggaaagaguggaccuauauuggaguggacggucccgauaauaacgcacugcuuaagaucaaauacggcgaagccuacacagacacuuaucacagcuacgcuaauaacauucugcggacccaggagucugccuguaauugcaucgggggaaacuguuauuugaugauaacagauggcuccgcaucagguguuagcgaaugccgcuuucucaagauuagagaggggaggaucauuaaagagaucuucccuaccggacggaucaagcacacggaagaguguacuugcggcuuugcuaguaauaagacaauugaaugugccugccgcgacaacucuuacaccgcgaaacgaccauucgugaagcugaaugucgagacugauacagccgaaauaagauuaaugugcaccgagacguaucuggacacccccaggccugaugacggcuccaucacagggccaugugagagcaacggagauaaagguucgggcgggauuaagggaggcuuugugcaucaacggauggcaucuaaaaucggucguugguacucccgcacuaugucaaagaccgaaagaauggggaugggccucuauguaaaauacgacggagaccccugggcugauagugacgcccuuacauucagcggcguuaugguguccauggaggaaccggggugguacucuuuuggauucgagauaaaggauaagaaaugcgacgucccuuguauugguaucgaaauggugcacgauggcgggaaggagacuuggcauagcgcugccaccgcaaucuauugccugaugggaucaggccaguugcuaugggacacagugaccggugucgauauggcccuguga

SEQ ID NO: 157053 - RNA, 1401 nt, Artificial Sequence
  derived and/or modified CDS sequence (opt3) from neuraminidase__InfluenzaB__AFJ76316
augcugcccagcaccauccagacacucacucuuuuccugacguccggcgggguguuguuaucucuguacgucucagccagucuaagcuaucuccuguacuccgacauucuucugaaguuuccuucuaccgagauaacagcuccaacuaugccguuggauugcgcaaacgccucgaauguucaagcggugaacagaucagcuaccaaaggaguaacacuccugcugcccgaaccugaguggaccuauccaaggcucagcugucccgguaguacuuuccagaaggccuuacugaucuccccucaccgguuuggcgaaacaaaaggaaauucugcaccacuuauuauccgcgagcccuucauugccugcgggccuaaggaauguaaacauuuugcuuugacccacuacgcagcccagccaggcgguuauuacaacgggacgcgaggagaccguaauaagcugagacaucuaaucagcgugaagcucggcaaaauaccgacugucgagaacuccaucuuccacauggcugccuggucaggcagugcgugccaugaugggaaggaguggaccuauauuggaguggacggucccgauaauaacgcacugcuuaaaaucaaguacggcgaagccuacacagacacuuaucacagcuacgcuaauaacauucugaggacccaggagucugccuguaauugcaucgggggaaacuguuauuugaugauaacagauggcuccgcaucagguguuagcgaaugccgguuucucaaaauucgcgaggggagaaucauuaaggagaucuucccuaccggaaggaucaagcacacggaagaguguacuugcggcuuugcuaguaauaaaacaauugaaugugccugccgggacaacucuuacaccgcgaagcgcccauucgugaaacugaaugucgagacugauacagccgaaauacgauuaaugugcaccgagacguaucuggacacccccagaccugaugacggcuccaucacagggccaugugagagcaacggagauaaggguucgggcgggauuaaaggaggcuuugugcaucaaaggauggcaucuaagaucggucggugguacucccguacuaugucaaaaaccgaacgcauggggaugggccucuauguaaaguacgacggagaccccugggcugauagugacgcccuuacauucagcggcguuaugguguccauggaggaaccggggugguacucuuuuggauucgagauaaaggauaaaaagugcgacgucccuuguauugguaucgaaauggugcacgauggcgggaaagagacuuggcauagcgcugccaccgcaaucuauugccugaugggaucaggccaguugcuaugggacacagugaccggugucaacauggcccuguga

SEQ ID NO: 157054 - RNA, 1401 nt, Artificial Sequence; identical to SEQ ID NO: 156716
  derived and/or modified CDS sequence (opt3) from neuraminidase__InfluenzaB__AFJ76338

SEQ ID NO: 157055 - RNA, 1401 nt, Artificial Sequence
  derived and/or modified CDS sequence (opt3) from neuraminidase__InfluenzaB__AFJ77331
augcugcccagcaccauccagacacucacucuuuuccugacguccggcgggguguuguuaucucuguacgucucagccagucuaagcuaucuccuguacuccgacauucuucugaaguuuucucaaaccgagauaacagcuccuaucaugccauuggauugcgcaaacgccucgaauguucaggcggugaaccacucagcugccaaaggaguaacucuccugcugccggaacccgaguggaccuauccuagacucagcuguccagguaguacauuccagaaggcauuacugauuucuccccauagguuuggcgaaaccaaaggcaauuccgccccucuuaucauucgggagccauucaucgcuugcggacccacugaauguaagcacuuugcauugacacauuacgccgcucagccuggcgguuauuacaacgggacccgcgaggaccgaaauaaacugcgucaccuaauaagcgugaagcucggaaagaucccaacggucgagaacuccauuuuccauauggccgcguggucaggcagugcaugccacgauggcaaagaauggacuuauaucgggguggacggaccggauagcaaugcccugcuuaagauuaaauacggugaggcuuacaccgacacauaucacucuuacgccaagaacauccugagaacucaagaauccgcauauaauuguauaggcggggauugcuacuugaugauuaccgacggacccgcuucaggcaucagcgaguguagguuucucaaaauucgggagggucgcaucaucaaggaaauuuucccuacagggagaguuaagcauaccgaggaaugcacguguggauuugccaguaacaaaacuauagagugcgcguguagggauaauucuuauacagccaagcggccauucgugaaacugaacgucgaaaccgacacugcagagauccgcuuaaugugcacagagaccuaccuggauacgccccgaccuaaugacggcuccauuaccggcccaugcgaaagcgauggggacaagggaucggguggcaucaaagggggauuugugcaccagagaauggcuucuaagauagggaggugguauucccggacaaugucaaaaacuaagcguauggguauggggcucuacguaaaguacgacggcgaucccuggaccgacagugaggcccuugcucugagcggaguuaugguguccauggaggaaccgggcugguauucuuucggguuugaaauuaaagauaagaaaugugacgucccuugcaucggaaucgagauggugcaugaugguggcaagacaacuuggcacagcgccgcaaccgccauuuacuguuugauggggucaggacagcuacugugggacacagugaccggcgucgauauggcucucuga

SEQ ID NO: 157056 - RNA, 1401 nt, Artificial Sequence; identical to SEQ ID NO: 156791
  derived and/or modified CDS sequence (opt3) from neuraminidase__InfluenzaB__AFJ77351

SEQ ID NO: 157057 - RNA, 1401 nt, Artificial Sequence; identical to SEQ ID NO: 156683
  derived and/or modified CDS sequence (opt3) from neuraminidase__InfluenzaB__AFJ77362

SEQ ID NO: 157058 - RNA, 1401 nt, Artificial Sequence; identical to SEQ ID NO: 156836
  derived and/or modified CDS sequence (opt3) from neuraminidase__InfluenzaB__AFJ77384

SEQ ID NO: 157059 - RNA, 1401 nt, Artificial Sequence; identical to SEQ ID NO: 156758
  derived and/or modified CDS sequence (opt3) from neuraminidase__InfluenzaB__AFJ80132

SEQ ID NO: 157060 - RNA, 1401 nt, Artificial Sequence
  derived and/or modified CDS sequence (opt3) from neuraminidase__InfluenzaB__AFJ80143
augcugcccagcaccauccagacacucacucuuuuccugacguccggcgggguguuguuaucucuguacgucucagccagucuaagcuaucuccuguacuccgacauucuucugaaguuuucuccuaccgagauaacagcuccaacuaugccguuggauugcgcaaacgccucgaauguucaagcggugaacagaucagcuaccaaaggaguaacacuccugcugcccgaaccugaguggaccuauccaaggcucagcugucccgguaguacuuuccagaaggccuuacugaucuccccucaccgguuuggcgaaacaaaaggaaauucugcaccacuuauuauccgcgagcccuucauugccugcgggccuaaggaauguaaacauuuugcuuugacccacuacgcagcccagccaggcgguuauuacaacgggacgcgagaggaccguaauaagcugagacaucuaaucagcgugaagcucggaaaaauaccgacugucgagaacuccaucuuccacauggcugccuggucaggcagugcgugccaugauggcagggaauggaccuauauugggguggacggacccgauagcaaugcacugcuuaagaucaaauacggugaggccuacacagacacuuaucacucuuacgcuaacaauauucugcggacccaggaauccgccuguaacugcaucggcgggaauuguuauuugaugauaacagauggaucagcaagcggcauuagugagugccgcuuucucaagaucagagaggguaggauuaucaaagaaaucuucccuaccgggcggguugagcacacggaagaguguacuugcggauuugcuucuaacaagacaauugaaugugccugccgcgacaauuccuacaccgcgaagcgaccauucgugaaacugaacgucgagacugauacagccgagauaagauuaaugugcaccgaaacguaucuggacacccccaggccugaugacggcagcaucacaggcccaugugagucgaauggggauaagggaucugguggcauuaaagggggauuugugcaucaacggauggcauccaagaucggccguugguacucacgcacuaugaguaaaaccaagagaauggguauggggcucuauguaaaauacgacggcgaccccuggacagauagcgacgcucuugcccuguccggaguuauggugucuauggaggaaccgggcugguacagcuucggguuugaaauaaaggauaagaaaugcgacgucccuuguauuggaaucgagauggugcacgaugguggcaagaaaacuuggcauucagcugccaccgcaaucuauugcuugauggggaguggacagcuacugugggacacagugaccggcgucgauauggcccucuga

SEQ ID NO: 157061 - RNA, 1401 nt, Artificial Sequence
  derived and/or modified CDS sequence (opt3) from neuraminidase__InfluenzaB__AFJ80154
augcugcccagcaccauccagacacucacucuuuuccugacguccggcgggguguuguuaucucuguacgucucagccagucuaagcuaucuccuguacuccgacauucuucugaaguuuucuccuaccgagauaacagcuccaacuaugccguuggauugcgcaaacgccucgaauguucaagcggugaacagaucagcuaccaaaggaguaacacuccugcugcccgaaccugaguggaccuauccaaggcucagcugucccgguaguacuuuccagaaggccaucuuaauuuccccucaccgguuuggcgaaacaaaaggaaauucugcaccacugaucauucgcgagcccuucaucgccugcgggccuaaggaauguaaacauuuugcucuuacccacuacgcagcccagccaggcgguuauuacaacgggacgcgagaggaccguaauaaguugagacaucugauaagcgugaagcuaggaaaaaucccgacugucgagaacuccauuuuccacauggcugccuggucaggcagugcgugccaugauggcagggaauggaccuauaucgggguggacggacccgauagcaaugcacuccugaagauuaaauacggugaggccuacacagacacuuaucacucuuacgcuaacaauauccuucggacccaggaauccgccuguaacugcauaggcgggaauuguuaucugaugauuacagauggaucagcaagcggcaucagugagugccgcuuuuugaagauuagagaggguaggaucaucaaagaaauuuucccuaccgggcggguugagcacacggaagaguguacuugcggauuugcuucuaacaagacaauagaaugugccugccgcgacaauuccuacaccgcgaagcgaccauucgugaaacucaacgucgagacugauacagccgagaucagacugaugugcaccgaaacguauuuagacacccccaggccugaugacggcagcauuacaggcccaugugagucgaauggggauaagggaucugguggcaucaaagggggauuugugcaucaacggauggcauccaagauaggccguugguacucacgcacuaugaguaaaaccaagagaauggguauggggcuguauguaaaauacgacggcgaccccuggacagauagcgacgcucucgcccuuuccggaguuauggugucuauggaggaaccgggcugguacagcuucggguuugaaauuaaggauaagaaaugcgacgucccuuguaucggaaucgagauggugcacgaugguggcaagaaaacuuggcauucagcugccaccgcaauuuauugccugauggggaguggacaguugcuaugggacacagugaccggcgucgauauggcccuguga

SEQ ID NO: 157062 - RNA, 1401 nt, Artificial Sequence
  derived and/or modified CDS sequence (opt3) from neuraminidase__InfluenzaB__AFJ80165
augcugcccagcaccauccagacacucacucuuuuccugacguccggcgggguguuguuaucucuguacgucucagccagucuaagcuaucuccuguacuccgacauucuucugaaguuuucuccuaccgagauaacagcuccaacuaucccguuggauugcgcaaacgccucgaauguucaagcggugaacagaucagcuaccaaaggaguaacacuccugcugcccgaaccugaguggaccuauccaaggcucagcugucccgguaguacuuuccagaaggccuuacugauuuccccucaccgguuuggcgaaaucaaaggaaauucugcaccacuuauuauccgcgagcccuucauagccugcgggccuaaggaauguaaacauuuugcuuugacacacuacgcagcccagccaggcgguuauuacaacgggacccgagaggaccguaauaagcugagacaucuaaucagcgugaagcucggaaaaauuccgacggucgagaacuccaucuuccacauggcugccuggucaggcagugcgugccaugauggcaaggaauggacuuauauugggguggacggacccgauagcaaugcacugcuuaaaaucaaguacggugaggccuacaccgacacauaucacucuuacgcuaacaauauacugaggacucaggaauccgccuguaacugcauuggcgggaauuguuauuugaugaucaccgauggaucagcaagcggcauuagugagugccgguuucucaaaauccgcgaggguagaaucauuaaggaaauauucccuacagggaggguugagcacaccgaagaguguacgugcggauuugcuucuaacaagacuaucgaaugugccugccgggacaauuccuacacagcgaaacgcccauucgugaagcugaacgucgagaccgauacugccgagauucgauuaaugugcacagaaaccuaucuggacacgcccagaccugaugacggcagcaucaccggcccaugugagucgaauggggauaaaggaucugguggcauaaaagggggauuugugcaucaaaggauggcauccaagauuggccggugguacucacguacaaugaguaagacuaaacgcauggguauggggcucuauguaaaguacgacggcgaccccuggaccgauagcgacgcucuugcccuguccggaguuauggugucuauggaggaaccgggcugguacagcuucggguuugaaaucaaggauaaaaagugcgacaucccuuguauuggaaucgagaugguccacgaugguggcaaagagacauggcauucagcugccacugcaauuuauugcuugauggggaguggacagcuacugugggacaccgugacaggcguggauauggcccucuga

SEQ ID NO: 157063 - RNA, 1401 nt, Artificial Sequence
  derived and/or modified CDS sequence (opt3) from neuraminidase__InfluenzaB__AFJ80176
augcugcccagcaccauccagacacucacucuuuuccugacguccggcgggguguuguuaucucuguacgucucagccagucuaagcuaucuccuguacuccgacauucuucugaaguuuucuccuaccgagauaacaguuccaacuaugccguuggauugcgcuaacgcaucgaaugugcaagccguaaacagaucagcgaccaaaggagugacacuccugcugcccgaaccugaguggaccuauccaaggcucagcugucccgguaguacuuuccagaaggcuuuacugaucuccccucaccgguuuggcgaaacaaaaggaaauucugccccacuuauuauccgcgagcccuucauugcaugcgggccuaaggaauguaaacauuuugccuugacccacuacgcugcacagccaggcgguuauuacaacgggacgcgagaggaccguaauaagcugagacaucuaaucagcgucaagcucggaaaaauaccgacuguggagaacuccaucuuccacauggccgcuuggucaggcagugccugccaugauggcagggaauggaccuauauugggguugacggacccgauagcaaugcgcugcuuaagaucaaauacggugaggcauacacagacacuuaucacucuuacgccaacaauauucugcggacccaggaauccgcuuguaacugcaucggcgggaauuguuauuugaugauaacagauggaucagccagcggcauuagugagugccgcuuucucaagaucagagaggguaggauuaucaaagaaaucuucccuaccgggcggguggagcacacggaagaguguacuugcggauuugcaucuaacaagacaauugaaugugcuugccgcgacaauuccuacaccgccaagcgaccauucgucaaacugaacguggagacugauacagcggagauaagauuaaugugcaccgaaacguaucuggacacccccaggccugaugacggcagcaucacaggcccaugugagucgaauggggauaagggaucugguggcauuaaagggggauuuguacaucaacggauggccuccaagaucggccguugguacucacgcacuaugaguaaaaccaagagaauggguauggggcucuauguuaaauacgacggcgaccccuggacagauagcgacgcacuugcucuguccggagugauggucucuauggaggaaccgggcugguacagcuucggguuugaaauaaaggauaagaaaugcgacgugccuuguauuggaaucgagauggugcacgaugguggcaagaaaacuuggcauucagccgcuaccgccaucuauugcuugauggggaguggacagcuacugugggacacagucaccggcguugauauggcacucuga

SEQ ID NO: 157064 - RNA, 1401 nt, Artificial Sequence
  derived and/or modified CDS sequence (opt3) from neuraminidase__InfluenzaB__AFJ80187
augcugcccagcaccauccagacacucacucuuuuccugacguccggcgggguguuguuaucucuguacgucucagccagucuaagcuaucuccuguacuccgguauucuucugaaguuuucuccuaccgagauaacagcuccaacuaugccguugaacugcgcaaaugccucgaacuuccaagcgguuaauagaucagcuaccaaaggagugacacuccugcugcccgaaccugaguggaccuauccaaggcucagcugucccggcaguacuuuucagaaggccuuacugaucuccccucaccgguucggggaaacaaaaggaaacucugcaccacuuauuauccgcgagcccuuuauugccugcggcccuaaggaauguaaacauuucgcuuugacccacuacgcagcccagccagguggguauuacaauggaacgcgagaggaccguaacaagcugagacaucuaaucagcguaaagcucggcaaaauaccgacuguggaaaauuccaucuuucacauggcugccuggucaggcagugcgugccaugaugggagggaauggaccuauauuggagucgacggucccgauagcaacgcacugcuuaagaucaaauacggcgaggccuacacagacacuuaucacucuuacgcuaauaacauucugcggacccaggaauccgccuguaauugcaucgggggagauuguuauuugaugauaacagacggcucagcaagcgguauuagugagugccgcuuccucaagaucagagaggggaggauuaucaaagaaaucuuuccuaccggacggguggagcacacggaagaguguacuugcggcuucgcuucuaacaagacaauugaaugugccugccgcgauaauuccuacaccgcgaagcgaccauuuguuaaacugaacguggagacugacacagccgagauaagauuaaugugcaccgaaacguaucuggauacccccaggccugacgauggcagcaucacagggccaugugagucgaauggagacaaggguucuggcgggauuaaaggaggcuucguccaucaacggauggcauccaagaucggucguugguacucacgcacuaugaguaaaaccaagagaauggggaugggccucuaugugaaauacgauggagaccccuggauagacagcgaugcucuuacacuguccggcguaaugguuucuauggaggagccggggugguacagcuuuggauucgaaauuaaggacaagaaaugcgaugugccuuguaucgguaucgagaugguccacgacggcgggaagaaaacuuggcauucagccgcuaccgccauuuauugcuugaugggaaguggccagcuacugugggauacagugaccgguguggacauggcacucuga

SEQ ID NO: 157065 - RNA, 1401 nt, Artificial Sequence; identical to SEQ ID NO: 157060
  derived and/or modified CDS sequence (opt3) from neuraminidase__InfluenzaB__AFJ80198

SEQ ID NO: 157066 - RNA, 1401 nt, Artificial Sequence; identical to SEQ ID NO: 156688
  derived and/or modified CDS sequence (opt3) from neuraminidase__InfluenzaB__AFJ80220

SEQ ID NO: 157067 - RNA, 1401 nt, Artificial Sequence
  derived and/or modified CDS sequence (opt3) from neuraminidase__InfluenzaB__AFJ80231
augcugcccagcaccauccagacacucacucuuuuccugacguccggcgggguguuguuaucucuguacgucucagccagucuaagcuaucuccuguacuccgguauucuucugaaguuuucuuugaccgagauaacagcuccuacuaugccacucaacugcgcaaaugccucgaacguucaagcggugaauagaucagcuaccaaaggaguaacacuguuccugccggaacccgaguggaccuauccuaggcucagcuguccaggcaguacuuuucagaaggccuuacugaucucuccccaccgguucggggaaacaaaaggaaacuccgcaccucuuauuauccgcgagccauuuauugccugcggccccaaggaauguaaacauuucgcuuugacccacuacgcagcccagccugguggguauuacaauggaacgcgagaggaccguaacaagcugagacaucuaaucagcguggagcucggcaagauaccaacugucgaaaauuccaucuuucacauggcugccuggucaggcagugcgugccaugaugggaaagaguggaccuauauuggaguggacgguccggauagcaacgcacugcuuaagaucaaauacggcgaagccuacacagacacuuaucacucuuacgcuaauaacauucugaggacccaggaguccgccuguaauugcaucgggggagauuguuauuugaugauaacagacggcucagcaagcgguauuagugagugccgguuccucaagauccgcgaagggagaauuaucaaagagaucuuucccaccggaaggguugaacacacggaggaauguacuugcggcuucgcuucuaacaagacaauugagugugccugccgggauaauuccuacaccgcgaagcgcccuuuugugaaacugaacgucgagacugacacagccgaaauacgauuaaugugcaccgagacguaucuggauaccccaagacccgacgauggcagcaucacagggccuugugaaucgaauggagacaaggguucuggcgggauuaaaggaggcuucgugcaucaaaggauggcauccaagaucggucggugguacucacguacuaugaguaaaaccaagcgcauggggaugggccucuauguaaaauacgauggagacccauggauagacagcgaugcucuuacacuguccggcguuauggugucuauggaggaacccgggugguacagcuuuggauucgagauuaaggacaagaaaugcgaugucccguguaucgguaucgagauggugcacgacggcgggaagaaaacuuggcauucagccgcuaccgccauuuauugcuugaugggaaguggccagcuacugugggauacagugaccggugucgacauggcacucuga

SEQ ID NO: 157068 - RNA, 1401 nt, Artificial Sequence
  derived and/or modified CDS sequence (opt3) from neuraminidase__InfluenzaB__AFJ80242
augcugcccagcaccauccagacacucacucuuuuccugacguccggcgggguguuguuaucucuguacgucucagcccuacucaguuaucugcuuuacagcgacauucuguugaaguuuuccccuaccaaaguuauagcuccaacaaugucucucgauugcgcaaacgccucgaaugugcaagcgguaaaccacucagcuacugaggaaaugaccuuccugcugccggagcccgaauggacauauccuagacucagcugucagggaaguaccuuucagaaggccuuacugaucuccccacauagguucggugaggcaaaaggcaauucugcuccccuuauuauccgggaaccuuuuauugcuugcgggccaaaggaguguaaacacuucgcauugacucauuacgccgcucagcccggaggcuauuacaacgguacacgcgaggaccgaaauaagcugcgucaccuaaucagcgugaaccucgggaagauaccuaccgucgaaaauuccaucuuucauauggccgcguggucaggaagugcaugccacgauggcagagaguggacguauauuggcguggacgggccagauagcaacgcccugaucaaaauuaaguacggagaagccuacacugacaccuaucacucuuacgccaauaacauccuuaggacacaagaguccgcauguaauugcauagguggcgauuguuaucugaugauuacugacgggucagcuagcggaaucagucggugccgcuucuugaaaauuagagagggcaggaucaucaaggaaauuuuuccgaccggucggguugagcauacagaagaguguaccugcggguucgccucuaacaaaacgauagaaugugcgugccgcgauaauuccuacacugccaagcgacccuuugugaagcucaacgucgagacagacaccgcagagaucagacugaugugcacugaaacauauuuagauaccccuaggccagacgauggaagcauuacgggccccugugagucgaauggcgacaaagggaacggagguaucaagggcggguucgugcaccagcggauggcuucucguauaggacgcugguacuccagaaccaugucaaaaacaaagaggaugggcauggaacuguauguaaaauacgacggugauccuuggacugacagugaugcccucgcuccaagcgggguuaugguguccauggaggaacccggcugguacucuuuuggauucgagauuaaggacaaaaagugcgaugucccguguaucggcaucgagauggugcaugacgggggaaagaccacauggcacagcgccgcaacugccauuuauugccuuauggguucaggccagcuguugugggauaccgugacaggggucgacauggcucuauga

SEQ ID NO: 157069 - RNA, 1401 nt, Artificial Sequence
  derived and/or modified CDS sequence (opt3) from neuraminidase__InfluenzaB__AFJ80660
augcugcccagcaccauccagacacucacucuuuuccugacguccggcgggguguuguuaucucuguacgucucagccagucuaagcuaucuccuguacuccgacauucuucugaaguuuucuccuaccgagauaacagcuccaacuaugccguuggauugcgcaaacgccucgaauguucaagcggugaacagaucagcuaccaaaggaguaacacuccugcugcccgaaccugaguggaccuauccaaggcucagcugucccgguaguacuuuccagaaggccuuacugaucuccccucaccgguuuggcgaaacaaaaggaaauucugcaccacuuauuauccgcgagcccuucauugccugcgggccuaaggaauguaaacauuuugcuuugacccacuacgcagcccagccaggcgguuauuacaacgggacgcgagaggaccguaauaagcugagacaucuaaucagcgugaagcucggaaaaauaccgacugucgagaacuccaucuuccacauggcugccuggucaggcagugcgugccaugauggcagggaauggaccuauauugggguggacggacccgauagcaaugcacugcuuaagaucaaauacggugaggccuacacagacacuuaucacucuuacgcuaacaauauucugcggacccaggaauccgccuguaacugcaucggcggggauuguuauuugaugauaacagacggaucagcaagcggcauuagugagugccgcuuucucaagaucagagaggguaggauuaucaaagaaaucuucccuaccgggcggguugagcacacggaagaguguacuugcggauuugcuucuaauaagacaauugaaugugccugccgcgauaacuccuacaccgcgaagcgaccauucgugaaacugaaugucgagacugacacagccgagauaagauuaaugugcaccgaaacguaucuggauacccccaggccugacgauggcagcaucacaggcccaugugagucgaacggggacaagggaucugguggcauuaaagggggauuugugcaucaacggaugacuuccaagaucggccguugguacucacgcaccaugaguaaaacaaagagaauggguauggggcucuauguaaaauacgacggcgaucccuggacugacagcgaugcacuugcucuguccggaguuauggugucuauggaggaaccgggcugguacagcuucggguuugaaauaaaggacaagaaaugcgaugucccuuguauuggaaucgagauggugcacgacgguggcaagaaaaccuggcauucagccgcuacagccaucuauugcuugauggggaguggacagcuacugugggauaccgugacuggcgucgacauggcacucuga

SEQ ID NO: 157070 - RNA, 1401 nt, Artificial Sequence; identical to SEQ ID NO: 157067
  derived and/or modified CDS sequence (opt3) from neuraminidase__InfluenzaB__AFJ80671

SEQ ID NO: 157071 - RNA, 1401 nt, Artificial Sequence; identical to SEQ ID NO: 157067
  derived and/or modified CDS sequence (opt3) from neuraminidase__InfluenzaB__AFJ80682

SEQ ID NO: 157072 - RNA, 1401 nt, Artificial Sequence
  derived and/or modified CDS sequence (opt3) from neuraminidase__InfluenzaB__AFJ80693
augcugcccagcaccauccagacacucacucuuuuccugacguccggcgggguguuguuaucucuguacgucucagccagucuaagcuaucuccuguacuccgguauucuucugaaguuuucuccuaccgagauaacagcuccaacuaugccguugaacugcgcaaaugccucgaacguucaagcggugaauagaucagcuaccaaaggaguaacacuccugcugcccgaaccugaguggaccuauccaaggcucagcugucccggcaguacuuuccagaaggccuuacugaucuccccucaccgguuuggggaaacaaaaggaaacucugcaccacuuauuauccgcgagcccuucauugccugcggcccuaaggaauguaaacauuuugcuuugacccacuacgcagcccagccagguggguauuacaauggaacgcgagaggaccguaacaagcugagacaucuaaucagcgugaagcucggcaaaauaccgacugucgaaaauuccaucuuccacauggcugccuggucaggcagugcgugccaugaugggagggaauggaccuauauuggaguggacggucccgauagcaacgcacugcuuaagaucaaauacggcgaggccuacacagacacuuaucacucuuacgcuaauaacauucugcggacccaggaauccgccuguaauugcaucgggggagauuguuauuugaugauaacagacggcucagcaagcgguauuagugagugccgcuuucucaagaucagagaggggaggauuaucaaagaaaucuucccuaccggacggguugagcacacggaagaguguacuugcggcuuugcuucuaacaagacaauugaaugugccugccgcgauaauuccuacaccgcgaagcgaccauucgugaaacugaacgucgagacugacacagccgagauaagauuaaugugcaccgaaacguaucuggauacccccaggccugacgauggcagcaucacagggccaugugagucgcauggagacaaggguucuggcgggauuaaaggaggcuuugugcaccaacggauggcauccaagaucggucguugguacucacgcacuaugaguaaaaccaagagaauggggaugggccucuauguaaaauacgauggagaccccuggauagacagcggcgcucuuacacuguccgggguuauggugucuauggaggagccgggaugguacagcuucgguuuugaaauuaaggauaagaaaugcgacgucccuuguaucggcaucgagauggugcaugaugggggaaagaaaacuuggcacucagccgcuaccgccauuuauugcuugaugggcaguggucagcuacugugggacacagugaccggggucgauauggcacucuga

SEQ ID NO: 157073 - RNA, 1401 nt, Artificial Sequence
  derived and/or modified CDS sequence (opt3) from neuraminidase__InfluenzaB__AFJ80726
augcugcccagcaccauccagacacucacucuuuuccugacguccggcgggguguuguuaucucuguacgucucagccagucuaagcuaucuccuguacuccgacauucuucugaaguuuucucaaaccgagauaacagcuccuacuaugccauuggauugcgcaaacgccucgaauguucaggcggugaacagaucagcuaccaaaggaguaacacuccugcugccggaacccgaguggaccuauccuaggcucagcuguccagguaguacuuuccagaaggccuuacugaucucuccccaccgguuuggcgaaacaaaaggaaauuccgcaccucuuauuauccgcgagccauucauugccugcgggcccaaggaauguaaacauuuugcuuugacccacuacgcagcccagccuggcgguuauuacaacgggacgcgagaggaccguaauaagcugagacaucuaaucagcgugaagcucggaaaaauaccaacugucgagaacuccaucuuccacauggcugccuggucaggcagugcgugccaugauggcagggaauggaccuauauugggguggacggaccggauagcaaugcacugcuuaagaucaaauacggugaggccuacacagacacuuaucacucuuacgcuaagaacauucugcggacccaagaauccgccuguaauugcaucggcggggauuguuauuugaugauaacagacggaucagcaagcggcauuagugagugccgcuuucucaaaaucagagaggguaggauuaucaaggaaaucuuccccaccgggcggguuaagcacacggaggaauguacuugcggauuugcuucuaacaaaacaauugagugugccugccgcgauaauuccuacaccgcgaagcgaccuuucgugaaacugaacgucgaaacugacacagccgagauaagauuaaugugcaccgagacguaucuggauaccccaaggcccaaugacggcagcaucacaggcccuugugaaucgaacggggaucggggagguggcgggauuaagggaggcuuugugcaucagcguauggcaucuaaaaucggucgcugguacuccagaacuaugucaaagaccaaaaggauggggaugggccucuauguaaaguacgacggagacccauggacagauagugaggcucuugcccugagcggcguuauggugcccauggaggaaccggggugguacuccuucggauuugaaauaaaggacaaaaagugcgaugucccuuguauugguaucgagauggugcacgacggcgggaaaacuaccuggcauucugcugccacagcaaucuauugcuugaugggaagcggccagcuacugugggauaccgugacuggugucgacauggcccucuga

SEQ ID NO: 157074 - RNA, 1401 nt, Artificial Sequence
  derived and/or modified CDS sequence (opt3) from neuraminidase__InfluenzaB__AFJ80737
augcugcccagcaccauccagacacucacucuuuuccugacguccggcgggguguuguuaucucuguacgucucagccagucuaagcuaucuccuguacuccgacauucuucugaaguuuucucaaaccgagauaacagcuccuaucaugccauuggauugcgcaaacgccucgaauguucaggcggugaacagaucagcuacuaaaggaguaacccuccugcugccggaacccgaguggacauauccuaggcucagcuguccagguaguaccuuccagaaggccuuacugauuucuccccaccgguuuggcgaaacuaaaggaaauuccgcaccucuuaucauucgcgagccauucaucgccugcgggcccaaggaauguaaacauuuugcuuugacacacuacgcagcccagccuggcgguuauuacaacgggacccgagaggaccguaauaagcugagacaucuaauaagcgugaagcucggaaaaaucccaacggucgagaacuccauuuuccacauggcugccuggucaggcagugcgugccaugauggcagggaauggacuuauaucgggguggacggaccggauagcaaugcacugcuuaagauuaaauacggugaggccuacaccgacacauaucacucuuacgcuaagaacauccugcggacucaagaauccgccuguaauugcauacgcggcgauuguuauuugaugauuaccgacgggcccgcaucaggaaucagcgagugcagauuucucaaaauuagggagggccggaucaucaaggaaauuuucccuacaggucgcguuaagcacaccgaggaauguacgugcggguuugcuaguaacaaaacuauagagugugccugccgagauaauucuuacacagcgaagagaccauucgugaaacugaacgucgaaaccgacacugccgagaucagguuaaugugcacagagaccuaucuggauacgccccggccuaaugacggauccauuaccggcccaugugaaagcaacggcgauaaggggucgggagguaucaaaggcggguuugugcaucagcguauggcaucuaagauaggacgcugguacuccagaacaaugucaaaaacuaagaggaugggcaugggucucuauguaaaguacgacggggaccccuggaccgauagugaggcucuugcccugagcggcguuaugguguccauggaggaaccgggaugguacucuuucggcuuugaaauuaaagacaagaaaugcgaugucccuuguaucgggaucgagauggugcacgacggagguaagacaacuuggcauagcgcugccaccgcaauuuauugcuugaugggcucagggcagcuacugugggauacagugaccggagucgacauggcccucuga

SEQ ID NO: 157075 - RNA, 1401 nt, Artificial Sequence; identical to SEQ ID NO: 156716
  derived and/or modified CDS sequence (opt3) from neuraminidase__InfluenzaB__AFJ80759

SEQ ID NO: 157076 - RNA, 1401 nt, Artificial Sequence
  derived and/or modified CDS sequence (opt3) from neuraminidase__InfluenzaB__AFJ80770
augcugcccagcaccauccagacacucacucuuuuccugacguccggcgggguguuguuaucucuguacgucucagccagucuaagcuaucuccuguacuccgacauucuucugaaguuuucucaaaccgagauaacagcuccuacuaugccauuggauugcgcaaacgccucgaauguucaggcggugaacagaucagcuaccaaaggaguaacacuccugcugccggaacccgaguggaccuauccuaggcucagcuguccagguaguacuuuccagaaggccuuacugaucucuccccaccgguuuggcgaaacaaaaggaaauuccgcaccucuuauuauccgcgagccauucauugccugcgggcccaacgaauguaagcauuuugcuuugacccacuacgcagcccagccuggcgguuauuacaaugggacgcgagaggaccguaacaaacugagacaucuaaucagcgugaagcucggaaagauaccaacugucgaaaauuccaucuuccacauggcugccuggucaggcagugcgugccaugauggcagggaauggaccuauauugggguggacggaccggauagcaacgcacugcuuaaaaucaaguacggugaggccuacacagacacuuaucacucuuacgcuaaaaauauucugcggacccaagaauccgccuguaacugcaucggcggggauuguuauuugaugauaacagacggacccgcaucaggcauuagcgagugccgcuuucucaagaucagagaggguaggauuaucaaagaaaucuucccuaccgggcggguuaagcacacggaggaauguacuugcggauuugcuaguaauaagacaauugagugugccugccgcgauaacucuuacaccgcgaaacgaccauucgugaagcuggacgucgaaacugauacagccgagauaagauuaaugugcaccgagacguaucuggacacccccaggccuaaugauggcuccaucacaggcccaugugaaagcaacggggacaaaggaucggguggcauuaaagggggauuugugcaucagcggauggcaucuaagaucggccguugguacucccgcacucucucaaagaccaaaagaauggguauggggcuuuauguaaaguacgacggcgaucccuggacagacagugaggcucuggccuugagcggaguuaugguguccauggaggagccgggcugguacucuuucggguuugaaauaaaggauaaaaagugcgacgucccuuguauuggaaucgagauggugcacgaugguggcaaaacuaccuggcauagcgcugccacagcaaucuauugccuaauggggucaggacagcugcucugggacaccgugacuggcgucgauauggcccuguga

SEQ ID NO: 157077 - RNA, 1401 nt, Artificial Sequence; identical to SEQ ID NO: 156716
  derived and/or modified CDS sequence (opt3) from neuraminidase__InfluenzaB__AFJ80785

SEQ ID NO: 157078 - RNA, 1401 nt, Artificial Sequence; identical to SEQ ID NO: 156716
  derived and/or modified CDS sequence (opt3) from neuraminidase__InfluenzaB__AFJ80796

SEQ ID NO: 157079 - RNA, 1401 nt, Artificial Sequence
  derived and/or modified CDS sequence (opt3) from neuraminidase__InfluenzaB__AFJ80807
augcugcccagcaccauccagacacucacucuuuuccugacguccggcgggguguuguuaucucuguacgucucaguuagucuaagcuaucuccuguacuccgacauucuucugaaguuuccuucuaccgagauaacagccccaacuaugccguuggauugcgcuaacgcaucgaaugugcaagccguaaacagaucagcgaccaaaggagugacacuccugcugcccgaaccugaguggaccuauccaaggcucagcugucccgguaguacuuuccagaaggcuuuacugaucuccccucaccgguuuggcgaaacaaaaggaaauucugccccacuuauuauccgcgagcccuucauugcaugcgggccuaaggaauguaaacauuuugccuugacccacuacgcugcacagccaggcgguuauuacaacgggacgcgaggagaccguaauaagcugagacaucuaaucagcgucaagcucggcaaaauaccgacuguggagaacuccaucuuccacauggccgcuuggucaggcagugccugccaugaugggaaggaguggaccuauauuggaguugacggucccgauaauaacgcgcugcuuaaaaucaaguacggcgaagcauacacagacacuuaucacagcuacgccaauaacauucugaggacccaggagucugcuuguaauugcaucgggggaaacuguuauuugaugauaacagauggcuccgccucaggugugagcgaaugccgguuucucaaaauucgcgaggggagaaucauuaaggagaucuucccuaccggaaggaucaagcacacggaagaguguacuugcggcuuugcaaguaauaaaacaauugaaugugcuugccgggacaacucuuacaccgccaagcgcccauucgucaaacugaauguggagacugauacagcggaaauacgauuaaugugcaccgagacguaucuggacacccccagaccugaugacggcuccaucacagggccaugugagagcaacggagauaaggguucgggcgggauuaaaggaggcuuuguacaucaaaggauggccucuaagaucggucggugguacucccguacuaugucaaaaaccaagcgcauggggaugggccucuauguuaaguacgacggagaccccugggcagauagugacgcucuugccuucagcggcgugauggucuccauggaggaaccggggugguacucuuuuggauucgaaauaaaagauaagaaaugcgacgugccuuguauugguaucgagauggugcacgauggcgggaaggaaacauggcauagcgcugccacugcaaucuauugccugaugggaucaggccaguugcuaugggacaccgucacagguguuaacauggcccuguga

SEQ ID NO: 157080 - RNA, 1401 nt, Artificial Sequence; identical to SEQ ID NO: 156716
  derived and/or modified CDS sequence (opt3) from neuraminidase__InfluenzaB__AFJ80818

SEQ ID NO: 157081 - RNA, 1401 nt, Artificial Sequence; identical to SEQ ID NO: 156716
  derived and/or modified CDS sequence (opt3) from neuraminidase__InfluenzaB__AFJ80829

SEQ ID NO: 157082 - RNA, 1401 nt, Artificial Sequence; identical to SEQ ID NO: 157053
  derived and/or modified CDS sequence (opt3) from neuraminidase__InfluenzaB__AFJ80840

SEQ ID NO: 157083 - RNA, 1401 nt, Artificial Sequence; identical to SEQ ID NO: 157053
  derived and/or modified CDS sequence (opt3) from neuraminidase__InfluenzaB__AFJ80851

SEQ ID NO: 157084 - RNA, 1401 nt, Artificial Sequence
  derived and/or modified CDS sequence (opt3) from neuraminidase__InfluenzaB__AFJ80862
augcugcccagcaccauccagacacucacucuuuuccugacguccggcgggguguuguuaucucuguacgucucagccagucuaagcuaucuccuguacuccgacauucuucugaaguuuccuucuaccgagauaacagcuccaacuaugccguuggauugcgcaaacgccucgaauguucaagcgaugaacagaucagcuaccaaaggagugacacuccugcugcccgaaaccgaguggacuuauccuaggcucagcuguccagguaguacauuccagaaggccuuacugaucucuccccaccgguuuggcgaaaccaaaggaaauuccgcaccucuuauuauccgcgagccauucauugccugcgggcccaaggaauguaaacauuuugcuuugacgcacuacgcagcccagccuggcgguuauuacaacgggacucgaggagaccguaauaagcugagacaucuaaucagcguaaagcucggcaaaauaccaaccguggagaacuccaucuuccacauggcugccuggucaggcagugcgugccaugaugggaaggaguggacauauauuggagucgacgguccggauaauaacgcacugcuuaaaaucaaguacggcgaagccuacacugacaccuaucacagcuacgcuaauaacauucugaggacacaggagucugccuguaauugcaucgggggaaacuguuauuugaugauaaccgauggcuccgcaucaggugugagcgaaugccgguuucucaaaauucgcgaggggagaaucauuaaggagaucuuccccacgggaaggaucaagcacacugaagaguguacaugcggcuuugcuaguaauaaaaccauugaaugugccugccgggacaacucuuacacugcgaagcgcccuuucguuaaacugaauguggagacagauaccgccgaaauacgauuaaugugcacggagaccuaucuggacacaccaagacccgaugacggcuccaucacugggccuugugagagcaacggagauaaggguucgggcgggauuaaaggaggcuuuguccaucaaaggauggcaucuaagaucggucggugguacucccguaccaugucaaaaacagaacgcauggggaugggccucuaugugaaguacgacggagacccaugggcugauagugacgcccuuacuuucagcggcguaaugguuuccauggaggaacccgggugguacucuuuuggauucgagauaaaggauaaaaagugcgacgugccguguauugguaucgaaaugguccacgauggcgggaaagagaccuggcauagcgcugccacagcaaucuauugccugaugggaucaggccaguugcuaugggacaccgugacuggugugaacauggcccuguga

SEQ ID NO: 157085 - RNA, 1401 nt, Artificial Sequence
  derived and/or modified CDS sequence (opt3) from neuraminidase__InfluenzaB__AFJ80873
augcugcccagcaccauccagacacucacucuuuuccugacguccggcgggguguuguuaucucuguacgucucagccagucuaagccaccuccuguauuccgggauucuucugaaguuuccuucuaccgagauaacagcuccaacuaugccguuggacugcgcaaacgccucgaauguucaagcggugaacagaucagcuaccaaagguguaacacuccugcccccugaaccagaguggaccuaccccaggcugagcuguccuggcaguacuuuccagaaggcccucuuaaucuccccacaucgguuuggggaaacaaaaggaaauucugcaccccugauuauccgcgagccuuucauugccugcggcccaaaggaauguaaacacuuugcucuuacccauuaugcagcccagccggguggguacuauaacggaacgcgaggcgaucguaauaaguugagacaccugaucagcgugaagcuaggcaaaauacccacugucgagaacuccaucuuccauauggcugccuggucagggagugcgugccacgacggaaaggaguggaccuacauugguguggauggcccugacaauaacgcacuccugaaaaucaaguauggggaagccuacacagauacuuaccacagcuaugcuaauaacauucuuaggacccaggagucugccuguaauugcaucggaggcaacuguuaccugaugauaacagacgguuccgcaucagggguuagcgaaugccgguuuuugaaaauucgcgagggaagaaucauuaaggagaucuucccaaccggcaggaucaagcauacggaagaguguacuugcggcuuugcuaguaauaaaacaauugaaugugccugccgggauaacucuuauaccgcgaagcgccccuucgugaaacucaaugucgagacugacacagccgaaauacgacugaugugcaccgagacguacuuagauaccccuagaccagacgauggguccaucacaggacccugugagagcaacggugacaagggcucgggaggaauuaaaggcgguuuugugcaccaaaggauggcaucuaagaucgggcggugguauucccguacuaugucaaaaaccgaacgcaugggcaugggacuguacguaaaguaugauggcgacccgugggcugacagugaugcccucacauucagcgggguuaugguguccauggaggaaccuggaugguacucuuuugguuucgagauaaaggacaaaaagugcgauguccccuguauuggcaucgaaauggugcaugacgggggaaaagagacuuggcacagcgcugccaccgcaaucuacugccuuaugggcucaggucagcuguugugggauacagugaccggggucaacauggcccuauga

SEQ ID NO: 157086 - RNA, 1401 nt, Artificial Sequence
  derived and/or modified CDS sequence (opt3) from neuraminidase__InfluenzaB__AFJ80884
augcugcccagcaccauccagacacucacucuuuuccugacguccggcgggguguuguuaucucuguacgucucagccagucuaagcuaucuccuguacuccgacauucuucugaaguuuccuucuaccgagauaacagcuccaacuaugccguuggauugcgcaaacgccucgaauguucaagcggugaacagaucagcuaccaaaggaguaacacuccugcugcccgaaccugaguggaccuauccaaggcucagcugucccgguaguacuuuccagaaggccuuacugaucuccccucaccgguuuggcgaaacaaaaggaaauucugcaccacuuauuauccgcgagcccuucauugccugcgggccuaaggaauguaaacauuuugcuuugacccacuacgcagcccagccaggcgguuauuacaacgggacgcgaggagaccguaauaagcugagacaucuaaucagcgugaagcucggcaaaauaccgacugucgagaacuccaucuuccacauggcugccuggucaggcagugcgugccaugaugggaaggaguggaccuauauuggaguggacggucccgauaauaacgcacugcuuaaaaucaaguacggcgaagccuacacagacacuuaucacagcuacgcuaauaacauucugaggacccaggagucugccuguaauugcaucgggggaaacuguuauuugaugauaacagauggcuccgcaucagguguuagcaaaugccgguuucucaagauucgcgaagggagaaucauuaaggagaucuucccuaccggaaggaucaaacacacggaggaauguacuugcggcuuugcuaguaauaagacaauugagugugccugccgggacaacucuuacaccgcgaaacgcccauucgugaagcugaaugucgaaacugauacagccgagauacgauuaaugugcaccgaaacguaucuggacacccccagaccugaugacggcuccaucacagggccaugugagagcaacggagauaaagguucgggcgggauuaagggaggcuuugugcaucaaaggauggcaucuaaaaucggucggugguacucccguacuaugucaaagaccgagcgcauggggaugggccucuauguaaaguacgacggagaccccugggcugauagugacgcccuuacauucagcggcguuaugguguccauggaggaaccggggugguacucuuuuggauucgaaauaaaagauaagaaaugcgacgucccuuguauugguaucgagauggugcacgauggcgggaaggaaacuuggcauagcgcugccaccgcaaucuauugccugaugggaucaggccaguugcuaugggacacagugaccggugucaacauggcccuguga

SEQ ID NO: 157087 - RNA, 1401 nt, Artificial Sequence; identical to SEQ ID NO: 157052
  derived and/or modified CDS sequence (opt3) from neuraminidase__InfluenzaB__AFJ80895

SEQ ID NO: 157088 - RNA, 1401 nt, Artificial Sequence
  derived and/or modified CDS sequence (opt3) from neuraminidase__InfluenzaB__AFJ80917
augcugcccagcaccauccagacacucacucuuuuccugacguccggcgggguguuguuaucucuguacgucucagccagucuaagcuaucuccuguacuccgacauucuucugaaguuuccuucuaccgagauaacagcuccaacuaugccguuggauugcgcaaacgccucgaauguucaagcggugaacagaucagcuaccaaaggaguaacacuccugcugcccgaaccugaguggaccuauccaaggcucagcugucccgguaguacuuuccagaaggccuuacugaucuccccucaccgguuuggcgaaacaaaaggaaauucugcaccacuuauuauccgcgagcccuucauugccugcgggccuaaggaauguaaacauuuugcuuugacccacuacgcagcccagccaggcgguuauuacaacgggacgcgaggagaccguaauaagcugagacaucuaaucagcgugaagcucggcaaaauaccgacugucgagaacuccaucuuccacauggcugccuggucaggcagugcgugccaugaugggaaggaguggaccuauauuggaguggacggucccgauaauaacgcacugcuuaaaaucaaguacggcgaagccuacacagacacuuaucacagcuacgcuaauaacauucugaggacccaggagucugccuguaauugcaucgggggaaacuguuauuugaugauaacagauggcuccgcaucagguguuagcgaaugccgguuucucaaaauucgcgaggggagaaucauuaaggagaucuucccuaccggaaggaucaagcacacggaagaguguacuugcggcuuugcuaguaauaaaacaauugaauguaccugccgggacaacucuuacacugccaagcgcccauucgugaaacugaaugucgagacagauaccgcggaaauacgauuaaugugcacggagaccuaucuggacacacccagaccugaugacggcuccaucacugggccaugugagagcaacggagauaaggguucgggcgggauuaaaggaggcuuugugcaucaaaggauggccucuaagaucggucggugguacucccguaccaugucaaaaacagaacgcauggggaugggccucuauguaaaguacgacggagaccccugggcagauagugacgcucuuacuuucagcggcguuaugguguccauggaggaaccggggugguacucuuuuggauucgagauaaaggauaaaaagugcgacgucccuuguauugguaucgaaauggugcacgauggcgggaaagagaccuggcauagcgccgcuacagccaucuauugccugaugggaucaggccaguugcuaugggacaccgugacuggugucaacauggcacuguga

SEQ ID NO: 157089 - RNA, 1401 nt, Artificial Sequence
  derived and/or modified CDS sequence (opt3) from neuraminidase__InfluenzaB__AFJ80928
augcugcccagcaccauccagacacucacucuuuuccugacguccggcgggguguuguuaucucuguacgucucagccagucuaagcuaucuccuguacuccgacauucuucugaaguuuccuucuaccgagauaacagcuccaacuaugccguuggauugcgcaaacgccucgaauguucaagcggugaacagaucagcuaccaaaggaguaacacuccugcugcccgaaccugaguggaccuauccaaggcucagcugucccgguaguacuuuccagaaggccuuacugaucuccccucaccgguuuggcgaaacaaaaggaaauucugcaccacuuauuauccgcgagcccuucauugccugcgaaccuaaggaguguaaacauuuugcuuugacccacuacgcagcccagccagggggcuauuacaacgguacgcgaggggaccguaauaagcugagacaucuaaucagcgugaagcucggaaaaauaccgacugucgagaacuccaucuuccacauggcugccuggucaggcagugcgugccaugauggcaaggaauggaccuauauugggguggacggacccgauaauaacgcacugcuuaaaaucaaguacggugaggccuacacagacacuuaucacagcuacgcuaauaacauucugaggacccaggaaucugccuguaauugcaucggcgggaacuguuauuugaugauaacagauggauccgcaucaggcguuagcgagugccgguuucucaaaauucgcgaggguagaaucauuaaggaaaucuucccuaccgggaggaucaagcacacggaggaauguacuugcggauuugcuaguaauaaaacaauugagugugccugccgggacaacucuuacaccgcgaagcgcccauucgugaaacugaaugucgaaacugauacagccgagauacgauuaaugugcaccgagacguaucuggacacccccagaccugaugacggcuccaucacaggcccaugugaaagcaacggggauaagggaucggguggcauuaaagggggauuugugcaucaaaggauggcaucuaagaucggccggugguacucccguacuaugucaaaaaccgagcgcauggguauggggcucuauguaaaguacgacggcgaccccugggcugauagugacgcccuuacauucagcggaguuaugguguccauggaggaaccgggcugguacucuuuuggguucgaaauaaaggauaaaaagugcgacgucccuuguauuggaaucgagauggugcacgaugguggcaaagagacuuggcauagcgcugccaccgcaaucuauugccugauggggucaggacaguugcuaugggacacagugaccggcgucaacauggcccuguga

SEQ ID NO: 157090 - RNA, 1401 nt, Artificial Sequence
  derived and/or modified CDS sequence (opt3) from neuraminidase__InfluenzaB__AFJ80939
augcugcccagcaccauccagacacucacucuuuuccugacguccggcgggguguuguuaucucuguacgucucagccagucuaagcuaucuccuguacuccgacauucuucugaaguuuccuccaaccgagguuacagcuccgacuaugcccuuggauugcgcaaacgccucuaaugugcaagcgguaaacagaucggcuaccaaaggagugacacuccugcugccugaaccagaguggaccuaucccaggcucucauguccugguagcacuuuccagaaggccuuacugauaaguccacaccgguuuggcgaaacaaaaggaaauuccgcaccccuuaucauucgcgagccuuucaucgccugcgggccaaaggaauguaaacauuuugcuuugacccacuacgcagcccagccgggcgguuauuacaacgggacgcgaggagaccguaauaagcugagacaucuaauuucugucaagcucggcaaaauccccacuguggagaacagcauauuccacauggcugccugguccggcucagcgugccaugaugggaaggaguggaccuauaucggaguugacgguccugauaauaacgcacugcuuaaaauuaaguacggcgaagccuacacagacacuuaucacaguuacgcuaauaacauccugaggacccaggagagcgccuguaauugcauugggggaaacuguuauuugaugaucacagauggcucugcauccggugugucagaaugccgguuucucaaaauacgcgaggggagaauuaucaaggagauuuucccaaccggaaggaucaagcacacggaagaguguacuugcggcuuugcuagcaauaaaacaaucgaaugugccugccgggacaacaguuacaccgcgaagcgccccuucgucaaacugaauguggagacugauacagccgaaauucgauuaaugugcaccgagacguaucuggacaccccuagaccagaugacggcucuauaacagggcccugugaguccaacggagauaaggguagcggcgggaucaaaggaggcuuuguacaucaaaggauggcaucgaagauuggucggugguacucucguacuauguccaaaaccgaacgcauggggaugggccucuauguuaaguacgacggagacccgugggcugauucagacgcccuuacauucaguggcgugauggucagcauggaggaaccugggugguacuccuuuggauucgagaucaaggauaaaaagugcgacgugcccuguauagguauugaaauggugcacgauggcgggaaagagacuuggcauucugcugccaccgcaaucuauugccugaugggaagcggccaguugcuaugggacacagucaccgguguuaacauggcccuguga

SEQ ID NO: 157091 - RNA, 1401 nt, Artificial Sequence
  derived and/or modified CDS sequence (opt3) from neuraminidase__InfluenzaB__AFJ80950
augcugcccagcaccauccagacacucacucuuuuccugacguccggcgggguguuguuaucucuguacgucucagccagucuaagcuaucuccuguacuccgacauucuucugaaguuuucucaaaccgagauaacagcuccuaucaugccauuggauugcgcaaacgccucgaauguucaggcggugaacagaucagcugccaaaggaguaacucuccugcugccggaacccgaguggaccuauccuaggcucagcuguccagguaguacauuccagaaggcauuacugauuucuccccaccgguuuggcgaaaccaaaggaaauuccgccccucuuaucauucgcgagccauucaucgcuugcgggcccacugaauguaagcauuuugcauugacacacuacgccgcucagccuggcgguuauuacaacgggacccgagaggaccguaauaaacugagacaucuaauaagcgugaagcucggaaagaucccaacggucgagaacuccauuuuccacauggccgcguggucaggcagugcaugccaugauggcaaagaauggacuuauaucgggguggacggaccggauagcaaugcccugcuuaagauuaaauacggugaggcuuacaccgacacauaucacucuuacgccaagaacauccugaggacucaagaauccgcauguaauugcauaggcggggauuguuauuugaugauuaccgacggacccgcuucaggcaucagcgagugccgguuucucaaaauucgcgaggguagaaucaucaaggaaauuuucccuacagggaggguuaagcacaccgaggaauguacgugcggauuugccaguaacaaaacuauagagugugcgugccgggauaauucuuacacagccaagcgcccauucgugaaacugaacgucgaaaccgacacugcagagauccgauuaaugugcacagagaccuaucuggauacgcccagaccuaaugacggcuccauuaccggcccaugugaaagcgauggggacaagggaaacgguggcaucaaagggggauuugugcaucagaggauggcuucgaagauaggccggugguacucucguacaauguccaaaacuaagcgcauggguauggggcucuauguaaaguacgacggcgaucccuggaccgacucagaggcccuugcucugaguggaguuauggugagcauggaggaaccgggcugguacuccuucggguuugaaauuaaagauaagaaaugcgacgucccuuguaucggaaucgagauggugcacgaugguggcaagacaacuuggcauucugccgcaaccgccauuuauugcuugauggggagcggacagcuacugugggacacagugaccggcgucgauauggcucucuga

SEQ ID NO: 157092 - RNA, 1401 nt, Artificial Sequence; identical to SEQ ID NO: 157053
  derived and/or modified CDS sequence (opt3) from neuraminidase__InfluenzaB__AFJ80961

SEQ ID NO: 157093 - RNA, 1401 nt, Artificial Sequence; identical to SEQ ID NO: 156836
  derived and/or modified CDS sequence (opt3) from neuraminidase__InfluenzaB__AFJ80972

SEQ ID NO: 157094 - RNA, 1401 nt, Artificial Sequence; identical to SEQ ID NO: 156836
  derived and/or modified CDS sequence (opt3) from neuraminidase__InfluenzaB__AFJ80983

SEQ ID NO: 157095 - RNA, 1401 nt, Artificial Sequence; identical to SEQ ID NO: 156791
  derived and/or modified CDS sequence (opt3) from neuraminidase__InfluenzaB__AFJ80994

SEQ ID NO: 157096 - RNA, 1401 nt, Artificial Sequence; identical to SEQ ID NO: 156836
  derived and/or modified CDS sequence (opt3) from neuraminidase__InfluenzaB__AFJ81005

SEQ ID NO: 157097 - RNA, 1401 nt, Artificial Sequence; identical to SEQ ID NO: 156836
  derived and/or modified CDS sequence (opt3) from neuraminidase__InfluenzaB__AFJ84364

SEQ ID NO: 157098 - RNA, 1401 nt, Artificial Sequence
  derived and/or modified CDS sequence (opt3) from neuraminidase__InfluenzaB__AFJ90399
augcugcccagcaccauccagacacucacucuuuuccugacguccggcgggguguuguuaucucuguacgucucagccagucuaagcuaucuccuguacuccgacauucuucugaaguuuccuucuaccgagauaacagcuccaccgaugcccuuggauugcgcaaacgccucgaauguucaagcggugaacagaucagcuacuaaaggaguaacccuccugcugccugaaccagaguggacauaucccaggcucagcuguccugguaguaccuuccagcgggccuuacugaucuccccacaccgcuuuggcgaaacuaagggaaauucugcaccccuuauuauccgagagccuuucauugccugcgggccacgugaauguaaacauuuugcuuugacacacuacgcagcccagccgggcgguuauuacaacgggaccagaggagacaggaauaagcugcggcaucuaaucagcgugaaacucggcaagauacccacggucgagaacuccaucuuccacauggcugccuggucaggcagugcgugccaugaugggaaggaguggacuuauauuggaguggacgguccugauaauaacgcacugcuuaaaaucaaguacggcgaagccuacaccgacacauaucacagcuacgcuaauaacauucugcgcacucaggagucugccuguaauugcaucgggggaaacuguuauuugaugauaaccgauggcuccgcaucagguguuagcgaaugcagauuucucaaaauuagggaggggcggaucauuaaggagaucuucccaacaggacgcaucaaacacaccgaagaguguacgugcggcuuugcuaguaauaagacuauugaaugugccugccgagacaacucuuacacagcgaagagacccuucgugaaacugaaugucgagaccgauacugccgaaauaagguuaaugugcacagagaccuaucuggacacgccucggccagaugacggcuccaucaccgggcccugugagagcaacggagauaaggguucgggcgggauuaaaggaggcuuugugcaucaacguaugacaucuaagaucggucgcugguacuccagaacuaugucaaaaaccgaaaggauggggaugggccucuauguaaaguacgacggagacccgugggcagauagugacgcucuuacauucagcggcguuaugguguccauggaggaaccugggugguacucuuuuggauucgagauaaaagauaagaagugcgacguccccuguauugguaucgaaauggugcacgauggcgggaaagagacuuggcauagcgccgcuaccgccaucuauugccugaugggaucaggccaguugcuaugggacacagugaccggugucaacauggcacuguga

SEQ ID NO: 157099 - RNA, 1401 nt, Artificial Sequence
  derived and/or modified CDS sequence (opt3) from neuraminidase__InfluenzaB__AFJ90410
augcugcccagcaccauccagacacucacucuuuuccugacguccggcgggguguuguuaucucuguacgucucagccagucuaagcuaucuccuguacuccgacauucuucugaaguuuucucaaaccgagauaacagcuccuaucaugccauuggauugcgcaaacgccucgaauguucaggcggugaacagaucagcugccaaaggaguaacucuccugcugccgaagcccgaauggaccuauccuaggcucagcuguccagguaguacauuccagaaagcauuacugauuucuccccaccgguuuggcgagaccaagggaaauuccgccccucuuaucauucgcgaaccauucaucgcuugcgggcccacugaguguaaacauuuugcauugacacacuacgccgcucagccuggcgguuauuacaacgggacccgagaagaccguaauaaccugagacaucuaauaagcgugaagcucggaaagaucccaacggucgaaaauuccauuuuccacauggccgcguggucaggcagugcaugccaugauggcaaagaguggacuuauaucgggguggacggaccggauagcaacgcccugcuuaagauuaaauacggugaggcuuacaccgacacauaucacucuuacgccaagaauauccugaggacucaagaguccgcauguaacugcauaggcggggauuguuauuugaugauuaccgacggacccgcuucaggcaucagcgaaugccgguuucucaaaauucgcgaggguagaaucaucaaggagauuuucccuacagggaggguuaagcacaccgaagaguguacgugcggauuugccaguaauaaaacuauagaaugugcgugccgggauaacucuuacacagccaagcgcccauucgugaaacugaaugucgagaccgacacugcagaaauccgauuaaugugcacagagaccuaucuggauacgcccagaccuaacgacggcuccauuaccggcccaugugagagcgauggggacaagggaucggguggcaucaaagggggauuugugcaucagaggauggcuucuaagauaggccggugguacucccguacaaugucaaaaacuaagcgcauggguauggggcucuauguaaaguacgacggcgaucccuggaccgacagugaagcccuugcucugagcggaguuaugguguccauggaggaaccgggcugguacucuuucggguuugagauuaaagauaagaaaugcgacgucccuuguaucggaaucgaaauggugcacgaugguggcaagacaacuuggcauagcgccgcaaccgccauuuauugcuugauggggucaggacagcuacugugggacacagugaccggcgucgauauggcucucuga

SEQ ID NO: 157100 - RNA, 1401 nt, Artificial Sequence
  derived and/or modified CDS sequence (opt3) from neuraminidase__InfluenzaB__AFJ90432
augcugcccagcaccauccagacacucacucuuuuccugacguccggcgggguguuguuaucucuguacgucucaaccagucuaagcuaucuccuguacuccgacauucuucugaaguuuucucaaacagagauaacugccccuaucaugccauuggauugcgcuaacgcaucgaauguucaggccgugaacagaucagcggcuaaaggaguaacccuccugcugccggaacccgaguggacauauccuaggcucagcuguccagguaguaccuuccagaaggccuuacugauuucuccccaccgguuuggcgaaacuaaaggaaauuccgcaccucuuaucauucgcgagccauucaucgccugcgggcccacagaauguaagcauuuugcuuugacccacuacgcagcccagccuggcgguuauuacaacgggacgcgagaggaccguaauaaacugagacaucuaauaagcgugaagcucggaaagaucccaacugucgagaacuccauuuuccacauggcugccuggucaggcagugcgugccaugauggcaaagaauggaccuauaucgggguggacggaccggauagcaaugcacugcuuaagauuaaauacggugaggccuacacagacacuuaucacucuuacgcuaagaacauccugaggacccaagaauccgccuguaauugcauaggcggggauuguuauuugaugauuacagacggacccgcaucaggcaucagcgagugccgguuucucaaaauucgcgaggguagaaucaucaaggaaauuuucccuaccgggaggguuaagcacacggaggaauguacuugcggauuugcuaguaacaaaacaauagagugugccugccgggauaauucuuacaccgcgaagcgcccauucgugaaacugaacgucgaaacugacacagccgagauccgauuaaugugcaccgagacguaucuggauacccccagaccuaaugacggcuccauuacaggcccaugugaaagcgauggggacaagggaucggguggcaucaaagggggauuugugcaucagaggauggcaucuaagauaggccggugguacucccguacuaugucaaaaaccaagcgcauggguauggggcucuauguaaaguacgacggcgaucccuggacagacagugaggcucuugcccugagcggaguuaugguguccauggaggaaccgggcugguacucuuucggguuugaaauuaaagauaagaaaugcgacgucccuuguaucggaaucgagauggugcacgaugguggcaagacuaccuggcauagcgcugccacagcaauuuauugcuugauggggucaggacagcuacugugggacaccgugacuggcgucgauauggcccucuga

SEQ ID NO: 157101 - RNA, 1401 nt, Artificial Sequence; identical to SEQ ID NO: 157020
  derived and/or modified CDS sequence (opt3) from neuraminidase__InfluenzaB__AFJ90443

SEQ ID NO: 157102 - RNA, 1401 nt, Artificial Sequence
  derived and/or modified CDS sequence (opt3) from neuraminidase__InfluenzaB__AFJ90454
augcugcccagcaccauccagacacucacucuuuuccugacguccggcgggguguuguuaucucuguacgucucagccagucuaagcuaucuccuguacuccgacauucuucugaaguuuucucaaaccgagauaacagcuccuaucguuccauuggauugcgcaaacgccucgaaugugcaggcgguaaacagaucagcugccaaaggagugacucuccugcugccggaacccgaguggaccuauccuaggcucagcuguccagguaguacauuccagaaggcauuacugauuucuccccaccgguuuggcgaaaccaaaggaaauuccgccccucuuaucauucgcgagccauucaucgcuugcgggcccacugaauguaagcauuuugcauugacacacuacgccgcucagccuggcgaguauuacaacgguacccgagaggaccguaauaaacugagacaucuaauaagcgucaagcucgggaagaucccaacgguggaaaacuccauuuuccacauggccgcguggucaggaagugcaugccaugauggcaaagaguggacuuauaucggcguugacgggccggauagcaaugcccugcuuaagauuaaauacggagaggcuuacaccgacacauaucacucuuacgccaagaacauccugaggacucaagaauccgcauguaauugcauagguggcgauuguuauuugaugauuaccgacgggcccgcuucaggaaucagcgagugccgguuucucaaaauucgcgaaggcagaaucaucaaggagauuuucccuacagguagggugaagcacaccgaagaguguacgugcggguuugccaguaacaaaacuauagaaugugcgugccgggauaauucuuacacagccaagcgcccauucgucaaacugaacguggagaccgacacugcagagauccgauuaaugugcacagaaaccuaucuggauacgcccagaccuaaugacggauccauuaccggcccaugugagagcgauggcgacaaggggucgggagguaucaaaggcggguuuguacaucagaggauggcuucuaagauaggacggugguacucccguacaaugucaaaaacuaagcgcaugggcaugggucucuauguuaaguacgacggggaucccuggaccgacagugaagcccuugcucugagcggcgugauggucuccauggaggaaccgggaugguacucuuucggcuuugagauuaaagauaagaaaugcgacgugccuuguaucgggaucgagauggugcacgauggagguaagacaacuuggcauagcgccgcaaccgccauuuauugcuugaugggcucagggcagcuacugugggacacagucaccggaguugauauggcucucuga

SEQ ID NO: 157103 - RNA, 1401 nt, Artificial Sequence
  derived and/or modified CDS sequence (opt3) from neuraminidase__InfluenzaB__AFJ91042
augcugcccagcaccauccagacacucacucuuuuccugacguccggcgggguguuguuaucucuguacgucucagccagucuaagcuaucuccuguacuccgacauucuucugaaguuuucucaaaccgagauaacagcuccuaucaugccauuggauugcgcaaacgccucgaauguucaggcggugaacagaucagcugccaaaggaguaacucuccugauuccggaacccgaguggaccuauccuaggcugagcuguccagguaguacauuccagaaggcacucuuaaucucuccccaccgguuuggcgaaaccaaaggaaauuccgccccucugauuauccgcgagccauucauagcuugcgggcccacugaauguaagcauuuugcacuuacacacuacgccgcucagccuggcgguuauuacaacgggacccgagaggaccguaauaaauugagacaucugaucagcgugaagcuaggaaagauuccaacggucgagaacuccaucuuccacauggccgcguggucaggcagugcaugccaugauggcaaagaauggacuuauauugggguggacggaccggauagcaaugcccuccugaagaucaaauacggugaggcuuacaccgacacauaucacucuuacgccaagaacauacuuaggacucaagaauccgcauguaauugcauuggcggggauuguuaucugaugaucaccgacggacccgcuucaggcauuagcgagugccgguuuuugaaaauccgcgaggguagaaucauuaaggaaauauucccuacagggaggguuaagcacaccgaggaauguacgugcggauuugccaguaacaaaacuaucgagugugcgugccgggauaauucuuacacagccaagcgcccauucgugaaacucaacgucgaaaccgacacugcagagauucgacugaugugcacagagaccuauuuagauacgcccagaccuaaugacggcuccaucgcuggcccaugugaaagcgauggggacaagggaucggguggcauaaaagggggauuugugcaucagaggaugaccucuaagauuggccggugguacucccguacaaugucaaaaacuaagcgcauggguauggggcuguauguaaaguacgacggcgaucccuggaccgacagugaggcccucgcucuuagcggaguuaugguguccauggaggaaccgggcugguacucuuucggguuugaaaucaaagauaagaaaugcgacgucccuuguaucggaauugagauggugcacgaugguggcaagacaacuuggcauagcgccgcaaccgccaucuauugccugauggggucaggacaguugcuaugggacacagugaccggcgucgauauggcucuguga

SEQ ID NO: 157104 - RNA, 1401 nt, Artificial Sequence
  derived and/or modified CDS sequence (opt3) from neuraminidase__InfluenzaB__AFJ91053
augcugcccagcaccauccagacacucacucuuuuccugacguccggcgggguguuguuaucucuguacgucucagccagucuaagcuaucuccuguacuccgacauucuucugaaguuuucucaaaccgagauaacagcuccuaucaugccauuggauugcgcaaacgccucgaauguucaggcggugaacagaucagcugccaaagaaguaacucuccugcugccggagcccgaauggaccuauccuaggcucagcuguccaggaaguacauuccagaaggcauuacugauuucuccccaccgguuuggugagaccaaaggcaauuccgccccucuuaucauucgcgaaccauucaucgcuugcgggcccacugaguguaagcauuuugcauugacacacuacgccgcucagccuggaggcuauuacaacgguacccgagaggaccguaauaaacugagacaucuaauaagcgugaagcucgggaagaucccaacggucgaaaacuccauuuuccacauggccgcguggucaggaagugcaugccaugauggcaaagaguggacuuauaucggcguggacgggccggauagcaaugcccugcuuaagauuaaauacggagaggcuuacaccgacacauaucacucuuacgccaagaacauccugaggacucaagaauccgcauguaauugcauagguggcgauuguuauuugaugauuaccgacgggcccgcuucaggaaucagcgagugccgguuucucaaaauucgcgaaggcagaaucaucaaggagauuuucccuacagguaggguuaagcacaccgaagaguguacgugcggguuugccaguaacaaaacuauagaaugugcgugccgggauaauucuuacacagccaagcgcccauucgugaaacugaacgucgagaccgacacugcagagauccgauuaaugugcacagaaaccuaucuggauacgcccagaccuaaugacggauccauuaccggcccaugugagagcgauggcgacaaggggucgggagguaucaaaggcggguuugugcaucagaggauggcuucuaagauaggacggugguacucccguacaaugucaaaaacuaagcgcaugggcaugggucucuauguaaaguacgacggggaucccuggaccgacagugaagcccuugcucugagcggcguuaugguguccauggaggaaccgggaugguacucuuucggcuuugagauuaaagauaagaaaugcgacgucccuuguaucgggaucgagauggugcacgauggagguaagacaacuuggcauagcgccgcaaccgccauuuauugcuugaugggcucagggcagcuacugugggacacagugaccggagucgauauggcucucuga

SEQ ID NO: 157105 - RNA, 1401 nt, Artificial Sequence
  derived and/or modified CDS sequence (opt3) from neuraminidase__InfluenzaB__AFJ91075
augcugcccagcaccauccagacacucacucuuuuccugacguccggcgggguguuguuaucucuguacgucucagccagucuaagcuaucuccuguacuccgacauucuucugaaguuuucucaaaccgagauaacagcuccuaucaugccauuggauugcgcaaacgccucgaauguucaggcggugaacagaucagcugccaaaggaguaacucuccugcugccggaacccgaguggaccuauccuaggcucagcuguccagguaguacauuccagaaggcauuacugauuucuccccaccgguuuggcgaaaccaaaggaaauuccgccccucuuaucauucgcgagccauucaucgcuugcgggcccacugaauguaagcauuuugcauugacacacuacgccgcucagccuggcgguuauuacaacgggacccgagaggaccguaauaaacugagacaucuaauaagcgugaagcucggaaagaucccaacggucgagaacuccauuuuccacauggccgcguggucaggcagugcaugccaugauggcaaagaauggacuuauaucgggguggacggaccggauagcaauacccugcuuaagauuaaauacggugaggccuacacagacacuuaucacucuuacgcuaagaacauccugaggacccaagaauccgccuguaauugcauaggcggggauuguuauuugaugauuacagacggacccgcaucaggcaucagcgagugccgguuucucaaaauucgcgaggguagaaucaucaaggaaauuuucccuaccgggaggguuaagcacacggaggaauguacuugcggauuugcuaguaacaaaacaauagagugugccugccgggauaauucuuacaccgcgaagcgcccauucgugaaacugaacgucgaaacugacacagccgagauccgauuaaugugcaccgagacguaucuggauacccccagaccuaaugacggcuccauuacaggcccaugugaaagcgauggggacaagggaucggguggcaucaaagggggauuugugcaucagaggauggcaucuaagauaggccggugguacucccguacuaugucaaaaaccaagcgcauggguauggggcucuauguaaaguacgacggcgaucccuggacagacagugaggcucuugcccugagcggaguuaugguguccauggaggaaccgggcugguacucuuucggguuugaaauuaaagauaagaaaugcgacgucccuuguaucggaaucgagauggugcacgaugguggcaagacuaccuggcauagcgcugccacagcaauuuauugcuugauggggucaggacagcuacugugggacaccgugacuggcgucgauauggcccucuga

SEQ ID NO: 157106 - RNA, 1401 nt, Artificial Sequence; identical to SEQ ID NO: 156865
  derived and/or modified CDS sequence (opt3) from neuraminidase__InfluenzaB__AFJ91086

SEQ ID NO: 157107 - RNA, 1401 nt, Artificial Sequence; identical to SEQ ID NO: 156865
  derived and/or modified CDS sequence (opt3) from neuraminidase__InfluenzaB__AFJ91097

SEQ ID NO: 157108 - RNA, 1401 nt, Artificial Sequence; identical to SEQ ID NO: 156865
  derived and/or modified CDS sequence (opt3) from neuraminidase__InfluenzaB__AFJ91108

SEQ ID NO: 157109 - RNA, 1401 nt, Artificial Sequence; identical to SEQ ID NO: 156865
  derived and/or modified CDS sequence (opt3) from neuraminidase__InfluenzaB__AFJ91119

SEQ ID NO: 157110 - RNA, 1401 nt, Artificial Sequence; identical to SEQ ID NO: 156716
  derived and/or modified CDS sequence (opt3) from neuraminidase__InfluenzaB__AFJ91707

SEQ ID NO: 157111 - RNA, 1401 nt, Artificial Sequence
  derived and/or modified CDS sequence (opt3) from neuraminidase__InfluenzaB__AFK09801
augcugcccagcaccauccagacacucacucuuuuccugacguccggcgggguguuguuaucucuguacgucucagccagucuaagcuaucuccuguacuccgacauucuucugaaguuuucucaaaccgagauaacagcuccuacuaugccauuggauugcgcaaacgccucgaauguucaggcggugaacagaucagcuaccaaaggaguaacacuccugcugccggaacccgaguggaccuauccuaggcucagcuguccagguaguacuuuccagaaggccuuacugaucucuccccaccgguuuggcgaaacaaaaggaaauuccgcaccucuuauuauccgcgagccauucauugccugcgggcccaaggaauguaaacauuuugcuuugacccacuacgcagcccagccuggcgguuauuacaacgggacgcgagaggaccguaauaagcugagacaucuaaucagcgugaagcucggaaaaauaccaacugucgagaacuccaucuuccacauggcugccuggucaggcagugcgugccaugauggcagggaauggaccuauauugggguggacggaccggauagcaaugcacugcuuaagaucaaauacggugaggccuacacagacacuuaucacucuuacgcuaagaacauucugcggacccaagaauccgccuguaauugcaucggcggggauuguuauuugaugauaacagacggaucagcaagcggcauuagugagugccgcuuucucaaaaucagagaggguaggauuaucaaggaaaucuuccccaccgggcggguuaagcacacggaggaauguacuugcggauuugcuucuaacaaaacaauugagugugccugccgcgauaauuccuacaccgcgaagcgaccuuucgugaaacugaacgucgaaacugacacagccgagauaagauuaaugugcaccgagacguaucuggauaccccaaggcccaaugacggcagcaucacaggcccuugugaaucgaacggggaucggggaucugguggcauuaaagggggauuugugcaucagcguauggcauccaagaucggccgcugguacucaagaacuaugaguaagaccaaaaggauggguauggggcucuauguaaaguacgacggcgacccauggacagauagcgaggcucuugcccuguccggaguuauggugcccauggaggaaccgggcugguacucuuucggguuugaaauaaaggacaaaaagugcgaugucccuuguauuggaaucgagauggugcacgacgguggcaaaacuaccuggcauagcgcugccacagcaaucuauugcuugauggggucaggacagcuacugugggauaccgugacuggcgucgacauggcccucuga

SEQ ID NO: 157112 - RNA, 1401 nt, Artificial Sequence; identical to SEQ ID NO: 156840
  derived and/or modified CDS sequence (opt3) from neuraminidase__InfluenzaB__AFN54669

SEQ ID NO: 157113 - RNA, 1401 nt, Artificial Sequence; identical to SEQ ID NO: 156840
  derived and/or modified CDS sequence (opt3) from neuraminidase__InfluenzaB__AFN54680

SEQ ID NO: 157114 - RNA, 1401 nt, Artificial Sequence; identical to SEQ ID NO: 156865
  derived and/or modified CDS sequence (opt3) from neuraminidase__InfluenzaB__AFN54691

SEQ ID NO: 157115 - RNA, 1401 nt, Artificial Sequence; identical to SEQ ID NO: 156865
  derived and/or modified CDS sequence (opt3) from neuraminidase__InfluenzaB__AFN54702

SEQ ID NO: 157116 - RNA, 1401 nt, Artificial Sequence; identical to SEQ ID NO: 156865
  derived and/or modified CDS sequence (opt3) from neuraminidase__InfluenzaB__AFN54713

SEQ ID NO: 157117 - RNA, 1401 nt, Artificial Sequence; identical to SEQ ID NO: 156865
  derived and/or modified CDS sequence (opt3) from neuraminidase__InfluenzaB__AFN54724

SEQ ID NO: 157118 - RNA, 1401 nt, Artificial Sequence; identical to SEQ ID NO: 156865
  derived and/or modified CDS sequence (opt3) from neuraminidase__InfluenzaB__AFN54735

SEQ ID NO: 157119 - RNA, 1401 nt, Artificial Sequence; identical to SEQ ID NO: 156865
  derived and/or modified CDS sequence (opt3) from neuraminidase__InfluenzaB__AFN54746

SEQ ID NO: 157120 - RNA, 1401 nt, Artificial Sequence; identical to SEQ ID NO: 156865
  derived and/or modified CDS sequence (opt3) from neuraminidase__InfluenzaB__AFN54757

SEQ ID NO: 157121 - RNA, 1401 nt, Artificial Sequence; identical to SEQ ID NO: 156865
  derived and/or modified CDS sequence (opt3) from neuraminidase__InfluenzaB__AFN54768

SEQ ID NO: 157122 - RNA, 1401 nt, Artificial Sequence; identical to SEQ ID NO: 156865
  derived and/or modified CDS sequence (opt3) from neuraminidase__InfluenzaB__AFN54779

SEQ ID NO: 157123 - RNA, 1401 nt, Artificial Sequence; identical to SEQ ID NO: 156865
  derived and/or modified CDS sequence (opt3) from neuraminidase__InfluenzaB__AFN54790

SEQ ID NO: 157124 - RNA, 1401 nt, Artificial Sequence; identical to SEQ ID NO: 156865
  derived and/or modified CDS sequence (opt3) from neuraminidase__InfluenzaB__AFN54801

SEQ ID NO: 157125 - RNA, 1401 nt, Artificial Sequence; identical to SEQ ID NO: 156865
  derived and/or modified CDS sequence (opt3) from neuraminidase__InfluenzaB__AFN54812

SEQ ID NO: 157126 - RNA, 1401 nt, Artificial Sequence
  derived and/or modified CDS sequence (opt3) from neuraminidase__InfluenzaB__AFN54834
augcugcccagcaccauccagacacucacucuuuuccugacguccggcgggguguuguuaucucuguacgucucagccagucuaagcuaucuccuguacuccgacauucuucugaaguuuucuagaaccgagauaacagcuccuaucaugccauuggauugcgcaaacgccucgaauguucaagcggugaacaggucagcuacuaaaggaguaacccuccugcugccggaacccgaguggacauauccucggcucagcuguccagguaguaccuuccagaaggccuuacugauuucuccccaccgcuuuggcgaaacuaaaggaaauuccgcaccucuuaucauucgagagccauucaucgccugcgggcccaaggaauguaaacauuuugcuuugacacacuacgcagcccagccuggcgguuauuacaacgggacccgugaggacagaaauaagcugaggcaucuaauaagcgugaagcucggaaaaaucccaacggucgagaacuccauuuuccacauggcugccuggucaggcagugcgugccaugauggccgggaauggaucuauauugggguggacggaccggauagcaaugcacugcuuaagaucaaauacggugaggccuacacugacaccuaucacucuuacgcuaagaacauacugcgcacacaggaauccgccuguaauugcauuggcggggauuguuauuugaugaucacugacggacccgcaucaggcauuagcgagugcagauuucucaaaaucagggagggucggaucauuaaggaaauauucccuaccgggcgcguuaagcacacagaggaauguaccugcggauuugcuaguaacaaaacgaucgagugugccugccgagauaauucuuacacugcgaagagaccauucgugaaacugaacgucgaaacagacaccgccgagauuagguuaaugugcacugagacauaucuggauacgccccggccuaaugacggcuccaucaccggcccaugugaaagcaacggggauaagggaucggguggcauaaaagggggauuugugcaucaacguauggcaucuaagauuggccgcugguacuccagaaccaugucaaaaacaaagaggauggguauggggcucuauguaaaguacgacggcgaccccuggacugauagugaggcucuugcccugagcggaguuaugguguccauggaggaaccgggcugguacucuuucggguuugaaaucaaagacaagaaaugcgaugucccuuguaucggaauugagauggugcacgacgguggcaagaccacauggcauagcgcugccacugcaaucuauugcuugauggggucaggacagcuacugugggauaccgugacaggcgucaauaugacccucuga

SEQ ID NO: 157127 - RNA, 1401 nt, Artificial Sequence; identical to SEQ ID NO: 156865
  derived and/or modified CDS sequence (opt3) from neuraminidase__InfluenzaB__AFN54845

SEQ ID NO: 157128 - RNA, 1401 nt, Artificial Sequence
  derived and/or modified CDS sequence (opt3) from neuraminidase__InfluenzaB__AFN54856
augcugcccagcaccauccagacacucacucuuuuccugacguccggcgggguguuguuaucucuguacgucucagccagucuaagcuaucuccuguacuccgacauucuucugaaguuuucuagaaccgagauaacagcuccuaucaugccauuggauugcgcaaacgccucgaauguucaagcggugaacaggucagcuacuaaaggaguaacccuccugcugccggaacccgaguggacauauccucggcucagcuguccagguaguaccuuccagaaggccuuacugauuucuccccaccgcuuuggcgaaacuaaaggaaauuccgcaccucuuaucauucgagagccauucaucgccugcgggcccaaggaauguaaacauuuugcuuugacacacuacgcagcccagccuggcgguuauuacaacgggacccgugaggacagaaauaagcugaggcaucuaauaagcgugaagcucggaaaaaucccaacggucgagaacuccauuuuccacauggcugccuggucaggcagugcgugccaugauggccgggaauggacuuauaucgggguggacggaccggauagcaaugcacugcuuaagauuaaauacggugaggccuacaccgacacauaucacucuuacgcuaagaacauccugcgcacucaggaauccgccuguaauugcauaggcggggauuguuauuugaugauuaccgacggacccgcaucaggcguuagcgagugcagauuucucaaaaucagggagggucggauuaucaaggaaaucuucccuacagggcgcgugaagcacaccgaggaauguacgugcggauuugcuaguaacaaaacuauugagugugccugccgagauaauucuuacacagcgaagagaccauucgucaaacugaacguggaaaccgacacugccgagauaagguuaaugugcacagagaccuaucuggauacgccccggccuaaugacggcuccaucaccggcccaugugaaagcaacggggauaagggaucggguggcauuaaagggggauuuguacaucaacguauggcaucuaagaucggccgcugguacuccagaacaaugucaaaaacuaagaggauggguauggggcucuauguuaaguacgacggcgaccccuggaccgauagugaggcucuugcccugagcggagugauggucuccauggaggaaccgggcugguacucuuucggguuugaaauaaaagacaagaaaugcgaugugccuuguauuggaaucgagauggugcacgacgguggcaagacaacuuggcauagcgcugccaccgcaaucuauugcuugauggggucaggacagcuacugugggauacagccaccggcgucaauaugacucucuga

SEQ ID NO: 157129 - RNA, 1401 nt, Artificial Sequence; identical to SEQ ID NO: 156865
  derived and/or modified CDS sequence (opt3) from neuraminidase__InfluenzaB__AFN54867

SEQ ID NO: 157130 - RNA, 1401 nt, Artificial Sequence
  derived and/or modified CDS sequence (opt3) from neuraminidase__InfluenzaB__AFU34598
augcugcccagcaccauccagacacucacucuuuuccugacguccggcgggguguuguuaucucuguacgucucagccagucuaagcuaucuccuguacuccgacauucuucugaaguuuucuccuaccgagauaacagcuccaacuaugucguuggauugcgcaaacgccucaaauguucaagcggugaacagaagcgcuaccaaaggaguaacauuccuccugccggaacccgaguggaccuauccuaggcugaguuguccagguuccacuuuucagaaggcccucuuaaucucuccccaccgguucggcgaaacaaaagggaauagcgcaccucugauuauccgcgagccauuuauugccugcggacccaacgaauguaagcauuucgcucuuacccacuacgcagcccagccuggcgguuauuacaaugggacgcgaggagaccguaacaaauugagacaucugaucuccgugaagcuaggcaagauaccaacugucgaaaauucaaucuuucacauggcugccuggaguggcagcgcgugccaugaugggaaagaguggaccuauauuggaguggacgguccggauaacaaugcacuccugaagguuaaauacggcgaggccuacacagacacuuaucacucuuacgcuaacaagauccuuaggacccgggaguccgccuguaauugcauugggggaaacuguuaucugaugaucacagauggcucagcaagcggugugagugaaugccgcuucuugaaaauaagagucgggaggauuaucaaggagauuuuucccaccggacgggugaagcacacggaggaauguacuugcggcuucgcuucuaauaaaacaaucgagugugccugccgcgacaacuccuacaccgcgaagcgaccuuuuguaaaacucaauguugaaacugauacagccgagaucagacugaugugcaccgacacguauuuagauaccccaaggcccgacgauggcagcauuacagggccuugugaaucgaacggagacaaggguucuggcgggauaaaaggaggcuucgugcaucagcggauggaguccaagaucggucguugguacucacgcacuaugaguaaaaccgagagaauggggaugggccuguaugucaaguacgacggagauccaugggcagacagcgaugcucucgccuuuuccggcgugauggugucuaugaaggaacccgggugguacagcuucggauucgagauuaaagacaagaaaugcgaugucccguguaucgguauagaaaugguucacgacggcgggaaggagacauggcauucagcugccacugcaauuuauugccuuaugggaaguggccaacuguugugggauaccgugacagguguagacguggcccuauga

SEQ ID NO: 157131 - RNA, 1401 nt, Artificial Sequence
  derived and/or modified CDS sequence (opt3) from neuraminidase__InfluenzaB__AFU34609
augcugcccagcaccauccagacacucacucuuuuccugacguccggcgggguguuguuaucucuguacgucucagcccuacucaguuaucugcuuuacagcgacauucuguugaaguuuuccccuaccgagauaacagcuccaacuaugucucucgauugcgcaaacgccucgaauguucaagcggugaacagaucagcuaccaggggaguaacauuccugcugccggaacccgagugggccuauccucggcucagcuguccagguaguaccuuucagaaagcauuacugaucucuccccaccgcuucggcgaaacuaagggaaauuccgccccucuuauuauccgagagccauuuauugcuugcgggcccaacgaauguaaacauuucgcauugacacacuacgccgcucagccuggcgguuauuacaaugggacccguggagacagaaacaagcugaggcaucuaaucagcgugaaacucggcaagauaccaacggucgaaaauuccaucuuucacauggccgcguggucaggcagugcaugccaugaugggaaggaguggacuuauauuggaguggacgguccggauaacgacgcccugcuuaaaguuaaguacggcgaggcuuacaccgauacauaucacagcuacgccaauaaaauccugcggacucaggagucugcauguaacugcauugggggaaauuguuauuugaugaucaccgacggcuccgcuucaggugugagcgaaugccgcuuccucaagauaagagaggggaggauuaucaaagagauuuuucccacaggacgggucaagcacaccgaagaguguacgugcggcuucgccaguaacaagacuaucgaaugugcgugccgcgauaauucuuacacagccaaacgaccuuuugugaagcugaacguagagaccgacacugcagaaaucagauuaaugugcacagauaccuaucuggacacgccaaggcccgaugacggcuccauuaccgggccuugugagagcaauggagacaaagguucgggcgggauaaagggaggcuucguucaucaacggauggagucuaaaaucggucguugguacucccgcacaaugucaaagacugaaagaauggggaugggccucuaugugaaauacgauggagacccaugggcugauagugacgcccuugcuuuuagcggcgucaugguguccaugaaggagcccgggugguacucuuucggauucgaaauuaaggauaaaaagugcgacgugccguguaucgguauagagaugguccacgauggcgggaaagaaaccuggcauagcgccgcaacagccauuuauugccugaugggaucaggccaguugcuaugggacacuguuaccgguguggauauggcucuguga

SEQ ID NO: 157132 - RNA, 1401 nt, Artificial Sequence
  derived and/or modified CDS sequence (opt3) from neuraminidase__InfluenzaB__AFU34620
augcugcccagcaccauccagacacucacucuuuuccugacguccggcgggguguuguuaucucuguacgucucagcccuacucaguuaucugcuuuacagcgacauucuguugaaguuuuccccuaccgagauaacagcuccaacuaugucucucgauugcgcaaacgccucgaauguucaagcggugaacagaucagcuaccaggggaguaacauuccugcugccggaacccgaguggaccuauccucggcucagcuguccagguaguacuuuucagaaagccuuacugaucucuccccaccgcuucggcgaaacaaagggaaauuccgcaccucuuauuauccgagagccauuuauugccugcgggcccaacgaauguaaacauuucgcuuugacccacuacgcagcccagccuggcgguuauuacaaugggacgcguggagacagaaacaagcugaggcaucuaaucagcgugaaacucggcaagauaccaacugucgaaaauuccaucuuucacauggcugccuggucaggcagugcgugccaugaugggaaggaguggaccuauauuggaguggacgguccggauaacgacgcacugcuuaaaguuaaguacggcgaggccuacacagauacuuaucacagcuacgcuaauaaaauccugcggacccaggagucugccuguaacugcauugggggaaauuguuauuugaugaucacagacggcuccgcaucaggugugagcgaaugccgcuuccucaagauaagagaggggaggauuaucaaagagauuuuucccaccggacgggucaagcacacggaagaguguacuugcggcuucgcuaguaacaagacaaucgaaugugccugccgcgauaauucuuacaccgcgaaacgaccuuuugugaagcugaacguagagacugacacagccgaaaucagauuaaugugcaccgauacguaucuggacaccccaaggcccgaugacggcuccauuacagggccuugugagagcaauggagacaaagguucgggcgggauaaagggaggcuucguucaucaacggauggagucuaaaaucggucguugguacucccgcacuaugucaaagaccgaaagaauggggaugggccucuaugugaaauacgauggagacccaugggcagauagugacgcucuugccuuuagcggcgucaugguguccaugaaggagcccgggugguacucuuucggauucgaaauuaaggauaaaaagugcgacgugccguguaucgguauagagaugguccacgauggcgggaaagaaacauggcauagcgcugccacugcaauuuauugccugaugggaucaggccaguugcuaugggacaccguuacagguguggauauggcccuguga

SEQ ID NO: 157133 - RNA, 1401 nt, Artificial Sequence
  derived and/or modified CDS sequence (opt3) from neuraminidase__InfluenzaB__AFU34631
augcugcccagcaccauccagacacucacucuuuuccugacguccggcgggguguuguuaucucuguacgucucagcccuacucaguuaucugcuuuacagcgacauucuguugaaguuuuccccuaccgagauaacagcuccaacuaugucucucgauugcgcaaacgccucgaauguucaagcggugaacagaucagcuaccaggggaguaacauuccugcugccggaacccgaguggaccuauccucggcucagcuguccagguaguacuuuucagaaagccuuacugaucucuccccaccgcuucggcgaaacaaagggaaauuccgcaccucuuauuauccgagagccauuuauugccugcgggcccaacgaauguaaacauuucgcuuugacccacuacgcagcccagccuggcgguuauuacaaugggacgcguggagacagaaacaagcugaggcaucuaaucagcgugaaacucggcaagauaccaacugucgaaaauuccaucuuucacauggcugccuggucaggcagugcgugccaugaugggaaggaguggaccuauauuggaguggacgguccggauaacgacgcacugcuuaaaguuaaguacggcgaggccuacacagauacuuaucacagcuacgcuaauaaaauccugcggacccaggagucugccuguaacugcauucgcgggaauuguuauuugaugaucacagacggauccgcaucaggcgugagcgaaugcagauuccucaagauaagggagggucggauuaucaaagagauuuuucccaccgggcgcgucaagcacacggaagaguguacuugcggauucgcuaguaacaagacaaucgaaugugccugccgagauaauucuuacaccgcgaaaagaccuuuugugaagcugaacguagagacugacacagccgaaaucagguuaaugugcaccgauacguaucuggacaccccacggcccgaugacggcuccauuacaggcccuugugagagcaauggggacaaaggaucggguggcauaaaagggggauucguucaucaacguauggagucuaagaucggccgcugguacuccagaacuaugucaaagaccgaaaggauggguauggggcucuaugugaaauacgauggcgacccaugggcagauagugacgcucuugccuuuagcggagucaugguguccaugaaggagcccggcugguacucuuucggguucgaaauuaaggauaaaaagugcgacgugccguguaucggaauagagaugguccacgaugguggcaaagaaacauggcauagcgcugccacugcaauuuauugccugauggggucaggacaguugcuaugggacaccguuacaggcguggauauggcccuguga

SEQ ID NO: 157134 - RNA, 1401 nt, Artificial Sequence
  derived and/or modified CDS sequence (opt3) from neuraminidase__InfluenzaB__AFU34642
augcugcccagcaccauccagacacucacucuuuuccugacguccggcgggguguuguuaucucuguacgucucagccagucuaagcuaucuccuguacuccgacauucuucugaaguuuucuccuaccgagauaacagcuccaacuaugucguuggauugcgcaaacgccucaaauguucaagcggugaacagaagcgcuaccaaaggaaugacauuccuccugccggaacccgaguggaccuauccuaggcugaguuguccagguuccacuuuucagaaggcccucuuaaucucuccccaccgguucggcgaaacaaaagggaauagcgcaccucugauuauccgcgagccauuuauugccugcggacccaacggcuguaagcauuucgcucuuacccacuacgcagcccagccugguggguauuacaauggaacgcgaggcgaccguaacaaauugagacaucugaucuccguaaagcuaggcaagauaccaacuguggaaaauucaaucuuucacauggcugccuggagugggagcgcgugccaugauggaaaagaguggaccuauauuggugucgacggcccggauaacaaugcacuccugaaggugaaauacggggaggccuacacagacacuuaucacucuuacgcuaacaagauccuuaggacccaggaauccgccuguaauugcauuggaggcaacuguuaucugaugaucacagaugguucagcaagcgggguuagugagugccgguucuugaaaauacgcgaaggaagaauuaucaaggagauuuuucccaccggcagggugaagcacacggaggaauguacuugcggcuucgcuucuaauaaaacaaucgagugugccugccgggacaacuccuacaccgcgaagcgcccuuuugucaaacucaauguggaaacugauacagccgagauccgacugaugugcaccgacacguauuuagauaccccaagacccgacgaugggagcauuacaggaccuugugaaucguacggugacaagggcucugggggaauaaaaggcgguuucguacaucaaaggauggaguccaagaucgggcggugguauucacguacuaugaguaaaaccgagcgcaugggcaugggacuguacguuaaguacgacggcgauccaugggcagacagcgaugcucucgccuuuuccggggugauggucucuaugaaggaacccggaugguauagcuucgguuucgagauuaaagacaagaaaugcgaugugccguguaucggcauagaaauggugcacgacgggggaaaggagacauggcauucagcugccacugcaauuuacugccuuaugggcaguggucagcuguugugggauaccgucacagggguugacauggcccuauga

SEQ ID NO: 157135 - RNA, 1401 nt, Artificial Sequence
  derived and/or modified CDS sequence (opt3) from neuraminidase__InfluenzaB__AGB97261
augcugcccagcaccauccagacacucacucuuuuccugacguccggcgggguguuguuaucucuguacgucucagccagucuaagcuaucuccuguacuccgacaugcuucugaaguuuucuagaaccgagauuacagcuccuauaaugccauuggauugcgcaaacgccucgaauguucaagcggugaacaggucagcuacuaaaggaguaacccuccugcugccggaacccgaguggacauauccucggcucagcuguccagguaguaccuuccagaaggccuuacugaucucuccccaccgcuuuggcgaaacuaaaggaaauuccgcaccucuuauuauccgagagccauucauugccugcgggcccaaggaauguaaacauuuugcuuugacacacuacgcagcccagccuggcgguuauuacaacgggacccgugaggacagaaauaagcugaggcaucuaaucagcgugaagcucggaaaaauaccaacggucgagaacuccaucuuccacauggcugccuggucaggcagugcgugccaugauggccgggaauggacuuauauugggguggacggaccggauagcaaugcacugcuuaagaucaaauacggugaggccuacaccgacacauaucacucuuacgcuaagaacauucugcgcacucaggaauccgccuguaauugcaucggcggggauuguuauuugaugauaaccgacggacccgcaucaggcauuagcgagugcagauuucucaaaaucagggagggucggauuaucaaggaaaucuucccuacagggcgcguuaagcacaccgaggaauguacgugcggauuugcuaguaacaaaacuauugagugugccugccgagauaauucuuacacagcgaagagaccauucgugaaacugaacgucgaaaccgacacugccgagauaagguuaaugugcacagagaccuaucuggauacgccccggccuaaugacggcuccaucaccggcccaugugaaagcaacggggauaagggaucggguggcauuaaagggggauuugugcaucaacguauggcaucuaagaucggccgcugguacuccagaacaaugucaaaaacuaagaggauggguauggggcucuauguaaaguacgacggcgaccccuggaccgauagugaggcucuugcccugagcggaguuaugguguccauggaggaaccgggcugguacucuuucggguuugaaauaaaagacaagaaaugcgaugucccuuguauuggaaucgagauggugcacgacgguggcaagacaacuuggcauagcgcugccaccgcaaucuauugcuugauggggucaggacagcuacugugggauacagugaccggcgucaauaugacucucuga

SEQ ID NO: 157136 - RNA, 1401 nt, Artificial Sequence
  derived and/or modified CDS sequence (opt3) from neuraminidase__InfluenzaB__AGB97267
augcugcccagcaccauccagacacucacucuuuuccugacguccggcgggguguuguuaucucuguacgucucagccagucuaagcuaucuccuguacuccgacauucuucugaaguuuucucaaaccgagauaacagcuccuaucaugccauuggauugcacuaacgcaucgaauguucaggccgugaacagaucagcggcuaaaggaguaacccuccugcugccggaacccgaguggacauauccuaggcucagcuguccagguaguaccuuccagaaggccuuacugauuucuccccaccgguuuggcgaaaucaaaggaaauuccgcaccucuuauuauccgcgagccauucauagccugcgggcccacugaauguaagcauuuugcuuugacacacuacgcagcccagccuggcgguuauuacaacgggacccgagaggaccguaauaaacugagacaucuaaucagcgugaagcucggaaagauuccaacggucgagaacuccaucuuccacauggcugccuggucaggcagugcgugccaugauggcaaagaauggacuuauauugggaucgacggaccggauagcaaugcacugcuuaagauaaaauacggugaggccuacaccgacacauaucacucuuacgcuaagaacauucugaggacucaagaauccgccuguaauugcaucggcggggauuguuauuugaugauuaccgacggacccgcaucaggcgugagcgagugccgguuucucaaaauccgcgaggguagaaucauuaaggaaauauucccuacagggaggguuaagcacaccgaggaauguacgugcggauuugcuaguaacaaaacuaucgagugugccugccgggauaaucgcuacacagcgaagcgaccauucgugaaacugaacgucgaaaccgacacugccgagauuagauuaaugugcacagagaccuaucuggauacgcccaggccuaaugacggcucuaucaccggcccaugugaauccgauggggacaagggaagcgguggcauaaaagggggauuugugcaucagcggauggcaucgaagauuggccguugguacucucgcacaauguccaaaacuaagagaauggguauggggcucuauguaaaguacgacggcgaucccuggaccgacucagaggcucuugcccugaguggaguuauggugagcauggaggaaccgggcugguacuccuucggguuugaaaucaaagauaagaaaugcgacgucccuuguaucggaauugagauggugcacgaugguggcaagacaacuuggcauucugcugccaccgcaaucuauugcuugauggggagcggacagcuacugugggacacagugaccggcgucgauauggcccucuga

SEQ ID NO: 157137 - RNA, 1401 nt, Artificial Sequence; identical to SEQ ID NO: 156865
  derived and/or modified CDS sequence (opt3) from neuraminidase__InfluenzaB__AGR54784

SEQ ID NO: 157138 - RNA, 1401 nt, Artificial Sequence; identical to SEQ ID NO: 156730
  derived and/or modified CDS sequence (opt3) from neuraminidase__InfluenzaB__AGX15491

SEQ ID NO: 157139 - RNA, 1401 nt, Artificial Sequence
  derived and/or modified CDS sequence (opt3) from neuraminidase__InfluenzaB__AGX15533
augcugcccagcaccauccagacacucacucuuuuccugacguccggcgggguguuguuaucucuguacgucucagccagucuaagcuaucuccuguacuccgacauucuucugaaguuuucuccuaccgagauaacagcuccaacuaugccguuggauugcgcaaacgccucgaauguucaagcggugaacagaucagcuaccaaaggaguaacacuccugcugcccgaaccugaguggaccuauccaaggcucagcugucccgguaguacuuuccagaaggccuuacugaucuccccucaccgguuuggcgaaacaaaaggaaauucugcaccacuuauuauccgcgagcccuucauugccugcgggccuaacgaauguaagcauuuugcuuugacccacuacgcagcccagccaggcgguuauuacaaugggaaacgaggagaccguaacaagcugagacaucuaaucagcgugaagcucggcaaaauaccgacggucgaaaauuccaucuuccacauggcugccuggucaggcagugcgugccaugaugggaaggaguggacuuauauuggaguggacggucccgauaacaaugcacugcuuaaaaucaaguacggcgaggccuacaccgacacauaucacagcuacgcuaacaauauucugaggacucaggagucugccuguaacugcaucgggggaaauuguuauuugaugauaaccgauggcuccgcaucagguguuagcgaaugccgguuucucaaaauucgcgaggggagaaucauuaaggagaucuucccuacaggaagggugaagcacaccgaagaguguacgugcggcuuugcuaguaacaaaacuaucgaaugugccugccgggacaauucuuacacagcgaagcgcccauucgucaaacugaacguggagaccgauacugccgaaauucgauuaaugugcacagacaccuaucuggauacgcccagaccugacgauggcuccauaaccgggccaugugagagcaacggagacaaggguucgggcgggaucaaaggaggcuuuguacaucaaaggauggcaucuaagguuggucggugguacucccguacaaugucaaaaacugagcgcauggggaugggccucuaugugaaguacgacggagaucccugggcugacagugaugcccuugcuuucagcggcgucaugguguccaugaaggaaccggggugguacucuuuuggauucgagauuaaagacaagaaaugcgaugugccuuguaucgguauagaaaugguccacgacggcgggaaggagaccuggcauagcgccgcaacagccauuuauugccugaugggaucaggccaguugcuaugggauacuguuaccgguguggacauggcucuguga

SEQ ID NO: 157140 - RNA, 1401 nt, Artificial Sequence; identical to SEQ ID NO: 156683
  derived and/or modified CDS sequence (opt3) from neuraminidase__InfluenzaB__AGX15545

SEQ ID NO: 157141 - RNA, 1401 nt, Artificial Sequence; identical to SEQ ID NO: 156683
  derived and/or modified CDS sequence (opt3) from neuraminidase__InfluenzaB__AGX15556

SEQ ID NO: 157142 - RNA, 1401 nt, Artificial Sequence
  derived and/or modified CDS sequence (opt3) from neuraminidase__InfluenzaB__AGX15567
augcugcccagcaccauccagacacucacucuuuuccugacguccggcgggguguuguuaucucuguacgucucagccagucuaagcuaucuccuguacuccgacauucuucugaaguuuccuucuaccgagauaacagcuccaacuaugccguuggauugcgcaaacgccucgaauguucaagcggugaacagaucagcuaccaaaggaguaacacuccugcugcccgaaccugaguggaccuauccaaggcucagcugucccgguaguacuuuccagaaggccuuacugaucuccccucaccgguuuggcgaaacaaaaggaaauucugcaccacuuauuauccgcgagcccuucauugccugcgggccuaaggaauguaaacauuuugcuuugacccacuacgcagcccagccaggcgguuauuacaacgggacgcgaggagaccguaauaagcugagacaucuaaucagcgugaagcucggcaaaauaccgacugucgagaacuccaucuuccacauggcugccuggucaggcagugcgugccaugaugggaaggaguggaccuauauuggaguggacggucccgauaauaacgcacugcuuaaaaucaaguacggcgaagccuacacagacacuuaucacagcuacgcuaauaacauucugaggacccaggagucugccuguaauugcaucgggggaaacuguuauuugaugauaacagauggcuccgcaucagguguuagcgaaugccgguuucucaaaauucgcgaggggagaaucauuaaggagaucuucccuaccggaaggaucaagcacacggaagaguguacuugcggcuuugcuaguaauaaaacaauugaaugugccugccgggacaacucuuacaccgcgaagcgcccauucgugaaacugaaugucgagacugauacagccgaaauacgauuaaugugcaccgagacguaucuggacacccccagaccugaugacggcuccaucacagggccaugugagagcaacggagauaaggguucgggcgggauuaaaggaggcuuugugcaucaaaggauggcaucuaagaucggucggugguacucccguacuaugucaaaaaccgaacgcauggggaugggccucuauguaaaguacgacggagaccccugggcugauagugacgcccuugcuuucagcggcguuaugguguccauggaggaaccggggugguacucuuuuggauucgagauaaaggauaaaaagugcgacgucccuuguauugguaucgaaauggugcacgauggcgggaaagagacauggcauagcgccgcaacugccaucuauugccugaugggaucaggccaguugcuaugggacaccgugacaggugucaacauggcucuguga

SEQ ID NO: 157143 - RNA, 1401 nt, Artificial Sequence; identical to SEQ ID NO: 156683
  derived and/or modified CDS sequence (opt3) from neuraminidase__InfluenzaB__AGX15578

SEQ ID NO: 157144 - RNA, 1401 nt, Artificial Sequence; identical to SEQ ID NO: 156683
  derived and/or modified CDS sequence (opt3) from neuraminidase__InfluenzaB__AGX15589

SEQ ID NO: 157145 - RNA, 1401 nt, Artificial Sequence; identical to SEQ ID NO: 156889
  derived and/or modified CDS sequence (opt3) from neuraminidase__InfluenzaB__AGX15600

SEQ ID NO: 157146 - RNA, 1401 nt, Artificial Sequence; identical to SEQ ID NO: 156889
  derived and/or modified CDS sequence (opt3) from neuraminidase__InfluenzaB__AGX15611

SEQ ID NO: 157147 - RNA, 1401 nt, Artificial Sequence; identical to SEQ ID NO: 157009
  derived and/or modified CDS sequence (opt3) from neuraminidase__InfluenzaB__AGX15644

SEQ ID NO: 157148 - RNA, 1401 nt, Artificial Sequence; identical to SEQ ID NO: 157009
  derived and/or modified CDS sequence (opt3) from neuraminidase__InfluenzaB__AGX15655

SEQ ID NO: 157149 - RNA, 1401 nt, Artificial Sequence; identical to SEQ ID NO: 157009
  derived and/or modified CDS sequence (opt3) from neuraminidase__InfluenzaB__AGX15666

SEQ ID NO: 157150 - RNA, 1401 nt, Artificial Sequence; identical to SEQ ID NO: 157009
  derived and/or modified CDS sequence (opt3) from neuraminidase__InfluenzaB__AGX15679

SEQ ID NO: 157151 - RNA, 1401 nt, Artificial Sequence
  derived and/or modified CDS sequence (opt3) from neuraminidase__InfluenzaB__AGX15690
augcugcccagcaccauccagacacucacucuuuuccugacguccggcgggguguuguuaucucuguacgucucagccagucuaagcuaucuccuguacuccgacauucuucugaaguuuucuccuaccgagauaacagcuccaacuaugccguuggauugcgcaaacgccucgaauguucaagcggugaacagaucagcuaccaaaggaguaacacuccugcugcccgaaccugaguggaccuauccaaggcucagcugucccgguaguacuuuccagaaggccuuacugaucuccccucaccgguuuggcgaaacaaaaggaaauucugcaccacuuauuauccgcgagcccuucauugccugcgggccuaacgaauguaagcauuuugcuuugacccacuacgcagcccagccaggcgguuauuacaaugggacgcgaggagaccguaacaaacugagacaucuaaucagcgugaagcucggcaagauaccgacugucgaaaauuccaucuuccacauggcugccuggucaggcagugcgugccaugaugggaaagaguggaccuauauuggaguggacggucccgauaacaaugcacugcuuaagguuaaauacggcgaggccuacacagacacuuaucacagcuacgcuaacaagauccugaggacccaggagucugccuguaauugcauugggggaaacuguuauuugaugaucacagauggcuccgcaucaggugugagcgaaugccgguuucucaaaauacgcgaggggagaauuaucaaggagauuuucccuaccggaagggucaagcacacggaagaguguacuugcggcuuugcuaguaauaaaacaaucgaaugugccugccgggacaacucuuacaccgcgaagcgcccauucgugaaacugaauguagagacugauacagccgaaauccgauuaaugugcaccgacacguaucuggauacccccagaccuaacgacggcuccauuacagggccaugugagagcaacggagauaaggguucgggcgggauaaaaggaggcuuuguucaucaaaggaugaagucuaaaaucggucggugguacucccguacuaugucaaagaccgagcgcauggggaugggccucuaugugaaguacgacggagaccccugggcagauagugacgcucuugccuucagcggcgucaugguguccaugaaagaaccggggugguacucuuuuggauucgagauuaaggauaaaaagugcgacgugccuuguaucgguauagaaaugguccacgauggcgggaaagagacauggcauagcgcugccacugcaauuuauugccugaugggaucaggccaguugcuaugggacaccguuacagguguggauauggcccuguga

SEQ ID NO: 157152 - RNA, 1401 nt, Artificial Sequence; identical to SEQ ID NO: 157009
  derived and/or modified CDS sequence (opt3) from neuraminidase__InfluenzaB__AGX15701

SEQ ID NO: 157153 - RNA, 1401 nt, Artificial Sequence
  derived and/or modified CDS sequence (opt3) from neuraminidase__InfluenzaB__AGX15712
augcugcccagcaccauccagacacucacucuuuuccugacguccggcgggguguuguuaucucuguacgucucagccagucuaagcuaucuccuguacuccgacauucuucugaaguuuucuccuaccgagauaacagcuccaacuaugccguuggauugcgcaaacgccucgaauguucaagcggugaacagaucagcuaccaaaggaguaacacuccugcugcccgaaccugaguggaccuauccaaggcucagcugucccgguaguacuuuccagaaggccuuacugaucuccccucaccgguuuggcgaaccaaaaggaaauucugcaccccuuauuauccgcgagccuuucauugccugcgggccaaacgaauguaagcauuuugcuuugacacacuacgcagcccagccgggcgguuauuacaaugggacccgaggagaccguaacaaacugagacaucuaaucagcgugaagcucggcaagauacccacggucgaaaauuccaucuuccacauggcugccuggucaggcagugcgugccaugaugggaaagaguggacuuauauuggaguggacgguccugauaacaaugcacugcuuaagguuaaauacggcgaggccuacaccgacacauaucacagcuacgcuaacaagauccugaggacucaggagucugccuguaauugcauugggggaaacuguuauuugaugaucaccgauggcuccgcaucaggugugagcgaaugccgguuucucaaaauacgcgaggggagaauuaucaaggagauuuucccaacaggaagggucaagcacaccgaagaguguacgugcggcuuugcuaguaauaaaacuaucgaaugugccugccgggacaacucuuacacagcgaagcgccccuucgugaaacugaauguagagaccgauacugccgaaauccgauuaaugugcacagacaccuaucuggauacgccuagaccaaacgacggcuccauuaccgggcccugugagagcgauggagacaaggguucgggcgggauaaaaggaggcuuuguucaucaaaggauggagucuaagaucggucggugguacucccguacaaugucaaaaacugaacgcauggggaugggccucuaugugaaguacgacggagauccgugggcagacagugaugcucuugccuucagcggcgucaugguguccaugaaggagccugggugguacucuuuuggauucgaaauuaaagacaagaaaugcgaugugcccuguaucgguauagagaugguccacgacggcgggaaggaaaccuggcauagcgcugccacagcaauuuauugccugaugggaucaggccaguugcuaugggauacuguuaccggugugaacauggcccuguga

SEQ ID NO: 157154 - RNA, 1401 nt, Artificial Sequence; identical to SEQ ID NO: 157009
  derived and/or modified CDS sequence (opt3) from neuraminidase__InfluenzaB__AGX15723

SEQ ID NO: 157155 - RNA, 1401 nt, Artificial Sequence; identical to SEQ ID NO: 157009
  derived and/or modified CDS sequence (opt3) from neuraminidase__InfluenzaB__AGX15745

SEQ ID NO: 157156 - RNA, 1401 nt, Artificial Sequence; identical to SEQ ID NO: 157009
  derived and/or modified CDS sequence (opt3) from neuraminidase__InfluenzaB__AGX15757

SEQ ID NO: 157157 - RNA, 1401 nt, Artificial Sequence
  derived and/or modified CDS sequence (opt3) from neuraminidase__InfluenzaB__AGX15768
augcugcccagcaccauccagacacucacucuuuuccugacguccggcgggguguuguuaucucuguacgucucagccagucuaagcuaucuccuguacuccgacauucuucugaaguuuucuccuaccgagauaacagcuccaacuaugccguuggauugcgcaaacgccucgaauguucaagcggugaacagaucagcuaccaaaggaguaacacuccugcugcccgaaccugaguggaccuauccaaggcucagcugucccgguaguacuuuccagaaggccuuacugaucuccccucaccgguuuggcgaaacaaaaggaaauucugcaccacuuauuauccgcgagcccuucauugccugcgggccuaacgaauguaagcauuuugcuuugacccacuacgcagcccagccaggcgguuauuacaaugggacgcgaggagaccguaacaaacugagacaucuaaucagcgugaagcucggcaagauaccgacugucgaaaauuccaucuuccacauggcugccuggucaggcagugcgugccaugaugggaaagaguggaccuauauuggaguggacggucccgauaacaaugcacugcuuaagguuaaauacggcgaggccuacacagacacuuaucacagcuacgcuaacaagauccugaggacccaggagucugccuguaauugcauugggggaaacuguuauuugaugaucacagauggcuccgcaucaggugugagcgaaugccgguuucucaaaauacgcgaggggagaauuaucaaggagauuuucccuaccggaagggucaagcacacggaagaguguacuugcggcuuugcuaguaauaaaacaaucgaaugugccugccgggacaacucuuacaccgcgaagcgcccauucgugaaacugaauguagagacugauacagccgaaauccgauuaaugugcaccgacacguaucuggauacccccagaccuaacgacggcuccauuacagggccaugugagagcaacggagauaaggguucgggcgggauaaaaggaggcuuuguucaucaaaggauggagucuaagaucggucggugguacucccguacuaugucaaaaaccgaacgcauggggaugggccucuaugugaaguacgacggagaccccugggcagauagugacgcucuugccuucagcggcgucaugauuuccaugaaggagccggggugguacucuuuuggauucgaaaucaaagauaagaaaugcgacgugccuuguauagguauugagauggugcacgauggcgggaaggaaacauggcauagcgcugccacugcaaucuauugccugaugggaucaggccaguugcuaugggacaccgucacagguguugauauggcccuguga

SEQ ID NO: 157158 - RNA, 1401 nt, Artificial Sequence
  derived and/or modified CDS sequence (opt3) from neuraminidase__InfluenzaB__AGX15801
augcugcccagcaccauccagacacucacucuuuuccugacguccggcgggguguuguuaucucuguacgucucagccagucuaagcuaucuccuguacuccgacauucuucugaaguuuucuccuaccgagauaacagcuccaacuaugucguuggauugcguuaacgcaucaaaugugcaagccguaaacagaagcgcgaccaaaggagugacacuccugcugccggaacccgaguggaccuauccuaggcucaguuguccagguuccacuuuccagaaggcuuuacugaucucuccccaccgguuuggcgaaacaaaagggaauagcgccccucuuauuauccgcgagccauucauugcaugcggacccaacgaauguaagcauuuugccuugacccacuacgcugcacagccuggcgguuauuacaaugggacgcgaggagaccguaacaaacugagacaucuaaucuccgucaagcucggcaagauaccaacuguggaaaauucaaucuuccacauggccgcuuggaguggcagcgccugccaugaugggaaagaguggaccuauauuggaguugacgguccggauaacaaugcgcugcuuaaggugaaauacggcgaggcauacacagacacuuaucacucuuacgccaacaagauccugaggacccaggaguccgcuuguaauugcauugggggaaacuguuauuugaugaucacagauggcucagccagcggugucagugaaugccgguuucucaaaauacgcgaggggagaauuaucaaggagauuuuccccaccggaagggugaagcacacggaagaguguacuugcggcuuugcaucuaauaaaacaaucgaaugugcuugccgggacaacuccuacaccgccaagcgcccuuucguaaaacugaauguugagacugauacagcggaaauccgauuaaugugcaccgacacguaucuggauaccccaagacccaacgacggcagcauuacagggccuugugagucgaacggagauaaggguucuggcgggauaaaaggaggcuuugugcaucaaaggauggaguccaagaucggucggugguacucacguacuaugaguaaaaccgaacgcauggggaugggccucuaugucaaguacgacggagacccaugggccgauagcgacgcacuugcuuucuccggcgugauggugucuaugaaggagcccgggugguacagcuuuggauucgaaauuaaagauaagaaaugcgacgucccguguaucgguauagagaugguucacgauggcgggaaggaaacauggcauucagccgcuacugccauuuauugccugaugggaaguggccaguugcuaugggacaccgugacagguguagauauggcacuguga

SEQ ID NO: 157159 - RNA, 1401 nt, Artificial Sequence; identical to SEQ ID NO: 157009
  derived and/or modified CDS sequence (opt3) from neuraminidase__InfluenzaB__AGX15812

SEQ ID NO: 157160 - RNA, 1401 nt, Artificial Sequence; identical to SEQ ID NO: 157009
  derived and/or modified CDS sequence (opt3) from neuraminidase__InfluenzaB__AGX15823

SEQ ID NO: 157161 - RNA, 1401 nt, Artificial Sequence; identical to SEQ ID NO: 156943
  derived and/or modified CDS sequence (opt3) from neuraminidase__InfluenzaB__AGX15845

SEQ ID NO: 157162 - RNA, 1401 nt, Artificial Sequence; identical to SEQ ID NO: 156920
  derived and/or modified CDS sequence (opt3) from neuraminidase__InfluenzaB__AGX15856

SEQ ID NO: 157163 - RNA, 1401 nt, Artificial Sequence; identical to SEQ ID NO: 156943
  derived and/or modified CDS sequence (opt3) from neuraminidase__InfluenzaB__AGX15867

SEQ ID NO: 157164 - RNA, 1401 nt, Artificial Sequence; identical to SEQ ID NO: 156943
  derived and/or modified CDS sequence (opt3) from neuraminidase__InfluenzaB__AGX15889

SEQ ID NO: 157165 - RNA, 1401 nt, Artificial Sequence
  derived and/or modified CDS sequence (opt3) from neuraminidase__InfluenzaB__AGX15900
augcugcccagcaccauccagacacucacucuuuuccugacguccggcgggguguuguuaucucuguacgucucagcccuacucaguuaucugcuuuacagcgacauucuguugaaguuuuccccuaccgagauaacagcuccaacuaugucucucgauugcgcaaacaccucgaauguucaagccgugaacagaucagcgacaaaaggaguaaccuuccugcugccggaacccgaguggacuuauccuaggcucagcuguccagguaguacauuucagaaggcuuuacugaucucuccccaccgguucggcgaaaccaaaggaaauuccgccccucuuauuauccgcgagccauuuauugcaugcgggcccaacgaauguaagcauuucgccuugacgcacuacgcugcacagccuggcgguuauuacaaugggacucgaggagaccguaacaaacugagacaucuaaucagcgugaagcucggcaagauaccaaccgucgaaaauuccaucuuucacauggccgcuuggucaggcagugccugccaugaugggaaagaguggacauauauuggaguggacgguccggauaacgacgcgcugcuuaagguuaaauacggcgaggcauacacugauaccuaucacagcuacgccaauaagauccugaggacacaggagucugcuuguaacugcauugggggaaauuguuauuugaugaucaccgacggcuccgccucaggugugagcgaaugccgguuccucaaaauacgcgaggggagaauuaucaaggagauuuuucccacgggaagggucaagcacacugaagaguguacaugcggcuucgcaaguaacaaaaccaucgaaugugcuugccgggauaauucuuacacugccaagcgcccuuuugugaaacugaacguagagacagacaccgcggaaauccgauuaaugugcacggauaccuaucuggacacaccaagacccgaugacggcuccauuacugggccuugugagagcaauggagacaaggguucgggcgggauaaaaggaggcuucguucaucaaaggauggagucuaagaucggucggugguacucccguaccaugucaaaaacagaacgcagagggaugggccucuaugugaaguacgauggagacccaugggccgauagugacgcacuugcuuuuagcggcgucaugguguccaugaaggagcccgggugguacucuuucggauucgaaauuaaagauaagaaaugcgacgugccguguaucgguauagagaugguccacgauggcgggaaggaaacuuggcauagcgccgcuaccgccauuuauugccugaugggaucaggccaguugcuaugggacacaguuaccgguguggauauggcacuguga

SEQ ID NO: 157166 - RNA, 1401 nt, Artificial Sequence; identical to SEQ ID NO: 156943
  derived and/or modified CDS sequence (opt3) from neuraminidase__InfluenzaB__AGX15911

SEQ ID NO: 157167 - RNA, 1401 nt, Artificial Sequence
  derived and/or modified CDS sequence (opt3) from neuraminidase__InfluenzaB__AGX15933
augcugcccagcaccauccagacacucacucuuuuccugacguccggcgggguguuguuaucucuguacgucucagccagucuaagcuaucuccuguacuccgacauucuucugaaguuuucuccuaccgagauaacagcuccagcaaugccguuggauugcgccaacgcgucgaauguucaagcugugaacagaucagccacuaaaggaguaacccuccugcugcccgaaccugaguggacauauccaaggcucagcugucccgguaguaccuuccagaaggcauuacugaucuccccucaccgguuuggcgaaacuaaaggaaauucugccccacuuauuauccgcgagcccuucauugcuugcgggccuaacgaauguaagcauuuugcauugacacacuacgccgcucagccaggcgguuauuacaaugggacccgaggagaccguaacaaacugagacaucuaaucagcgugaagcucggcaagauaccgacggucgaaaauuccaucuuccacauggccgcguggucaggcagugcaugccaugaugggaaagaguggacuuauauuggaguggacggucccgauaacaaugcccugcuuaagguuaaauacggcgaggcuuacaccgacacauaucacagcuacgccaacaagauccugaggacucaggagucugcauguaauugcauugggggaaacuguuauuugaugaucaccgauggcuccgcuucaggugugagcgaaugccgguuucucaaaauacgcgaggggagaauuaucaaggagauuuucccuacaggaagggucaagcacaccgaagaguguacgugcggcuuugccaguaauaaaacuaucgaaugugcgugccgggacaacucuuacacagccaagcgcccauucgugaaacugaauguagagaccgauacugcagaaauccgauuaaugugcacagacaccuaucuggauacgcccagaccuaacgacggcuccauuaccgggccaugugagagcgauggagacaaggguucgggcgggauaaaaggaggcuuuguucaucaaaggauggagucuaagaucggucggugguacucccguacaaugucaaaaacugaacgcauggggaugggccucuaugugaaguacgacggagaucccugggcugacagugaugcccuugcuuucagcggcgucaugguguccaugaaggagccggggugguacucuuuuggauucgaaauuaaagacaagaaaugcgaugugccuuguaucgguauagagaugguccacgacggcgggaaggaaaccuggcauagcgccgcaacagccauuuauugccugaugggaucaggccaguugcuaugggauacuguuaccgguguggacauggcucuguga

SEQ ID NO: 157168 - RNA, 1401 nt, Artificial Sequence; identical to SEQ ID NO: 156943
  derived and/or modified CDS sequence (opt3) from neuraminidase__InfluenzaB__AGX15944

SEQ ID NO: 157169 - RNA, 1401 nt, Artificial Sequence; identical to SEQ ID NO: 157004
  derived and/or modified CDS sequence (opt3) from neuraminidase__InfluenzaB__AGX15966

SEQ ID NO: 157170 - RNA, 1401 nt, Artificial Sequence
  derived and/or modified CDS sequence (opt3) from neuraminidase__InfluenzaB__AGX15988
augcugcccagcaccauccagacacucacucuuuuccugacguccggcgggguguuguuaucucuguacgucucagccagucuaagcuaucuccuguacuccgacauucuucugaaguuuucuccuaccgagauaacagcuccaacuaugccguuggauugcgcaaacgccucgaauguucaagcggugaacagaucagcuaccaaaggaguaacacuccugcugcccgaaccugaguggaccuauccaaggcucagcugucccgguaguacuuuccagaaggccuuacugaucuccccucaccgguuuggcgaaacaaaaggaaauucugcaccacuuauuauccgcgagcccuucauugccugcgggccuaacgaauguaagcauuuugcuuugacccacuacgcagcccagccaggcgguuauuacaaugggacgcgaggagaccguaacaaacugagacaucuaaucagcgugaagcucggcaagauaccgacugucgaaaauuccaucuuccacauggcugccuggucaggcagugcgugccaugaugggaaagaguggaccuauauuggaguggacggucccgauaacaaugcacugcuuaagguuaaauacggcgaggccuacacagacacuuaucacagcuacgcuaacaagauccugaggacccaggagucugccuguaauugcauugggggaaacuguuauuugaugaucacagauggcuccgcaucaggugugagcgaaugccgguuucucaaaauacgcgaggggagaauuaucaaggagauuuucccuaccggaagggucaagcacacggaagaguguacuugcggcuuugcuaguaauaaaacaaucgaaugugccugccgggacaacucuuacaccgcgaagcgcccauucgugaaacugaauguagagacugauacagccgaaguucgauuaaugugcaccgacacguaucuggauacccccagaccuaacgacggcuccaucacagggccaugugagagcgauggagacaaggguucgggcgggauuaaaggaggcuuugugcaucaaaggauggagucuaagauaggucggugguacucccguacuaugucaaaaaccgaacgcauggggaugggccucuaugucaaguacgacggagaucccugggcagacagugaugcucuuacauucagcggcgugaugguguccaugaaggagccggggugguacucuuuuggauucgaaaucaaagacaagaaaugcgaugucccuuguauugguaucgagaugguucacgacggcgggaaggaaacuuggcauagcgccgcuaccgccauauauugccugaugggaucaggccaguugcuaugggauacagugaccgguguagacauggcacuguga

SEQ ID NO: 157171 - RNA, 1401 nt, Artificial Sequence; identical to SEQ ID NO: 157004
  derived and/or modified CDS sequence (opt3) from neuraminidase__InfluenzaB__AGX15999

SEQ ID NO: 157172 - RNA, 1401 nt, Artificial Sequence; identical to SEQ ID NO: 157004
  derived and/or modified CDS sequence (opt3) from neuraminidase__InfluenzaB__AGX16010

SEQ ID NO: 157173 - RNA, 1401 nt, Artificial Sequence; identical to SEQ ID NO: 157004
  derived and/or modified CDS sequence (opt3) from neuraminidase__InfluenzaB__AGX16021

SEQ ID NO: 157174 - RNA, 1401 nt, Artificial Sequence
  derived and/or modified CDS sequence (opt3) from neuraminidase__InfluenzaB__AGX16032
augcugcccagcaccauccagacacucacucuuuuccugacguccggcgggguguuguuaucucuguacgucucagccagucuaagcuaucuccuguacuccgacauucuucugaaguuuucucaaaccgagauaacagcuccuaucaugccauuggauugcgcaaacgccucgaauguucaggcggugaacagaucagcuacuaaaggaguaacccuccugcugccggaacccgaguggacauauccuaggcucagcuguccagguaguaccuuccagaaggccuuacugauuucuccccaccgguuuggcgaaacuaaaggaaauuccgcaccucuuaucauucgcgagccauucaucgccugcgggcccaaggaauguaaacauuuugcuuugacacacuacgcagcccagccuggcgguuauuacaacgggacccgagaggaccguaauaagcugagacaucuaauaagcgugaagcucggaaaaaucccaacggucgagaacuccauuuuccacauggcugccuggucaggcagugcgugccaugauggcaaggaauggacuuauaucgggguggacggaccggauagcaaugcacugcuuaaaauuaaguacggugaggccuacaccgacacauaucacucuuacgcuaaaaacauccugaggacucaagaauccgccuguaauugcauaggcggggauuguuauuugaugauuaccgacggacccgcaucaggcaucagcgagugccgguuucucaagauucgcgaggguagaaucaucaaggaaauuuucccuacagggaggguuaaacacaccgaggaauguacgugcggauuugcuaguaacaagacuauagagugugccugccgggauaauucuuacacagcgaaacgcccauucgugaagcugaacgucgaaaccgacacugccgagauccgauuaaugugcacagagaccuaucuggauacgcccagaccuaaugacggcuccauuaccggcccaugugaaagcgauggggacaaaggaucggguggcaucaaagggggauuugugcaucagaggauggcaucuaagauaggccggugguacucccguacaaugucaaagacuaagcgcauggguauggggcucuauguaaaauacgacggcgaucccuggaccgacagugaggcucuugcccugagcggaguuaugguguccauggaggaaccgggcugguacucuuucggguuugaaauuaaggauaaaaagugcgacgucccuuguaucggaaucgagauggugcacgaugguggcaaaacaacuuggcauagcgcugccaccgcaauuuauugcuugauggggucaggacagcuacugugggacacagugaccggcgucgauauggcccucuga

SEQ ID NO: 157175 - RNA, 1401 nt, Artificial Sequence; identical to SEQ ID NO: 156791
  derived and/or modified CDS sequence (opt3) from neuraminidase__InfluenzaB__AGX16043

SEQ ID NO: 157176 - RNA, 1401 nt, Artificial Sequence; identical to SEQ ID NO: 156793
  derived and/or modified CDS sequence (opt3) from neuraminidase__InfluenzaB__AGX16054

SEQ ID NO: 157177 - RNA, 1401 nt, Artificial Sequence
  derived and/or modified CDS sequence (opt3) from neuraminidase__InfluenzaB__AGX16087
augcugcccagcaccauccagacacucacucuuuuccugacguccggcgggguguuguuaucucuguacgucucagccagucuaagcuaucuccuguacuccgacauucuucugaaguuuucucaaaccgagauaacagcuccuaucaugccauuggauugcgcaaacgccucgaauguucaggcggugaacagaucagcuacuaaaggaguaacccuccugcugccggaacccgaguggacauauccuaggcucagcuguccagguaguaccuuccagaaggccuuacugauuucuccccaccgguuuggcgaaacuaaaggaaauuccgcaccucuuaucauucgcgagccauucaucgccugcgggcccaaggaauguaaacauuuugcuuugacacacuacgcagcccagccuggcgguuauuacaacgggacccgagaggaccguaauaagcugagacaucuaauaagcgugaagcucggaaaaaucccaacggucgagaacuccauuuuccacauggcugccuggucaggcagugcgugccaugauggcagggaauggacuuauaucgggguggacggaccggauagcaaugcacugcuuaagauuaaauacggugaggccuacaccgacacauaucacucuuacgcuaagaacauccugcggacucaagaauccgccuguaauugcauaggcggggauuguuauuugaugauuaccgacggacccgcaucaggcaucagcgagugccgcuuucucaaaauuagagaggguaggaucaucaaggaaauuuucccuacagggcggguuaagcacaccgaggaauguacgugcggauuugcuaguaacaaaacuauagagugugccugccgcgauaauaacuacacagcgaagcgaccauucgugaaacugaaugucgaaaccgacacugccgagaucagauuaaugugcacagagaccuaucuggauacgcccaggccuaacgacggcucuauuaccggcccaugugaauccaauggggauaagggaagcgguggcaucaaagggggauuugugcaucagcggauggcaucgaagauaggccguugguacucucgcacaauguccaaaacuaagagaauggguauggggcucuauguaaaguacgacggcgaccccuggaccgauucagaggcucuugcccugaguggaguuauggugagcauggaggaaccgggcugguacuccuucggguuugaaauuaaagacaagaaaugcgaugucccuuguaucggaaucgagauggugcacgacgguggcaagacaacuuggcauucugcugccaccgcaauuuauugcuugauggggagcggacagcuacugugggauacagugaccggcgucgacauggcccucuga

SEQ ID NO: 157178 - RNA, 1401 nt, Artificial Sequence
  derived and/or modified CDS sequence (opt3) from neuraminidase__InfluenzaB__AGX16109
augcugcccagcaccauccagacacucacucuuuuccugacguccggcgggguguuguuaucucuguacgucucagccagucuaagcuaucuccuguacuccgacauucuucugaaguuuucucaaaccgagauaacagcuccuacuaugccauuggauugcgcaaacgccucgaauguucaggcggugaacagaucagcuaccaaaggaguaacacuccugcugccggaacccgaguggaccuauccuaggcucagcuguccagguaguacuuuccagaaggccuuacugaucucuccccaccgguuuggcgaaacaaaaggaaauuccgcaccucuuauuauccgcgagccauucauugccugcgggcccaaggaauguaaacauuuugcuuugacccacuacgcagcccagccuggcgguuauuacaacgggacgcgagaggaccguaauaagcugagacaucuaaucagcgugaagcucggaaaaauaccaacugucgagaacuccaucuuccacauggcugccuggucaggcagugcgugccaugauggcagggaauggaccuauguggggguugacggaccggauagcaaugcacugcuuaagauuaaauacggugaggccuacacagacacuuaucacucuuacgcuaagaacauccugcggacccaagaauccgccuguaauugcauuggcggggauuguuauuugaugaucacagacggacccgcaucaggcauaagcgagugccgcuuucucaaaauuagagaggguaggaucauuaaggaaaucuucccuaccgggcgggugaagcacacggaggaauguacuugcggauuugcuaguaacaaaacaaucgagugugccugccgcgauaauucuuacaccgcgaagcgaccauucgucaaacuggacguggaaacugauacagccgagauuagauuaaugugcaccgagacguaucuggacacccccaggccuaacgauggcuccauaacaggcccaugugaagcaaauggggacaagggaagcgguggcaucaaagggggauuuguacaucagcggauggcuucgaagauuggccguugguacucucgcacuauguccaaaaccaagagaauggguauggggcucuauguuaaguacgacggcgaucccuggacagacucagaggcccuugcucugaguggagugauggucagcauggaggaaccgggcugguacuccuucggguuugaaaucaaagauaagaaaugcgacgugccuuguauaggaauugagauggugcacgaugguggcaagacuaccuggcauucugccgcaacagccaucuauugcuugauggggagcggacagcuacugugggacaccgucacuggcguugauauggcucucuga

SEQ ID NO: 157179 - RNA, 1401 nt, Artificial Sequence
  derived and/or modified CDS sequence (opt3) from neuraminidase__InfluenzaB__AGX16120
augcugcccagcaccauccagacacucacucuuuuccugacguccggcgggguguuguuaucucuguacgucucagccagucuaagcuaucuccuguacuccgacauucuucugaaguuuucuaccacagagauaacugcuccuaccaugccauuggauugcgcaaacgccucgaauguucaagcggugaacagaucagcuacaaaaggaguaaccuuccuccugccggaacccgaguggacuuauccuaggcugagcuguccagguaguacauuucagaaggcccucuuaaucucuccccaccgguucggcgaaaccaaaggaaauuccgcaccucugauuauccgcgagccauuuauugccugcgggcccaaggaauguaaacauuucgcucuuacgcacuacgcagcccagccuggcgguuauuacaacgggacucgagaggaccguaauaaguugagacaucugaucagcgugaagcuaggaaaaauaccaaccgucgagaacuccaucuuucacauggcugccuggucaggcagugcgugccaugauggcaaggaauggacauauauugggguggacggaccggauagcaaugcacuccugaaaaucaaguacggugaggccuacacugacaccuaucacucuuacgcuaacaauauucuuaggacacaggaauccgccuguaacugcaucggcgggaauuguuaucugaugauaaccgauggaucagcaagcggcauuagugagugccgguucuugaaaauccgcgaggguagaauuaucaaggaaaucuuucccacggggaggguuaagcacacugaggaauguacaugcggauucgcuucuaacaaaaccauugagugugccugccgggacaauuccuacacugcgaagcgcccuuuugugaaacucaacgucgaaacagauaccgccgagauacgacugaugugcacggagaccuauuuagacacaccaagacccgaugacggcagcaucacuggcccuugugaaucgaaugggaacaagggaucugguggcauuaaagggggauucgugcaucaaaggauggcauccaagaucggccggugguacucacguaccaugaguaaaacaaagcgcauggguauggggcuguauguaaaguacgauggcgacccauggacugacagcgaugcucucgcccuuuccggaguuauggugucuauggaggaacccggcugguacagcuuuggguucgagauaaaagacaagaaaugcgaugucccguguauuggaaucgaaauggugcacgacgguggcaaggagaccuggcauucagcugccacagcaaucuauugccugauggggaguggacaguugcuaugggauaccgugacuggcgucgacauggcccuguga

SEQ ID NO: 157180 - RNA, 1401 nt, Artificial Sequence; identical to SEQ ID NO: 157179
  derived and/or modified CDS sequence (opt3) from neuraminidase__InfluenzaB__AGX16131

SEQ ID NO: 157181 - RNA, 1401 nt, Artificial Sequence; identical to SEQ ID NO: 157179
  derived and/or modified CDS sequence (opt3) from neuraminidase__InfluenzaB__AGX16142

SEQ ID NO: 157182 - RNA, 1401 nt, Artificial Sequence
  derived and/or modified CDS sequence (opt3) from neuraminidase__InfluenzaB__AGX16153
augcugcccagcaccauccagacacucacucuuuuccugacguccggcgggguguuguuaucucuguacgucucagccagucuaagcuaucuccuguacuccgacauucuucugaaguuuucucaaaccgagauaacagcuccuaucaugccauuggauugcgcaaacgccucgaauguucaggcggugaacagaucagcuacuaggggaguaacccuccugcugccggaacccgaguggacauauccucggcucagcuguccagguaguaccuuccagaaagccuuacugauuucuccccaccgcuuuggcgaaacuaagggaaauuccgcaccucuuaucauucgagagccauucaucgccugcgggcccaaagaauguaagcauuuugcuuugacacacuacgcagcccagccuggcgguuauuacaacgggacccgugaggacagaaauaaacugaggcaucuaauaagcgugaagcucggaaagaucccaacggucgagaacuccauuuuccacaugacugcuuggucaggcagugccugccaugauggccgggaauggaccuauaucgggguggacggaccggauagcaaugcgcugcuuaaaauuaaguacggugaggcauacacagacacuuaucacucuuacgccaaaaacauccugcgcacccaagaauccgcuuguaauugcauaggcggggauuguuauuugaugauuacagacggacccgccucaggcaucagcgagugcagauuucucaagauuagggagggucggaucaucaaagaaauuuucccuaccgggcgcguuaagcacacggaggaauguacuugcggauuugcaaguaacaagacaauagagugugcuugccgagauaauucuuacaccgccaaaagaccauucgugaagcugaacgucgaaacugacacagcggagaucagguuaaugugcaccgagacguaucuggauacaccccggccuaaugacggcuccauuaccggcccaugugaaagcaacggggauaaaggaucggguggcaucaaagggggauuugugcaucagcguauggccucuaagauaggccgcugguacuccagaacuaugucaaagaccaaaaggauggguauggggcucuauguaaaguacgacggcgaccccuggacagauagugaggcacuugcucugagcggaguuaugguguccauggaggaaccgggcugguacucuuucggguuugaaauuaaggacaaaaagugcgaugucccuuguaucggaaucgagauggugcacgacgguggcaaaacuaccuggcauagcgccgcuacagccauuuauugcuugauggggucaggacagcuacugugggauaccgugacuggcgucgacauggcacucuga

SEQ ID NO: 157183 - RNA, 1401 nt, Artificial Sequence; identical to SEQ ID NO: 157177
  derived and/or modified CDS sequence (opt3) from neuraminidase__InfluenzaB__AGX16164

SEQ ID NO: 157184 - RNA, 1401 nt, Artificial Sequence; identical to SEQ ID NO: 156836
  derived and/or modified CDS sequence (opt3) from neuraminidase__InfluenzaB__AGX16197

SEQ ID NO: 157185 - RNA, 1401 nt, Artificial Sequence; identical to SEQ ID NO: 156836
  derived and/or modified CDS sequence (opt3) from neuraminidase__InfluenzaB__AGX16208

SEQ ID NO: 157186 - RNA, 1401 nt, Artificial Sequence; identical to SEQ ID NO: 156836
  derived and/or modified CDS sequence (opt3) from neuraminidase__InfluenzaB__AGX16219

SEQ ID NO: 157187 - RNA, 1401 nt, Artificial Sequence; identical to SEQ ID NO: 156675
  derived and/or modified CDS sequence (opt3) from neuraminidase__InfluenzaB__AGX16230

SEQ ID NO: 157188 - RNA, 1401 nt, Artificial Sequence
  derived and/or modified CDS sequence (opt3) from neuraminidase__InfluenzaB__AGX16241
augcugcccagcaccauccagacacucacucuuuuccugacguccggcgggguguuguuaucucuguacgucucagccagucuaagcuaucuccuguacuccgacauucuucugaaguuuucucaaaccgagauaacagcuccuaucaugccauuggauugcgcaaacgccucgaauguucaggcggugaaccacucagcuacuaaaggaguaacccuccugcugccggaacccgaguggacauauccuagacucagcuguccagguaguaccuuccagaaggccuuacugauuucuccccauagguuuggcgaaacuaaaggaaauuccgcaccucuuaucauucgggagccauucaucgccugcgggcccaaggaauguaaacacuuugcuuugacacauuacgcagcccagccuggcgguuauuacaacgggacccgcgaggaccgaaauaagcugcgucaccuaauaagcgugaagcucggaaaaaucccaacggucgagaacuccauuuuccauauggcugccuggucaggcagugcgugccacgauggcagagaauggacuuauaucgggguggacggaccggauagcaaugcacugcuuaagauuaaauacggugaggccuacaccgacacauaucacucuuacgcuaagaacauccugaggacucaagaauccgccuguaauugcauaggcggggauuguuauuugaugauuaccgacggacccgcaucaggcaucagcgagugccgguuucucaaaauucgcgaggguagaaucaucaaggaaauuuucccuacagggaggguuaagcauaccgaggaauguacgugcggauuugcuaguaacaaaacuauagagugugccugccgggauaauucuuacacagcgaagcgcccauucgugaaacugaacgucgaaaccgacacugccgagauccgauuaaugugcacagagaccuaucuggauacgcccagaccuaaugacggcuccauuaucggcccaugugaaagcaacggggauaagggaucggguggcauaaaagggggauuugugcaccagaggauggcaucuaagauuggccggugguacucccguaccaugucaaaaacaaagcgcauggguauggggcucuauguaaaguacgacggcgaccccuggacugauagugaggcucuuacccugagcggaguuaugguguccauggaggaaccgggcugguacucuuucggguuugaaaucaaagacaagaaaugcgaugucccuuguaucggaauugagauggugcaugacgguggcaagacaacuuggcacagcgccgcuaccgccaucuauugcuugauggggucaggacagcuacugugggauacagugaccggcgucgacauggcacucuga

SEQ ID NO: 157189 - RNA, 1401 nt, Artificial Sequence
  derived and/or modified CDS sequence (opt3) from neuraminidase__InfluenzaB__AGX16252
augcugcccagcaccauccagacacucacucuuuuccugacguccggcgggguguuguuaucucuguacgucucagccagucuaagcuaucuccuguacuccgacauucuucugaaguuuucucaaaccgagauaacagcuccuaucaugccauuggauugcgcaaacgccucgaauguucaggcggugaacagaucagcugccaaaggaguaacucuccugcugccggaacccgagugggcauauccuaggcucagcuguccagguaguaccuuccagaaggccuuacugauuucuccccaccgguuuggcgaaacaaaaggaaauuccgcuccucuuaucauucgcgagccauucaucgcaugcgggcccaccgaauguaagcauuuugccuugacucacuacgcugcccagccuggcgguuauuacaacgggacacgagaggaccguaauaaacugagacaucuaauaagcgugaagcucggaaagaucccaaccgucgagaacuccauuuuccacauggcggcauggucaggcagugccugccaugauggcaaagaauggacguauaucgggguggacggaccggauagcaaugcucugcuuaagauuaaauacggugaggccuacacugacaccuaucacucuuacgcaaagaacauccugaggacacaagaauccgcuuguaauugcauaggcggggauuguuauuugaugauuacugacggacccgccucaggcaucagcgagugccgguuucucaaaauucgcgaggguagaaucaucaaggaaauuuucccuaccgggaggguuaagcacacagaggaauguaccugcggauuugcgaguaacaaaacgauagagugugccugccgggauaaucgcuacacugcaaagcgaccauucgugaaacugaacgucgaaacagacaccgcugagaucagauuaaugugcacugagacauaucuggauacccccaggccuaaugacggcucuauuacgggcccaugugaauccgauggggacaagggaagcgguggcaucaaagggggauuugugcaucagcggauggccucgaagauaggccguugguacucucgcaccauguccaaaacaaagagaauggguauggggcucuauguaaaguacgacggcgaucccuggacugacucagaggcucuugcccugaguggaguuauggugagcauggaggaaccgggcugguacuccuucggguuugaaauuaaagauaagaaaugcgacgucccuuguaucggaaucgagauggugcacgaugguggcaagaccacauggcauucugcagccacugcuauuuauugcuugauggggagcggacagcuacugugggacaccgugacaggcgucgauauggcgcucuga

SEQ ID NO: 157190 - RNA, 1401 nt, Artificial Sequence; identical to SEQ ID NO: 156836
  derived and/or modified CDS sequence (opt3) from neuraminidase__InfluenzaB__AGX16274

SEQ ID NO: 157191 - RNA, 1401 nt, Artificial Sequence
  derived and/or modified CDS sequence (opt3) from neuraminidase__InfluenzaB__AGX16285
augcugcccagcaccauccagacacucacucuuuuccugacguccggcgggguguuguuaucucuguacgucucagccagucuaagcuaucuccuguacuccgacauucuucugaaguuuucucaaaccgagauaacagcuccuaucaugccauuggauugcgcaaacgccucgaauguucaggcggugaacagaucagcugccaaaggaguaacucuccugcugccggaacccgaguggaccuauccuaggcucagcuguccagguaguacauuccagaaggcauuacugauuucuccccaccgguuuggcgaaaccaaaggaaauuccgccccucuuaucauucgcgagccauucaucgcuugcgggcccacugaauguaagcauuuugcauugacacacuacgccgcucagccuggcgguuauuacaacgggacccgagaggaccguaauaaacugagacaucuaauaagcgugaagcucggaaagaucccaacggucgagaacuccauuuuccacauggccgcguggucaggcagugcaugccaugauggcaaagaauggacuuauaucgggguggacggaccggauagcaaugcccugcuuaagauuaaauacggugaggcuuacaccgacacauaucacucuuacgccaagaacauccugaggacucaagaauccgcauguaauugcauaggcggggauuguuauuugaugauuaccgacggacccgcuucaggcaucagcgagugccgguuucucaaaauucgcgaggguagaaucaucaaggaaauuuucccuacagggaggguuaagcacaccgaggaauguacgugcggauuugccaguaacaaaacuauagagugugcgugccgggauaauucuuacacagccaagcgcccauucgugaaacugaacgucgaaaccgacacugcagagauccgauuaaugugcacagagaccuaucuggauacgcccagaccuaaugacggcuccaccacaggcccaugugaaagcgauggggacaagggaucggguggcauuaaagggggauuugugcaucagaggauggcuucuaagaucggccggugguacucccguacuaugucaaaaaccaagcgcauggguauggggcucuauguaaaguacgacggcgaucccuggacagacagugaggcccuugcucugagcggaguuaugguguccauggaggaaccgggcugguacucuuucggguuugaaauaaaagauaagaaaugcgacgucccuuguauuggaaucgagauggugcacgaugguggcaagacuaccuggcauagcgccgcaacagccaucuauugcuugauggggucaggacagcuacugugggacaccgugacuggcgucgauauggcucucuga

SEQ ID NO: 157192 - RNA, 1401 nt, Artificial Sequence; identical to SEQ ID NO: 156836
  derived and/or modified CDS sequence (opt3) from neuraminidase__InfluenzaB__AGX16296

SEQ ID NO: 157193 - RNA, 1401 nt, Artificial Sequence; identical to SEQ ID NO: 156683
  derived and/or modified CDS sequence (opt3) from neuraminidase__InfluenzaB__AGX16307

SEQ ID NO: 157194 - RNA, 1401 nt, Artificial Sequence; identical to SEQ ID NO: 156836
  derived and/or modified CDS sequence (opt3) from neuraminidase__InfluenzaB__AGX16329

SEQ ID NO: 157195 - RNA, 1401 nt, Artificial Sequence
  derived and/or modified CDS sequence (opt3) from neuraminidase__InfluenzaB__AGX16362
augcugcccagcaccauccagacacucacucuuuuccugacguccggcgggguguuguuaucucuguacgucucagccagucuaagcuaucuccuguacuccgacauucuucugaaguuuucucaaaccgagauaacagcuccuaucaugccauuggauugcgcaaacgccucgaauguucaggcggugaacagaucagcugccaaaggaguaacucuccugcugccggaacccgaguggaccuauccuaggcucagcuguccagguaguacauuccagaaggcauuacugauuucuccccaccgguuuggcgaaaccaaaggaaauuccgccccucuuaucauucgcgagccauucaucgcuugcgggcccacugaauguaagcauuuugcauugacacacuacgccgcucagccuggcgguuauuacaacgggacccgagaggaccguaauaaacugagacaucuaauaagcgugaagcucggaaagaucccaacggucgagaacuccauuuuccacauggccgcguggucaggcagugcaugccaugauggcaaagaauggacuuauaucgggguggacggaccggauagcaaugcccugcuuaagauuaaauacggugaggcuuacaccgacacauaucacucuuacgccaagaacauccugaggacucaagaauccgcauguaauugcauaggcggggauuguuauuugaugauuaccgacggacccgcuucaggcguuagcgagugccgguuucucaaaauccgcgaggguagaauuaucaaggaaaucuucccuacagggagggugaagcacaccgaggaauguacgugcggauuugccaguaacaaaacuauugagugugcgugccgggauaauucuuacacagccaagcgcccauucgucaaacugaacguggaaaccgacacugcagagauacgauuaaugugcacagagaccuaucuggauacgcccagaccuaaugacggcuccaucaccggcccaugugaaagcgauggggacaagggaucggguggcauuaaagggggauuuguacaucagaggauggcuucuaagaucggccggugguacucccguacaaugucaaaaacuaagcgcauggguauggggcucuauguuaaguacgacggcgaucccuggaccgacagugaggcccuugcucugagcggagugauggucuccauggaggaaccgggcugguacucuuucggguuugaaauaaaagauaagaaaugcgacgugccuuguauuggaaucgagauggugcacgaugguggcaagacaacuuggcauagcgccgcaaccgccaucuauugcuugauggggucaggacagcuacugugggacacagucaccggcguugauauggcucucuga

SEQ ID NO: 157196 - RNA, 1401 nt, Artificial Sequence; identical to SEQ ID NO: 157008
  derived and/or modified CDS sequence (opt3) from neuraminidase__InfluenzaB__AGX16373

SEQ ID NO: 157197 - RNA, 1401 nt, Artificial Sequence
  derived and/or modified CDS sequence (opt3) from neuraminidase__InfluenzaB__AGX16384
augcugcccagcaccauccagacacucacucuuuuccugacguccggcgggguguuguuaucucuguacgucucagccagucuaagcuaucuccuguacuccgacauucuucugaaguuuucucaaaccgagauaacagcuccuaucaugccauuggauugcgcaaacgccucgaauguucaggcggugaacagaucagcugccaaaggaguaacucuccugcugccggaacccgaguggaccuauccuaggcucagcuguccagguaguacauuccagaaggcauuacugauuucuccccaccgguuuggcgaaaccaaaggcaauuccgccccucuuaucauucgcgagccauucaucgcuugcggacccacugaauguaagcauuuugcauugacacacuacgccgcucagccuggcgguuauuacaacgggacccgagaggaccguaauaaacugaagcaucuaauaagcgugaagcucggaaaaaucccaacggucgagaacuccauuuuccacauggccgcguggucaggcagugcaugccaugauggcaaggaauggacuuauaucgggguggacggaccggauagcaaugcccugcuuaaaauuaaguacggugaggcuuacaccgacacauaucacucuuacgccaaaaacauccugagaacucaagaauccgcauguaauugcauaggcggggauuguuauuugaugauuaccgacggacccgcuucaggcaucagcgagugcagguuucucaagauucgggagggucgcaucaucaaggaaauuuucccuacagggagaguuaaacacaccgaggaauguacgugcggauuugccaguaacaagacuauagagugugcgugcagggauaauucuuacacagccaaacggccauucgugaagcugaacgucgaaaccgacacugcagagauccgcuuaaugugcacagagaccuaucuggauacgccccgaccuaaugacggcuccauuaccggcccaugugaaagcgauggggacaaaggaucggguggcaucaaagggggauuugugcaucagagaauggcuucuaagauagggaggugguacucccggacaaugucaaagacuaagcguauggguauggggcucuauguaaaauacgacggcgaucccuggaccgacagugaggcccuugcucugagcggaguuaugguguccauggaggaaccgggcugguacucuuucggguuugaaauuaaggauaaaaagugcgacgucccuuguaucggaaucgagauggugcacgaugguggcaaaacaacuuggcauagcgccgcaaccgccauuuauugcuugauggggucaggacagcuacugugggacacagugaccggcgucgauauggcucucuga

SEQ ID NO: 157198 - RNA, 1401 nt, Artificial Sequence; identical to SEQ ID NO: 156865
  derived and/or modified CDS sequence (opt3) from neuraminidase__InfluenzaB__AGX16406

SEQ ID NO: 157199 - RNA, 1401 nt, Artificial Sequence; identical to SEQ ID NO: 156865
  derived and/or modified CDS sequence (opt3) from neuraminidase__InfluenzaB__AGX16427

SEQ ID NO: 157200 - RNA, 1401 nt, Artificial Sequence; identical to SEQ ID NO: 156865
  derived and/or modified CDS sequence (opt3) from neuraminidase__InfluenzaB__AGX16438

SEQ ID NO: 157201 - RNA, 1401 nt, Artificial Sequence; identical to SEQ ID NO: 156865
  derived and/or modified CDS sequence (opt3) from neuraminidase__InfluenzaB__AGX16449

SEQ ID NO: 157202 - RNA, 1401 nt, Artificial Sequence; identical to SEQ ID NO: 156865
  derived and/or modified CDS sequence (opt3) from neuraminidase__InfluenzaB__AGX16460

SEQ ID NO: 157203 - RNA, 1401 nt, Artificial Sequence
  derived and/or modified CDS sequence (opt3) from neuraminidase__InfluenzaB__AGX16471
augcugcccagcaccauccagacacucacucuuuuccugacguccggcgggguguuguuaucucuguacgucucagccagucuaagcuaucuccuguacuccgacauucuucugaaguuuucucaaaccgagauaacagcuccuaucaugccauuggauugcgcaaacgccucgaauguucaggcggugaacagaucagcugccaaaggaguaacucuccugcugccggaacccgaguggaccuauccuaggcucagcuguccagguaguacauuccagaaggcauuacugauuucuccccaccgguuuggcgaaaccaaaggaaauuccgccccucuuaucauucgcgagccauucaucgcuugcgggcccacugaauguaagcauuuugcauugacacacuacgccgcucagccuggcgguuauuacaacgggacccgagaggaccguaauaaacugagacaucuaauaagcgugaagcucggaaagaucccaacggucgagaacuccauuuuccacauggccgcguggucaggcagugcaugccaugauggcaaagaauggacuuauaucgggguggacggaccggauagcaaugcccugcuuaagauuaaauacggugaggcuuacaccgacacauaucacucuuacgccaagaacauccugaggacucaagaauccgcauguaauugcauaggcggggauuguuauuugaugauuaccgacggacccgcuucaggcaucagcgagugccgguuucucaaaauucgcgaggguagaaucaucaaggaaauuuucccuacagggaggguuaagcacaccgaggaauguacgugcggauuugccaguaacaaaacuauagagugugcgugccgggauaauucuuacacagccaagcgcccauucgugaaacugaacgucgaaaccgacacugcagagauccgauuaaugugcacaaagaccuaucuggauacgcccagaccuaaugacggcuccauuaccggcccaugugagagcgauggggacaaaggaucggguggcaucaaagggggauuugugcaucagaggauggcuucuaagauaggccggugguacucccguacaaugucaaagacucgcagaauggguauggggcucuauguaaaguacgacggcgaucccuggaccgacagugaagcccuugcucugagcggaguuaugguguccauggaggaaccgggcugguacucuuucggguuugagauuaaagauaagaaaugcgacgucccuuguaucggaaucgaaauggugcacgaugguggcaagacaacuuggcauagcgccgcaaccgccauuuauugcuugauggggucaggacagcuacugugggacacagugaccggcgucgauauggcucucuga

SEQ ID NO: 157204 - RNA, 1401 nt, Artificial Sequence; identical to SEQ ID NO: 156865
  derived and/or modified CDS sequence (opt3) from neuraminidase__InfluenzaB__AGX16482

SEQ ID NO: 157205 - RNA, 1401 nt, Artificial Sequence
  derived and/or modified CDS sequence (opt3) from neuraminidase__InfluenzaB__AGX16493
augcugcccagcaccauccagacacucacucuuuuccugacguccggcgggguguuguuaucucuguacgucucagccagucuaagcuaucuccuguacuccgacauucuucugaaguuuucucaaaccgagauaacagcuccuaucaugccauuggauugcgcaaacgccucgaauguucaggcggugaacagaucagcugccaaaggaguaacucuccugcugccggaacccgaguggaccuauccuaggcucagcuguccagguaguacauuccagaaggcauuacugauuucuccccaccgguuuggcgaaaccaaaggaaauuccgccccucuuaucauucgcgagccauucaucgcuugcgggcccacugaauguaagcauuuugcauugacacacuacgccgcucagccuggcgguuauuacaacgggacccgagaggaccguaauaaacugagacaucuaauaagcgugaagcucggaaagaucccaacggucgagaacuccauuuuccacauggccgcguggucaggcagugcaugccaugauggcaaagaauggacuuauaucgggguggacggaccggauagcaaugcccugcuuaagauuaaauacggugaggcuuacaccgacacauaucacucuuacgccaagaacauccugaggacucaagaauccgcauguaauugcauaggcggggauuguuauuugaugauuaccgacggacccgcuucaggcaucagcgagugccgguuucucaaaauucgcgaggguagaaucaucaaggaaauuuucccuacagggaggguuaagcacaccgaggaauguacgugcggauuugccaguaacaaaacuauagagugugcgugccgggauaauucuuacacagccaagcgcccauucgugaaacugaacgucgaaaccgacacugcagagauccgauuaaugugcacagagaccuaucuggauacgcccagaccuaaugacggcuccauuaccggcccaugugaaagcgauggggacaagggaucggguggcaucaaagggggauuugugcaucagaggauggcuucuaagauaggccggugguacucccguacaaugucaaaaacuaagcgcauggguauggggcucuauguaaaguacgacggcgaucccuggaccgacagugaggcccuugcucugagcggaguuguggucuccauggaggaaccgggcugguacucuuucggguuugaaauuaaagauaagaaaugcgacgugccuuguaucggaaucgagauggugcacgaugguggcaagacaacuuggcauagcgccgcaaccgccauuuauugcuugauggggucaggacagcuacugugggacacagucaccggcguugauauggcucucuga

SEQ ID NO: 157206 - RNA, 1401 nt, Artificial Sequence; identical to SEQ ID NO: 156664
  derived and/or modified CDS sequence (opt3) from neuraminidase__InfluenzaB__AGX16504

SEQ ID NO: 157207 - RNA, 1401 nt, Artificial Sequence; identical to SEQ ID NO: 156664
  derived and/or modified CDS sequence (opt3) from neuraminidase__InfluenzaB__AGX16515

SEQ ID NO: 157208 - RNA, 1401 nt, Artificial Sequence
  derived and/or modified CDS sequence (opt3) from neuraminidase__InfluenzaB__AGX16548
augcugcccagcaccauccagacacucacucuuuuccugacguccggcgggguguuguuaucucuguacgucucagccagucuaagcuaucuccuguacuccgacauucuucugaaguuuucuccuaccgagauaacagcuccaacuaugccguuggauugcgcaaacgccucgaauguucaagcggugaacagaucagcuaccaaaggaguaacacuccugcugcccgaaccugaguggaccuauccaaggcucagcugucccgguaguacuuuccagaaggccuuacugaucuccccucaccgguuuggcgaaacaaaaggaaauucugcaccacuuauuauccgcgagcccuucauugccugcgggccuaaggaauguaaacauuuugcuuugacccacuacgcagcccagccaggcgguuauuacaacgggacgcgaggagaccguaauaagcugagacaucuaaucagcgugaagcucggcaaaauaccgacugucgagaacuccaucuuccacauggcugccuggucaggcagugcgugccaugaugggaaggaguggaccuauauuggaguggacggucccgauaauaacgcacugcuuaaaaucaaguacggcgaagccuacacagacacuuaucacagcuacgcuaauaacauucugaggacccaggagucugccuguaauugcaucgggggaaacuguuauuugaugauaacagauggcuccgcaucagguauuagcgaaugccgguuucucaaaauccgcgaggggagaauuaucaaggagaucuucccuaccggaaggguuaagcacacggaagaguguacuugcggcuuugcuaguaauaaaacaauugaaugugccugccgggacaacucuuacaccgcgaagcgcccauucgugaaacugaaugucgagacugauacagccgaaauacgauuaaugugcaccgagacguaucuggacacccccagaccugaugacggcuccaucacagggccaugugagagcaacggagauaacgguucgggcgggauuaagggaggcuuugugcaucaaaggauggcaucuaaaaucggucggugguacucccguacuaugucaaagaccaaacgcauggggaugggccucuauguaaaguacgacggagaccccugggcugauagugacgcccuugcucugagcggcguuaugguguccauggaggaaccggggugguacucuuucggauuugaaauaaaggauaaaaagugcgacgucccuuguauugguaucgagauggugcacgauggcgggaaagaaacauggcauagcgccgcaacugccaucuauugcuugaugggaucaggccagcuacugugggacaccgugacaggugucgauauggcucucuga

SEQ ID NO: 157209 - RNA, 1401 nt, Artificial Sequence
  derived and/or modified CDS sequence (opt3) from neuraminidase__InfluenzaB__AGX16559
augcugcccagcaccauccagacacucacucuuuuccugacguccggcgggguguuguuaucucuguacgucucagccagucuaagcuaucuccuguacuccgacauucuucugaaguuuucuccuaccgagauaaucgcuccaacaaugccguuggauugcgcaaacgccucgaauguucaagcggugaacagaucagcuacuaaaggaguaacccuccugcugcccgaaccugaguggacauauccaaggcucagcugucccgguaguaccuuccagaaggccuuacugauuuccccucaccgguuuggcgaaacuaaaggaaauucugcaccacuuaucauucgcgagcccuucaucgccugcgggccuaaggaauguaaacauuuugcuuugacacacuacgcagcccagccaggcgguuauuacaacgggacccgaggagaccguaauaagcugagacaucuaauaagcgugaagcucggcaaaaucccgacggucgagaacuccauuuuccacauggcugccuggucaggcagugcgugccaugaugggaaggaguggacuuauaucggaguggacggucccgauaauaacgcacugcuuaaaauuaaguacggcgaagccuacaccgacacauaucacagcuacgcuaauaacauccugaggacucaggagucugccuguaauugcauagggggaaacuguuauuugaugauuaccgauggcuccgcaucagguaucagcgaaugccgguuucucaaaauucgcgaggggagaaucaucaaggagauuuucccuacaggaaggguuaagcacaccgaagaguguacgugcggcuuugcuaguaauaaaacuauagaaugugccugccgggacaacucuuacacagcgaagcgcccauucgugaaacugaaugucgagaccgauacugccgaaauccgauuaaugugcacagagaccuaucuggacacgcccagaccugaugacggcuccauuaccgggccaugugagagcaacggagauaaggguucgggcgggaucaaaggaggcuuugugcaucaaaggauggcaucuaagauaggucggugguacucccguacaaugucaaaaacuaagcgcauggggaugggccucuauguaaaguacgacggagaccccugggcugauagugacgcccuugcucugagcggcguuaugguguccauggaggaaccggggugguacucuuucggauuugaaauuagagauaaaaagugcgacgucccuuguaucgguaucgagauggugcacgauggcgggaaagaaaccuggcauagcgccgcaacagccauuuauugcuugaugggaucaggccagcuacugugggacacugugaccggugucgauauggcucucuga

SEQ ID NO: 157210 - RNA, 1401 nt, Artificial Sequence
  derived and/or modified CDS sequence (opt3) from neuraminidase__InfluenzaB__AGX16581
augcugcccagcaccauccagacacucacucuuuuccugacguccggcgggguguuguuaucucuguacgucucagccagucuaagcuaucuccuguacuccgacauucuucugaaguuuucuccuaccgagauaaucgcuccaacaaugccguuggauugcgcaaacgccucgaauguucaagcggugaacagaucagcuacuaaaggaguaacccuccugcugcccgaaccugaguggacauauccaaggcucagcugucccgguaguaccuuccagaaggccuuacugauuuccccucaccgguuuggcgaaacuaaaggaaauucugcaccacuuaucauucgcgagcccuucaucgccugcgggccuaaggaauguaaacauuuugcuuugacacacuacgcagcccagccaggcgguuauuacaacgggacccgaggagaccguaauaagcugagacaucuaauaagcgugaagcucggcaaaaucccgacggucgagaacuccauuuuccacauggcugccuggucaggcagugcgugccaugaugggaaggaguggacuuauaucggaguggacggucccgauaauaacgcacugcuuaaaauuaaguacggcgaagccuacaccgacacauaucacagcuacgcuaauaacauccugaggacucaggagucugccuguaauugcauagggggaaacuguuauuugaugauuaccgauggcuccgcaucagguaucagcgaaugccgguuucucaaaauucgcgaggggagaaucaucaaggagauuuucccuacaggaaggguuaagcacaccgaagaguguacgugcggcuuugcuaguaauaaaacuauagaaugugccugccgggacaacucuuacacagcgaagcgcccauucgugaaacugaaugucgagaccgauacugccgaaauccgauuaaugugcacagagaccuaucuggacacgcccagaccugaugacggcuccauuaccgggccaugugagagcaacggagauaaggguucgggcgggaucaaaggaggcuuugugcaucaaaggauggcaucuaagauaggucggugguacucccguacaaugucaaaaacuaagcgcauggggaugggccucuauguaaaguacgacggagaccccugggcugauagugacgcccuugcucugagcggcguuaugguguccauggaggaaccggggugguacucuuucggauuugaaauuaaagauaagaaaugcgacgucccuuguaucgguaucgagauggugcacgauggcgggaaggaaaccuggcauagcgccgcaacagccauuuauugcuugaugggaucaggccagcuacugugggacacugugaccggugucgauauggcucucuga

SEQ ID NO: 157211 - RNA, 1401 nt, Artificial Sequence; identical to SEQ ID NO: 157210
  derived and/or modified CDS sequence (opt3) from neuraminidase__InfluenzaB__AGX16592

SEQ ID NO: 157212 - RNA, 1401 nt, Artificial Sequence; identical to SEQ ID NO: 156664
  derived and/or modified CDS sequence (opt3) from neuraminidase__InfluenzaB__AGX16603

SEQ ID NO: 157213 - RNA, 1401 nt, Artificial Sequence; identical to SEQ ID NO: 156730
  derived and/or modified CDS sequence (opt3) from neuraminidase__InfluenzaB__AGX16614

SEQ ID NO: 157214 - RNA, 1401 nt, Artificial Sequence; identical to SEQ ID NO: 157208
  derived and/or modified CDS sequence (opt3) from neuraminidase__InfluenzaB__AGX16625

SEQ ID NO: 157215 - RNA, 1401 nt, Artificial Sequence
  derived and/or modified CDS sequence (opt3) from neuraminidase__InfluenzaB__AGX16636
augcugcccagcaccauccagacacucacucuuuuccugacguccggcgggguguuguuaucucuguacgucucagccagucuaagcuaucuccuguacuccgacauucuucugaaguuuucuccuaccgagauaaucgcuccaacaaugccguuggauugcgcaaacgccucgaauguucaagcggugaacagaucagcuacuaaaggaguaacccuccugcugcccgaaccugaguggacauauccaaggcucagcugucccgguaguaccuuccagaaggccuuacugauuuccccucaccgguuuggcgaaacuaaaggaaauucugcaccacuuaucauucgcgagcccuucaucgccugcgggccuaaggaauguaaacauuuugcuuugacacacuacgcagcccagccaggcgguuauuacaacgggacccgaggagaccguaauaagcugagacaucuaauaagcgugaagcucggcaaaaucccgacggucgagaacuccauuuuccacauggcugccuggucaggcagugcgugccaugaugggaaggaguggacuuauaucggaguggacggucccgauaauaacgcacugcuuaaaauuaaguacggcgaagccuacaccgacacauaucacagcuacgcuaauaacauccugaggacucaggagucugccuguaauugcauagggggaaacuguuauuugaugauuaccgauggcuccgcaucagguaucagcgaaugccgguuucucaaaauucgcgaggggagaaucaucaaggagauuuucccuacaggaaggguuaagcacaccgaagaguguacgugcggcuuugcuaguaauaaaacuauagaaugugccugccgggacaacucuuacacagcgaagcgcccauucgugaaacugaaugucgagaccgauacugccgaaauccgauuaaugugcacagagaccuaucuggacacgcccagaccugaugacggcuccauuaccgggccaugugagagcaacggagauaaggguucgggcgggaucaaaggaggcuuugugcaucaaaggauggcaucuaagauaggucggugguacucccguacaaugucaaaaacuaagcgcauggggaugggccucuauguaaaguacgacggagaccccugggcugauagugacgcccuugcucugagcggcguuaugguguccauggaggaaccggggugguacucuuucggauuugaaauuaaagauaagaaaugcgacgucccuuguaucgguaucgagauggugcacgauggcgggaaggaaaccuggcauagcgccgcaacagccauuuauugcuugaugggaucaggccagcuacuguggaacacugugaccggugucgacauggcucucuga

SEQ ID NO: 157216 - RNA, 1401 nt, Artificial Sequence; identical to SEQ ID NO: 156662
  derived and/or modified CDS sequence (opt3) from neuraminidase__InfluenzaB__AGX16647

SEQ ID NO: 157217 - RNA, 1401 nt, Artificial Sequence; identical to SEQ ID NO: 157210
  derived and/or modified CDS sequence (opt3) from neuraminidase__InfluenzaB__AGX16658

SEQ ID NO: 157218 - RNA, 1401 nt, Artificial Sequence; identical to SEQ ID NO: 156664
  derived and/or modified CDS sequence (opt3) from neuraminidase__InfluenzaB__AGX16669

SEQ ID NO: 157219 - RNA, 1401 nt, Artificial Sequence; identical to SEQ ID NO: 156730
  derived and/or modified CDS sequence (opt3) from neuraminidase__InfluenzaB__AGX16680

SEQ ID NO: 157220 - RNA, 1401 nt, Artificial Sequence; identical to SEQ ID NO: 156664
  derived and/or modified CDS sequence (opt3) from neuraminidase__InfluenzaB__AGX16691

SEQ ID NO: 157221 - RNA, 1401 nt, Artificial Sequence
  derived and/or modified CDS sequence (opt3) from neuraminidase__InfluenzaB__AGX16702
augcugcccagcaccauccagacacucacucuuuuccugacguccggcgggguguuguuaucucuguacgucucagccagucuaagcuaucuccuguacuccgacauucuucugaaguuuucuccuaccgagauaacagcuccaacuaugccguuggauugcgcaaacgccucgaauguucaagcggugaacagaucagcuaccaaaggaguaacacuccugcugcccgaaccugaguggaccuauccaaggcucagcugucccgguaguacuuuccagaaggccuuacugaucuccccucaccgguuuggcgaaacaaaaggaaauucugcaccacuuauuauccgcgagcccuucauugccugcgggccuaaggaauguaaacauuuugcuuugacccacuacgcagcccagccaggcgguuauuacaacgggaagcgaggagaccguaauaagcugagacaucuaaucagcgugaaacucggcaagauaccgacggucgagaacuccaucuuccacauggcugccuggucaggcagugcgugccaugaugggaaagaguggacuuauauuggaguggacggucccgauaauaacgcacugcuuaagaucaaauacggcgaagccuacaccgacacauaucacagcuacgcuaauaacauucugaggacucaggagucugccuguaauugcaucgggggaaacuguuauuugaugauaaccgauggcuccgcaucagguauuagcgaaugccgguuucucaagauccgcgaggggagaauuaucaaggagaucuucccuacaggaaggguuaaacacaccgaagaguguacgugcggcuuugcuaguaauaagacuauugaaugugccugccgggacaacucuuacacagcgaaacgcccauucgugaagcugaaugucgagaccgauacugccgaaauacgauuaaugugcacagagaccuaucuggacacgcccagaccugaugacggcuccaucaccgggccaugugagagcaacggagauaaagguucgggcgggauuaagggaggcuuugugcaucaaaggauggcaucuaaaaucggucggugguacucccguacaaugucaaagacuaagcgcauggggaugggccucuauguaaaauacgacggagaccccugggcugauagugacgcccuugcucugagcggcguuaugguguccauggaggaaccggggugguacucuuucggauuugaaauaaaggauaaaaagugcgacgucccuuguauugguaucgagauggugcacgauggcgggaaagaaaccuggcauagcgccgcaacagccaucuauugcuugaugggaucaggccagcuacugugggacacugugaccggugucgauauggcucucuga

SEQ ID NO: 157222 - RNA, 1401 nt, Artificial Sequence
  derived and/or modified CDS sequence (opt3) from neuraminidase__InfluenzaB__AGX16713
augcugcccagcaccauccagacacucacucuuuuccugacguccggcgggguguuguuaucucuguacgucucagccagucuaagcuaucuccuguacuccgacauucuucugaaguuuucuccuaccgagauaacagcuccaacuaugccguuggauugcgcaaacgccucgaauguucaagcggugaacagaucagcuaccaaaggaguaacacuccugcugcccgaaccugaguggaccuauccaaggcucagcugucccgguaguaucuuccagaaggccuuacugauuuccccucaccgguuuggcgaaacuaaaggaaauucugcaccacuuaucauucgcgagcccuucaucgccugcgggccuaaggaauguaaacauuuugcuuugacacacuacgcagcccagccaggcgguuauuacaacgggacccgaggagaccguaauaagcugagacaucuaauaagcgugaagcucggcaaaaucccgacggucgagaacuccauuuuccacauggcugccuggucaggcagugcgugccaugaugggaaggaguggacuuauaucggaguggacggucccgauaauaacgcacugcuuaaaauuaaguacggcgaagccuacaccgacacauaucacagcuacgcuaauaacauccugaggacucaggagucugccuguaauugcauagggggaaacuguuauuugaugauuaccgauggcuccgcaucagguaucagcgaaugccgguuucucaaaauucgcgaggggagaaucaucaaggagauuuucccuacaggaaggguuaagcacaccgaagaguguacgugcggcuuugcuaguaauaaaacuauagaaugugccugccgggacaacucuuacacagcgaagcgcccauucgugaaacugaaugucgagaccgauacugccgaaauccgauuaaugugcacagagaccuaucuggacacgcccagaccugaugacggcuccauuaccgggccaugugagagcaacggagauaaggguucgggcgggaucaaaggaggcuuugugcaucaaaggauggcaucuaagauaggucggugguacucccguacaaugucaaaaacuaagcgcauggggaugggccucuauguaaaguacgacggagaccccugggcugauagugacgcccuugcucugagcggcguuaugguguccauggaggaaccggggugguacucuuucggauuugaaauuagagauaaaaagugcgacgucccuuguaucgguaucgagauggugcacgauggcgggaaagaaaccuggcauagcgccgcaacagccauuuauugcuugaugggaucaggccagcuacugugggacacugugaccggugucgauauggcucucuga

SEQ ID NO: 157223 - RNA, 1401 nt, Artificial Sequence; identical to SEQ ID NO: 156664
  derived and/or modified CDS sequence (opt3) from neuraminidase__InfluenzaB__AGX16724

SEQ ID NO: 157224 - RNA, 1401 nt, Artificial Sequence; identical to SEQ ID NO: 157210
  derived and/or modified CDS sequence (opt3) from neuraminidase__InfluenzaB__AGX16735

SEQ ID NO: 157225 - RNA, 1401 nt, Artificial Sequence; identical to SEQ ID NO: 157210
  derived and/or modified CDS sequence (opt3) from neuraminidase__InfluenzaB__AGX16746

SEQ ID NO: 157226 - RNA, 1401 nt, Artificial Sequence; identical to SEQ ID NO: 156664
  derived and/or modified CDS sequence (opt3) from neuraminidase__InfluenzaB__AGX16757

SEQ ID NO: 157227 - RNA, 1401 nt, Artificial Sequence
  derived and/or modified CDS sequence (opt3) from neuraminidase__InfluenzaB__AGX16768
augcugcccagcaccauccagacacucacucuuuuccugacguccggcgggguguuguuaucucuguacgucucagccagucuaagcuaucuccuguacuccgacauucuucugaaguuuucuccuaccgagauaaucgcuccaacaaugccguuggauugcgcaaacgccucgaauguucaagcggugaacagaucagcuacuaaaggaguaacccuccugcugcccgaaccugaguggacauauccaaggcucagcugucccgguaguaccuuccagaaggccuuacugauuuccccucaccgguuuggcgaaacuaaaggaaauucugcaccacuuaucauucgcgagcccuucaucgccugcgggccuaaggaauguaaacauuuugcuuugacacacuacgcagcccagccaggcgguuauuacaacgggacccgaggagaccguaauaagcugagacaucuaauaagcgugaagcucggcaaaaucccgacggucgagaacuccauuuuccacauggcugccuggucaggcagugcgugccaugaugggaaggaguggacuuauaucggaguggacggucccgauaauaacgcacugcuuaaaauuaaguacggcgaagccuacaccgacacauaucacagcuacgcuaauaacauccugaggacucaggagucugccuguaauugcauagggggaaacuguuauuugaugauuaccgauggcuccgcaucagguaucagcgaaugccgguuucucaaaauucgcgaggggagaaucaucaaggagauuuucccuacaggaaggguuaagcacaccgaagaguguacgugcggcuuugcuaguaauaaaacuauagaaugugccugccgggacaacucuuacacagcgaagcgcccauucgugaaacugaaugucgagaccgauacugccgaaauccgauuaaugugcacagagaccuaucuggacacgcccagaccugaugacggcuccauuaccgggccauguaagagcaacggagauaaagguucgggcgggaucaagggaggcuuugugcaucaaaggauggcaucuaaaauaggucggugguacucccguacaaugucaaagacuaagcgcauggggaugggccucuauguaaaauacgacggagaccccugggcugauagugacgcccuugcucugagcggcguuaugguguccauggaggaaccggggugguacucuuucggauuugagauuaaggauaaaaagugcgacgucccuuguaucgguaucgaaauggugcacgauggcgggaaagagaccuggcauagcgccgcaacagccauuuauugcuugaugggaucaggccagcuacugugggacacugugaccggugucgauauggcucucuga

SEQ ID NO: 157228 - RNA, 1401 nt, Artificial Sequence; identical to SEQ ID NO: 156730
  derived and/or modified CDS sequence (opt3) from neuraminidase__InfluenzaB__AGX16779

SEQ ID NO: 157229 - RNA, 1401 nt, Artificial Sequence
  derived and/or modified CDS sequence (opt3) from neuraminidase__InfluenzaB__AGX16790
augcugcccagcaccauccagacacucacucuuuuccugacguccggcgggguguuguuaucucuguacgucucagccagucuaagcuaucuccuguacuccgacauucuucugaaguuuucuccuaccgagauaacagcuccaacuaugccguuggauugcgcaaacgccucgaauguucaagcggugaacagaucagcuaccaaaggaguaacacuccugcugcccgaaccugaguggaccuauccaaggcucagcugucccgguaguacuuuccagaaggccuuacugaucuccccucaccgguuuggcgaaacaaaaggaaauucugcaccacuuauuauccgcgagcccuucauugccugcgggccuaaggaauguaaacauuuugcuuugacccacuacgcagcccagccaggcgguuauuacaacgggacgcgaggaggccguaauaagcugagacaucuaaucagcgugaagcucggcaaaauaccgacugucgagaacuccaucuuccacauggcugccuggucagggagugcgugccaugacggaaaggaguggaccuauauugguguggauggccccgacaauaacgcacugcuuaaaaucaaguacggggaagccuacacagauacuuaucacagcuacgcuaauaacauucugaggacccaggagucugccuguaauugcaucggaggcaacuguuauuugaugauaacagacgguuccgcaucagggauuagcgaaugccgguuucucaaaauccgcgagggaagaauuaucaaggagaucuucccuaccggcaggguuaagcacacggaagaguguacuugcggcuuugcuaguaauaaaacaauugaaugugccugccgggauaacucuuacaccgcgaagcgcccauucgugaaacugaaugucgagacugacacagccgaaauacgauuaaugugcaccgagacguaucuggauacccccagaccugacgauggguccaucacaggaccaugugagagcaacggugacaagggcucugggggaauuaaaggcgguuuugugcaucaaaggauggcaucgaagaucgggcggugguacucccguacuaugucaaaaaccaagcgcaugggcaugggacucuauguaaaguacgauggcgaccccugggcugacagugaugcccuugcucugagcgggguuaugguguccauggaggaaccgggaugguacucuuucgguuuugaaauaagagacaaaaagugcgaugucccuuguauuggcaucgagauggugcacgacgggggaaaagaaacauggcauagcgccgcaacugccaucuauugcuugaugggcucaggucagcuacugugggauaccgugacaggggucgacauggcucucuga

SEQ ID NO: 157230 - RNA, 1401 nt, Artificial Sequence
  derived and/or modified CDS sequence (opt3) from neuraminidase__InfluenzaB__AGX16801
augcugcccagcaccauccagacacucacucuuuuccugacguccggcgggguguuguuaucucuguacgucucagccagucuaagcuaucuccuguacuccgacauucuucugaaguuuucuccuaccgagauaaucgcuccaacaaugccguuggauugcgcaaacgccucgaauguucaagcggugaacagaucagcuacuaaaggaguaacccuccugcugcccgaaccugaguggacauauccaaggcucagcugucccgguaguaccuuccagaaggccuuacugauuuccccucaccgguuuggcgaaacuaaaggaaauucugcaccacuuaucauucgcgagcccuucaucgccugcgggccuaaggaauguaaacauuuugcuuugacacacuacgcagcccagccaggcgguuauuacaacgggacccgaggagaccguaauaagcugagacaucuaauaagcgugaagcucggcaaaaucccgacggucgagaacuccauuuuccacauggcugccuggucaggcagugcgugccaugaugggaaggaguggacuuauaucggaguggacggucccgauaauaacgcacugcuuaaaauuaaguacggcgaagccuacaccgacacauaucacagcuacgcuaauaacauccugaggacucaggagucugccuguaauugcauagggggaaacuguuauuugaugauuaccgauggcuccgcaucagguaucagcgaaugccgguuucucaaaauucgcgaggggagaaucaucaaggagauuuucccuacaggaaggguuaagcacaccgaagaguguacgugcggcuuugcuaguaauaaaacuauagaaugugccugccgggacaacucuuacacagcgaagcgcccauucgugaaacugaaugucgagaccgauacugccgaaauccgauuaaugugcacagagaccuaucuggacacgcccagaccuaacgauggcuccauuaccgggccaugugagagcaacggagacaaggguucgggcgggaucaaaggaggcuuugugcaucaaaggauggcaucuaagauaggucggugguacucccguacaaugucaaaaacuaagcgcauggggaugggccucuauguaaaguacgauggagaccccugggcugacagugaugcccuugcucugagcggcguuaugguguccauggaggaaccggggugguacucuuucggauuugaaauuaaagacaagaaaugcgaugucccuuguaucgguaucgagauggugcacgacggcgggaaggaaaccuggcauagcgccgcaacagccauuuauugcuugaugggaucaggccagcuacugugggauacugugaccggugucgacauggcucucuga

SEQ ID NO: 157231 - RNA, 1401 nt, Artificial Sequence; identical to SEQ ID NO: 156664
  derived and/or modified CDS sequence (opt3) from neuraminidase__InfluenzaB__AGX16812

SEQ ID NO: 157232 - RNA, 1401 nt, Artificial Sequence
  derived and/or modified CDS sequence (opt3) from neuraminidase__InfluenzaB__AGX16823
augcugcccagcaccauccagacacucacucuuuuccugacguccggcgggguguuguuaucucuguacgucucagccagucuaagcuaucuccuguacuccgacauucuucugaaguuuucuccuaccgagauaacagcuccaacuaugccguuggauugcgcaaacgccucgaauguucaagcggugaacagaucagcuaccaaaggaguaacacuccugcugcccgaaccugaguggaccuauccaaggcucagcugucccgguaguacuuuccagaaggccuuacugaucuccccucaccgguuuggcgaaacaaaaggaaauucugcaccacuuauuauccgcgagcccuucauugccugcgggccuaaggaauguaaacauuuugcuuugacccacuacgcagcccagccaggcgguuauuacaacgggacgcgaggagaccguaauaagcugagacaucuaaucagcgugaagcucggcaaaauaccgacugucgagaacuccaucuuccacauggcugccuggucaggcagugcgugccaugaugggaaggaguggaccuauauuggaguggacggucccgauaauaacgcacugcuuaaaaucaaguacggcgaagccuacacagacacuuaucacagcuacgcuaauaacauucugaggacccaggagucugccuguaauugcaucgggggaaacuguuauuugaugauaacagauggcuccgcaucagguauuagcgaaugccgguuucucaaaauccgcgaggggagaauuaucaaggagaucuucccuaccggaaggguuaagcacacggaagaguguacuugcggcuuugcuaguaauaaaacaauugaaugugccugccgggacaacucuuacaccgcgaagcgcccauucgugaaacugaaugucgagacugauacagccgaaauacgauuaaugugcaccgagacguaucuggacacccccagaccugcagauggcuccaucacagggccaugugagagcaacggagacaaggguucgggcgggauuaaaggaggcuuugugcaucaaaggauggcuucuaagaucggucggugguacucccguacuaugucaaaaaccaagcgcauggggaugggccucuauguaaaguacgauggagaccccugggccgacagugaugcucuugcccugagcggcguuaugguguccauggaggaaccggggugguacucuuucggauuugaaauaaaagacaagaaaugcgaugucccuuguauugguaucgagauggugcacgacggcgggaaggaaacauggcauagcgcagccacugcuaucuauugcuugaugggaucaggccagcuacugugggauaccgugacaggugucgacauggcgcucuga

SEQ ID NO: 157233 - RNA, 1401 nt, Artificial Sequence; identical to SEQ ID NO: 156664
  derived and/or modified CDS sequence (opt3) from neuraminidase__InfluenzaB__AGX16834

SEQ ID NO: 157234 - RNA, 1401 nt, Artificial Sequence
  derived and/or modified CDS sequence (opt3) from neuraminidase__InfluenzaB__AGX16845
augcugcccagcaccauccagacacucacucuuuuccugacguccggcgggguguuguuaucucuguacgucucagccagucuaagcuaucuccuguacuccgacauucuucugaaguuuucuccuaccgagauaacaacuccaaccaugccguuggauugcgcuaacgcaucgaauguucaagccgugaacagaucagcgacaaaaggaguaacccuccugcugcccgaaccugaguggacuuauccaaggcucagcugucccgguaguacauuccagaaggcuuuacugguguccccucaccgguuuggcgaaaccaaaggaaauucugccccacuuaucauucgcgagcccuucaucgcaugcgggccuaaggaauguaaacauuuugccuugacgcacuacgcugcacagccaggcgguuauuacaacgggacucgaggagaccguaauaagcugagacaucuaauuagcgucaagcucggcaaaaucccgaccguggagaacuccauauuccacauggccgcuuggucaggcagugccugccaugaugggaaggaguggacauauaucggaguugacggucccgauaauaacgcgcugcuuaaaauuaaguacggcgaagcauacacugacaccuaucacagcuacgccaauaacauccugaggacacaggagucugcuuguaauugcauugggggaaacuguuauuugaugaucaccgauggcuccgccucagguauaagcgaaugccgguuucucaaaauucgcgaggggagaaucauuaaggagaucuucccuacgggaagggugaagcacacugaagaguguacaugcggcuuugcaaguaauaaaaccaucgaaugugcuugccgggacaacucuuacacugccaagcgcccauucgucaaacugaauguggagacagauaccgcggaaauucgauuaaugugcacggagaccuaucuggacacacccagaccugaugacggcuccauaacugggccaugugagagcaacggagauaaggguucgggcgggaucaaaggaggcuuuguacaucaaaggauggccucuaagauuggucggugguacucccguaccaugucaaaaacaaagcgcauggggaugggccucuauguuaaguacgacggagaccccugggcagauagugacgcucuugcccugagcggcgugauggucuccauggaggaaccggggugguacucuuucggauuugaaaucaaagauaagaaaugcgacgugccuuguauagguauugagauggugcacgauggcgggaaggaaacuuggcauagcgcugccaccgcaaucuauugcuugaugggaucaggccagcuacugugggacacagucaccgguguugauauggcccucuga

SEQ ID NO: 157235 - RNA, 1401 nt, Artificial Sequence
  derived and/or modified CDS sequence (opt3) from neuraminidase__InfluenzaB__AGX16856
augcugcccagcaccauccagacacucacucuuuuccugacguccggcgggguguuguuaucucuguacgucucagccagucuaagcuaucuccuguacuccgacauucuucugaaguuuucuccuaccgagauaacagcuccaacuguuccguuggauugcgcaaacgccucgaaugugcaagcgguaaacagaucagcuaccaaaggagugacacuccugcugcccgaaccugaguggaccuauccaaggcucagcugucccgguaguacuuuccagaaggccuuacugaucuccccucaccgguuuggcgaaacaaaaggaaauucugcaccacuuauuauccgcgagcccuucauugccugcgggccuaaggaauguaaacauuuugcuuugacccacuacgcagcccagccaggcgguuauuacagcgggacgcgaggagaccguaacaagcugagacaucuaaucuccgucaagcucggcaaaauaccgacuguggaaaauucaaucuuccacauggcugccuggaguggcagcgcgugccaugaugggaaggaguggaccuauauuggaguugacggucccgauaacaaugcacugcuuaaaaucaaguacggcgaagccuacacagacacuuaucacucuuacgcuaacaauauucugaggacccaggaguccgccuguaacugcaucgggggaaauuguuauuugaugauaacagauggcucagcaagcgguauuagugaaugccgguuucucaaaauccgcgaggggagaauuaucaaggagaucuucccuaccggaagggugaagcacacggaagaguguacuugcggcuuugcuucuaacaaaacaauugaaugugccugccgggacaauuccuacaccgcgaagcgcccauucgucaaacugaacguggagacugauacagccgaaauacgauuaaugugcaccgagacguaucuggacacccccagaccugaugacggcagcaucacagggccaugugagucgaauggagauaaggguucuggcgggauuaaaggaggcuuuguacaucaaaggauggcauccaagaucggucggugguacucacguacuaugaguaaaaacaagcgcauggggaugggccucuauguuaaguacgacggagaccccugggcugauagcgacgcccuugcucuguccggcgugauggucucuauggaggagccggggugguacagcuucggauuugaaauaaaagauaagaaaugcgacgugccuuguauugguaucgagauggugcacgauggcgggaaggaaaccuggcauucagccgcaacagccaucuauugcuugaugggaaguggccagcuacugugggacacugucaccgguguugauauggcucucuga

SEQ ID NO: 157236 - RNA, 1401 nt, Artificial Sequence; identical to SEQ ID NO: 156664
  derived and/or modified CDS sequence (opt3) from neuraminidase__InfluenzaB__AGX16867

SEQ ID NO: 157237 - RNA, 1401 nt, Artificial Sequence
  derived and/or modified CDS sequence (opt3) from neuraminidase__InfluenzaB__AGX16878
augcugcccagcaccauccagacacucacucuuuuccugacguccggcgggguguuguuaucucuguacgucucagccagucuaagcuaucuccuguacuccgacauucuucugaaguuuucuccuaccgaguugacagcuccaacuaugccgcucgauugcgcaaacgccucgaauguucaagcggugaacagaucagcuaccaaaggaguaacacugcugcuccccgaaccugaguggaccuauccaagguuaagcugucccgguaguacuuuccagaaggcccugcuuauauccccucaccgguuuggcgaaacaaaaggaaauucugcaccauugaucauucgcgagcccuucaucgccugcgggccuaaggaauguaaacauuuugcucugacccacuacgcagcccagccaggcgguuauuacaacgggaagcgaggagaccguaauaagcuaagacaucucauuagcgugaaacugggcaagaucccgacggucgagaacuccauauuccacauggcugccuggucaggcagugcgugccaugaugggaaagaguggacuuauaucggaguggacggucccgauaauaacgcacuucugaagauuaaauacggcgaagccuacaccgacacauaucacagcuacgcuaauaacaucuugaggacucaggagucugccuguaauugcauugggggaaacuguuaucucaugaucaccgauggcuccgcaucagguauaagcgaaugccgguuucugaagauucgcgaggggagaaucauuaaggagaucuucccuacaggaaggguuaaacacaccgaagaguguacgugcggcuuugcuaguaauaagacuaucgaaugugccugccgggacaacucuuacacagcgaaacgcccauucgugaaguuaaaugucgagaccgauacugccgaaauucgacugaugugcacagagaccuaucucgacacgcccagaccugaugacggcuccauaaccgggccaugugagagcaacggagauaacgguucgggcgggaucaaaggaggcuuugugcaucaaaggauggcaucuaagauuggucggugguacucccguacaaugucaaaaacuaagcgcauggggaugggccuuuauguaaaguacgacggagaccccugggcugauagugacgcccuggcuuugagcggcguuaugguguccauggaggaaccggggugguacucuuucggauuugaaaucaaagauaagaaaugcgacgucccuuguauagguauugagauggugcacgauggcgggaaggaaaccuggcauagcgccgcaacagccaucuauugccuaaugggaucaggccagcugcucugggacacugugaccggugucgauauggcucuguga

SEQ ID NO: 157238 - RNA, 1401 nt, Artificial Sequence; identical to SEQ ID NO: 157210
  derived and/or modified CDS sequence (opt3) from neuraminidase__InfluenzaB__AGX16889

SEQ ID NO: 157239 - RNA, 1401 nt, Artificial Sequence
  derived and/or modified CDS sequence (opt3) from neuraminidase__InfluenzaB__AGX16900
augcugcccagcaccauccagacacucacucuuuuccugacgaccggcgggguguuguuaucccuguacgucucugccucacuaaguuaucuccuguacagcgacauucuucugaaguuuuccccuacagagauaaucgcuccaacuaugccguuggauugcgcaaacgccucuaauguucaagcggugaacagaucggcuaccaaaggaguaacacuccugcugcccgaaccugaguggaccuauccaaggcucucaugucccgguagcacuuuccagaaggccuuacugauuaguccucaccgguuuggcgaaacaaaaggaaauuccgcaccacuuaucauucgcgagcccuucaucgccugcgggccuaaggaauguaaacauuuugcuuugacccacuacgcagcccagccaggcgguuauuacaacgggacgcgaggagaccguaauaagcugagacaucuaauaucugugaagcucggcaaaaucccgacugucgagaacagcauuuuccacauggcugccugguccggcucagcgugccaugaugggaaggaguggaccuauaucggaguggacggucccgauaauaacgcacugcuuaaaauuaaguacggcgaagccuacacagacacuuaucacaguuacgcuaauaacauccugaggacccaggagagcgccuguaauugcauagggggaaacuguuauuugaugauuacagauggcucugcauccgguaucucagaaugccgguuucucaaaauucgcgaggggagaaucaucaaggagauuuucccuaccggaaggguuaagcacacggaagaguguacuugcggcuuugcuagcaauaaaacaauagaaugugccugccgggacaacaguuacaccgcgaagcgcccauucgugaaacugaaugucgagacugauacagccgaaauccgauuaaugugcaccgagacguaucuggacacccccagaccugaugacggcucuauuacagggccaugugaguccaacggagauaaggguagcggcgggaucaaaggaggcuuugugcaucaaaggauggcaucgaagauaggucggugguacucucguacuauguccaaaaccaagcgcauggggaugggccucuauguaaaguacgacggagaccccugggcugauucagacgcccuugcucugaguggcguuauggugagcauggaggaaccggggugguacuccuucggauuugaaauuaaagauaagaaaugcgacgucccuuguaucgguaucgagauggugcacgauggcgggaaggaaacauggcauucugccgcaacugccauuuauugcuugaugggaagcggccagcuacugugggacaccgugacaggugucgauauggcucucuga

SEQ ID NO: 157240 - RNA, 1401 nt, Artificial Sequence
  derived and/or modified CDS sequence (opt3) from neuraminidase__InfluenzaB__AGX16911
augcugcccagcaccauccagacacucacucuuuuccugacguccggcgggguguuguuaucucuguacgucucagcccuacucaguuaucugcuuuacagcgacauucuguugaaguuuuccccuaccgagauaacagcuccaacuaugccgcucgauugcgcaaacgccucuaauguucaagcggugaacagaucggcuaccaaaggaguaacacugcugcuccccgaaccugaguggaccuauccaagguuaucaugucccgguagcacuuuccagaaggcccugcuuaucaguccucaccgguuuggcgaaacaaaaggaaauuccgcaccauugauuauccgcgagcccuucauugccugcgggccuaaggaauguaaacauuuugcucugacccacuacgcagcccagccaggcgguuauuacaacgggacgcgaggagaccguaauaagcuaagacaucucaucucugugaagcugggcaaaauaccgacugucgagaacagcaucuuccacauggcugccugguccggcucagcgugccaugaugggaaggaguggaccuauauuggaguggacggucccgauaauaacgcacuucugaaaaucaaguacggcgaagccuacacagacacuuaucacaguuacgcuaauaacauuuugaggacccaggagagcgccuguaauugcaucgggggaaacuguuaucucaugauaacagauggcucugcauccgguauuucagaaugccgguuucugaaaauccgcgaggggagaauuaucaaggagaucuucccuaccggaaggguuaagcacacggaagaguguacuugcggcuuugcuagcaauaaaacaauugaaugugccugccgggacaacaguuacaccgcgaagcgcccauucgugaaauuaaaugucgagacugauacagccgaaauacgacugaugugcaccgagacguaucucgacacccccagaccugaugacggcucuaucacagggccaugugaguccaacggagauaaggguagcggcgggauuaaaggaggcuuugugcaucaaaggauggcaucgaagaucggucggugguacucucguacuauguccaaaaccaagcgcauggggaugggccuuuauguaaaguacgacggagaccccugggcugauucagacgcccuggcuuugaguggcguuauggugagcauggaggaaccggggugguacuccuucggauuugaaauaaaagauaagaaaugcgacgucccuuguauugguaucgagauggugcacgauggcgggaaggaaacauggcauucugccgcaacugccaucuauugccuaaugggaagcggccagcugcucugggacaccgugacaggugucgauauggcucuguga

SEQ ID NO: 157241 - RNA, 1401 nt, Artificial Sequence
  derived and/or modified CDS sequence (opt3) from neuraminidase__InfluenzaB__AGX16922
augcugcccagcaccauccagacacucacucuuuuccugacguccggcgggguguuguuaucucuguacgucucagccagucuaagcuaucuccuguacuccgacauucuucugaaguuuucuccuaccgagauaacagcuccaacuaugccguuggauugcgcaaacgccucgaauguucaagcggugaacagaucagcuaccaaaggaguaacauuccuccugcccgaaccugaguggaccuauccaaggcugagcugucccgguaguacuuuucagaaggcccucuuaaucuccccucaccgguucggcgaaacaaaaggaaauucugcaccacugauuauccgcgagcccuuuauugccugcgggccuaaggaauguaaacauuucgcucuuacccacuacgcagcccagccaggcgguuauuacaacgggacgcgaggagaccguaauaaguugagacaucugaucagcgugaagcuaggcaaaauaccgacugucgagaacuccaucuuucacauggcugccuggucaggcagugcgugccaugaugggaaggaguggaccuauauuggaguggacggucccgauaauaacgcacuccugaaaaucaaguacggcgaagccuacacagacacuuaucacagcuacgcuaauaacauucuuaggacccaggagucugccuguaauugcaucgggggaaacuguuaucugaugauaacagauggcuccgcaucagguauuagcgaaugccgguucuugaaaauccgcgaggggagaauuaucaaggagaucuuuccuaccggaaggguuaagcacacggaagaguguacuugcggcuucgcuaguaauaaaacaauugaaugugccugccgggacaacucuuacaccgcgaagcgcccauuugugaaacucaaugucgagacugauacagccgaaauacgacugaugugcaccgagacguauuuagacacccccagaccugaugacggcuccaucacagggccaugugagagcaacggagauaaggguucgggcgggauuaaaggaggcuucgugcaucaaaggauggcaucuaagaucggucggugguacucccguacuaugucaaaaaccaagcgcauggggaugggccuguauguaaaguacgacggagaccccugggcugauagugacgcccucgcucuuagcggcguuaugguguccauggaggaaccggggugguacucuuuuggauucgaaauaaaagauaagaaaugcgacgucccuuguauugguaucgagauggugcacgauggcgggaaggaaacauggcauagcgccgcaacugccaucuauugccugaugggaucaggccaguugcuaugggacaccgugacaggugucgauauggcucuguga

SEQ ID NO: 157242 - RNA, 1401 nt, Artificial Sequence
  derived and/or modified CDS sequence (opt3) from neuraminidase__InfluenzaB__AGX16933
augcugcccagcaccauccagacacucacucuuuuccugacguccggcgggguguuguuaucucuguacgucucagccagucuaagcuaucuccuguacuccgacauucuucugaaguuuucuccuaccgagauaaacgcuccaacaaugccguuggauugcgcaaaugccucgaacguucaagcggugaauagaucagcuacuaaaggaguaacccuccugcugcccgaaccugaguggacauauccaaggcucagcugucccgguaguaccuuccagaaggccuuacugaucuccccucaccgguuuggcgaaacuaaagggaacucugcaccacuuauuauccgcgagcccuucauugccugcggaccuaaggaauguaaacauuuugcuuugacacacuacgcagcccagccaggcgguuauuacaaugggacccgaggagaccguaacaagcugagacaucuaaucagcgugaagcucggcaaaauaccgacggucgaaaauuccaucuuccacauggcugccuggucaggcagugcgugccaugaugggaaggaguggacuuauauuggaguggacggucccgauaacaaugcacugcuuaaaaucaaguacggcgaagccuacaccgacacauaucacagcuacgcuaacaauauucugaggacucaggagucugccuguaacugcaucgggggaaauuguuauuugaugauaaccgauggcuccgcaucagguauuagcgaaugccgguuucucaaaauccgcgaggggagaauuaucaaggagaucuucccuacaggaaggguuaagcacaccgaagaguguacgugcggcuuugcuaguaacaaaacuauugaaugugccugccgggacaauucuuacacagcgaagcgcccauucgugaaacugaacgucgagaccgauacugccgaaauacgauuaaugugcacagagaccuaucuggacacgcccagaccugaugacggcuccaucaccgggccaugugagagcaacggagauaaggguucgggcgggauuaaaggaggcuuugugcaucaaaggauggcaucuaagaucggucggugguacucccguacaaugucaaaaacuaagcgcauggggaugggccucuauguaaaguacgacggagaccccugggcugauagugacgcccuugcucugagcggcguuaugguguccauggaggagccggggugguacucuuucggauuugaaauaaaagauaagaaaugcgacgucccuuguauugguaucgagauggugcacgauggcgggaaggaaaccuggcauagcgccgcaacagccaucuauugcuugaugggaucaggccagcuacugcucgacacugugaccggugucgauauggcucuguga

SEQ ID NO: 157243 - RNA, 1401 nt, Artificial Sequence
  derived and/or modified CDS sequence (opt3) from neuraminidase__InfluenzaB__AGX16944
augcugcccagcaccauccagacacucacucuuuuccugacguccggcgggguguuguuaucucuguacgucucagccagucuaagcuaucuccuguacuccgacauucuucugaaguuuucuccuaccgagauaacagcuccaacuaugccguuggauugcgcaaacgccucgaauguucaagcggugaacagaucagcuaccaaaggaguaacacuccugcugcccgaaccugaguggaccuauccaaggcucagcugucccgguaguacuuuccagaaggccuuacugaucuccccucaccgguuuggcgaaacaaaaggaaauucugcaccacuuauuauccgcgagcccuucauugccugcgggccuaaggaauguaaacauuuugcuuugacccacuacgcagcccagccaggcgguuauuacagcgggacgcgaggagaccguaacaagcugagacaucuaaucuccgugaagcucggcaaaauaccgacugucgaaaauucaaucuuccacauggcugccuggaguggcagcgcgugccaugaugggaaggaguggaccuauauuggaguggacggucccgauaacaaugcacugcuuaaaaucaaguacggcgaagccuacacagacacuuaucacucuuacgcuaacaauauucugaggacccaggaguccgccuguaacugcaucgggggaaauuguuauuugaugauaacagauggcucagcaagcgguauuagugaaugccgguuucucaaaauccgcgaggggagaauuaucaaggagaucuucccuaccggaaggguuaagcacacggaagaguguacuugcggcuuugcuucuaacaaaacaauugaaugugccugccgggacaauuccuacaccgcgaagcgcccauucgugaaacugaacgucgagacugauacagccgaaauacgauuaaugugcaccgagacguaucuggacacccccagaccugaugacggcagcaucacagggccaugugagucgaauggagauaaggguucuggcgggauuaaaggaggcuuugugcaucaaaggauggcauccaagaucggucggugguacucacguacuaugaguaaaaacaagcgcauggggaugggccucuauguaaaguacgacggagaccccugggcugauagcgacgcccuugcucuguccggcguuauggugucuauggaggagccggggugguacagcuucggauuugaaauaaaagauaagaaaugcgacgucccuuguauugguaucgagauggugcacgauggcgggaaggaaaccuggcauucagccgcaacagccaucuauugcuugaugggaaguggccagcuacugugggacacugugaccggugucgauauggcucucuga

SEQ ID NO: 157244 - RNA, 1401 nt, Artificial Sequence; identical to SEQ ID NO: 156664
  derived and/or modified CDS sequence (opt3) from neuraminidase__InfluenzaB__AGX16955

SEQ ID NO: 157245 - RNA, 1401 nt, Artificial Sequence; identical to SEQ ID NO: 156662
  derived and/or modified CDS sequence (opt3) from neuraminidase__InfluenzaB__AGX16966

SEQ ID NO: 157246 - RNA, 1401 nt, Artificial Sequence; identical to SEQ ID NO: 156664
  derived and/or modified CDS sequence (opt3) from neuraminidase__InfluenzaB__AGX16977

SEQ ID NO: 157247 - RNA, 1401 nt, Artificial Sequence; identical to SEQ ID NO: 156664
  derived and/or modified CDS sequence (opt3) from neuraminidase__InfluenzaB__AGX16988

SEQ ID NO: 157248 - RNA, 1401 nt, Artificial Sequence; identical to SEQ ID NO: 157208
  derived and/or modified CDS sequence (opt3) from neuraminidase__InfluenzaB__AGX16999

SEQ ID NO: 157249 - RNA, 1401 nt, Artificial Sequence; identical to SEQ ID NO: 156664
  derived and/or modified CDS sequence (opt3) from neuraminidase__InfluenzaB__AGX17010

SEQ ID NO: 157250 - RNA, 1401 nt, Artificial Sequence; identical to SEQ ID NO: 157210
  derived and/or modified CDS sequence (opt3) from neuraminidase__InfluenzaB__AGX17021

SEQ ID NO: 157251 - RNA, 1401 nt, Artificial Sequence
  derived and/or modified CDS sequence (opt3) from neuraminidase__InfluenzaB__AGX17032
augcugcccagcaccauccagacacucacucuuuuccugacguccggcgggguguuguuaucucuguacgucucagccagucuaagcuaucuccuguacuccgacauucuucugaaguuuucuccuaccgagauaacagcuccaacuaugccguuggauugcgcaaacgccucggacguucaagcggugaauagaucagcuaccaaaggaguaacacuccugcugcccgaaccugaguggaccuauccaaggcucagcugucccgguaguacuuuccagaaggccuuacugaucuccccucaccgguuuggcgaaacaaaagggaacucugcaccacuuauuauccgcgagcccuucauugccugcggaccuaaggaauguaaacauuuugcuuugacccacuacgcagcccagccaggcgguuauuacaaucgaacgcguggggauagaaacaagcugaggcaucuaaucagcgugaagcucggaaaaauaccgacugucgaaaauuccaucuuccacauggcugccuggucaggcagugcgugccaugacggcaaggaguggaccuauauugggguggauggacccgacaacaaugcacugcuuaaaaucaaguacggugaagccuacacagauacuuaucacagcuacgcuaacaauauucugcggacccaggagucugccuguaacugcaucggcgggaauuguuauuugaugauaacagacggauccgcaucaggcauuagcgaaugccgcuuucucaaaaucagagaggguaggauuaucaaggagaucuucccuaccgggcggguuaagcacacggaagaguguacuugcggauuugcuaguaacaaaacaauugaaugugccugccgcgauaauucuuacaccgcgaagcgaccauucgugaaacugaacgucgagacugacacagccgaaauaagauuaaugugcaccgagacguaucuggauacccccaggccugacgauggcuccaucacaggcccaugugagagcaauggggacaagggaucggguggcauuaaagggggauuugugcaucaacggauggcaucuaagaucggccguugguacucccgcacuaugucaaaaaccaagagaauggguauggggcucuauguaaaguacgacggcgaucccugggcugacagugaugcccuugcucugagcggaguuaugguguccauggaggagccgggcugguacucuuucggguuugaaauaaaagacaagaaaugcgaugucccuuguauuggaaucgagauggugcacgacgguggcaaggaaacauggcauagcgccgcaacugccaucuauugcuugauggggucaggacagcuacugugggauaccgugacaggcgucgacauggcucucuga

SEQ ID NO: 157252 - RNA, 1401 nt, Artificial Sequence; identical to SEQ ID NO: 156662
  derived and/or modified CDS sequence (opt3) from neuraminidase__InfluenzaB__AGX17043

SEQ ID NO: 157253 - RNA, 1401 nt, Artificial Sequence
  derived and/or modified CDS sequence (opt3) from neuraminidase__InfluenzaB__AGX17054
augcugcccagcaccauccagacacucacucuuuuccugacguccggcgggguguuguuaucucuguacgucucagccagucuaagcuaucuccuguacuccgacauucuucugaaguuuucuccuaccgagauaacagcuccaacuaugccguuggauugcgcaaacgccucgaauguucaagcggugaacagaucagcuaccaaaggaguaacacuccugcugcccgaaccugaguggaccuauccaaggcucagcugucccgguaguacuuuccagaaggccuuacugaucuccccucaccgguuuggcgaaacaaaaggaaauucugcaccacuuauuauccgcgagcccuucauugccugcgggccuaaggaauguaaacauuuugcuuugacccacuacgcagcccagccaggcgguuauuacaacgggacgcgaggagaccguaauaagcugagacaucuaaucagcgugaagcucggcaaaauaccgacugucgagaacuccaucuuccacauggcugccuggucaggcagugcgugccaugaugggaaggaguggaccuauauuggaguggacggucccgauaauaacgcacugcuuaaaaucaaguacggcgaagccuacacagacacuuaucacagcuacgcuaauaacauucugaggacccaggagucugccuguaauugcaucgggggaaacuguuauuugaugauaacagauggcuccgcaucagguauuagcgaaugccgguuucucaaaauccgcgaggggagaauuaucaaggagaucuucccuaccggaaggguuaagcacacggaagaguguacuugcggcuuugcuaguaauaaaacaauugaaugugccugccgggacaacucuuacaccgcgaagcgcccauucgugaaacugaaugucgagacugauacagccgaaauacgauuaaugugcaccgagacguaucuggacacccccagaccugaugacggcuccaucacagggccaugugagagcaacggagauaacgguaauggcgggauuaagggaggcuuugugcaucaaaggauggcaucgaaaaucggucggugguacucucguacuauguccaagaccaaacgcauggggaugggccucuauguaaaguacgacggagaccccugggcugauucagacgcccuugcucugaguggcguuauggugagcauggaggaaccggggugguacuccuucggauuugaaauaaaggauaaaaagugcgacgucccuuguauugguaucgagauggugcacgauggcgggaaagaaacauggcauucugccgcaacugccaucuauugcuugaugggaagcggccagcuacugugggacaccgugacaggugucgauauggcucucuga

SEQ ID NO: 157254 - RNA, 1401 nt, Artificial Sequence
  derived and/or modified CDS sequence (opt3) from neuraminidase__InfluenzaB__AGX17065
augcugcccagcaccauccagacacucacucuuuuccugacguccggcgggguguuguuaucucuguacgucucagcccuacucaguuaucugcuuuacagcgacauucuguugaaguuuuccccuaccaaaauaaucgcuccaacaacuucucucgauucggcaaacgccucaaauuuccaagcgguuaaccacagcgcuaccaaggagaugacauuucugcugccggaacccgaguggaccuauccuagacucaguugccagggauccacuuuccagaaagccuuacugauuucuccacauagguuuggugaagcaaagggcaauagcgcuccccuuaucauucgggagccuuucaucgccugugggccaaaagaaugcaagcacuuugcauugacacauuacgccgcucagcccggaggcuauuacaacgguacccgcgaggaccgaaauaagcugcgucaccuaauauccgugaaccucgggaaaaucccuacgguagaaaauucaauuuuccauauggccgcguggaguggaagcgcaugucacgauggcagagaauggacuuauaucggcguggacgggccagauucuaacgcccugauuaagaucaaauacggagaggcuuacaccgacacauaucacuccuacgccaauaacauacuuaggacucaagaaucagcaugcaauuguauugguggcgauugcuaucugaugaucaccgacgggagcgcuaguggaauuucuaagugucgguuuuugaaaauccgcgagggcagaaucauuaaggagauauucccgacagguagggucgaacauaccgaggaaugcacguguggguuugccuccaacaagacuaucgagugcgcgugucgggauaauagcuacacagccaaacgccccuucgugaagcucaacguugaaaccgacacugcagagauucgacugaugugcacagagaccuauuuagauacgccuagaccagacgauggaucgaucaccggccccugcgaaucuaauggcgacaaaggguccggagguauaaagggcggguuugugcaccagaggauggcuucaaaaauuggacggugguacagucguacaaucagcaagacuaaacgcaugggcauggagcuguaugucaaguacgacggugauccuuggaccgacuccgaugcccucgcuccaucuggggugaugguaagcaucgaggagcccggcugguacucauucggauucgaaauuaaggacaaaaagugugauguuccgugcaucggcauugagauggugcaugacgggggaaaaacaacuuggcacagugccgcaaccgccauauauugucuuauggguuccggccagcuguugugggauacagucaccgggguggacauggcucuauga

SEQ ID NO: 157255 - RNA, 1401 nt, Artificial Sequence
  derived and/or modified CDS sequence (opt3) from neuraminidase__InfluenzaB__AGX17076
augcugcccagcaccauccagacacucacucuuuuccugacguccggcgggguguuguuaucucuguacgucucagccagucuaagcuaucuccuguacuccgacauucuucugaaguuuucuccuaccgagauaacagcuccaacuaugccguuggauugcgcaaacgccucgaauguucaagcggugaacagaucagcuaccaaaggaguaacacuccugcugcccgaaccugaguggaccuauccaaggcucagcugucccgguaguacuuuccagaaggccuuacugaucuccccucaccgguuuggcgaaacaaaaggaaauucugcaccacuuauuauccgcgagcccuucauugccugcgggccuaaggaauguaaacauuuugcuuugacccacuacgcagcccagccaggcgguuauuacaacgggacgcgaggagaccguaauaagcugagacaucuaaucagcgugaagcucggcaaaauaccgacugucgagaacuccaucuuccacauggcugccuggucaggcagugcgugccaugaugggaaggaguggaccuauauuggaguggacggucccgauaauaacgcacugcuuaaaaucaaguacggcgaagccuacacagacacuuaucacagcuacgcuaauaacauucugaggacccaggagucugccuguaauugcaucgggggaaacuguuauuugaugauaacagauggcuccgcaucagguauuagcgaaugccgguuucucaaaauccgcgaggggagaauuaucaaggagaucuucccuaccggaaggguuaagcacacggaagaguguacuugcggcuuugcuaguaauaaaacaauugaaugugccugccgggacaacucuuacaccgcgaagcgcccauucgugaaacugaaugucgagacugauacagccgaaauacgauuaaugugcaccgagacguaucuggacacccccagaccugaugacggcuccaucacagggccaugugagagcaacggagauaaggguucgggcgggauuaaaggaggcuuugugcaucaaaggauggcaucuaagaucggucggugguacucccguacuaugucaaaaaccaagcgcauggggaugggccucuauguaaaguacgacggagaccccugggcugauagugacgcccuugcucugagcggcguuaugguguccauggaggaaccggggugguacucuuucggauuugaaauaagagauaaaaagugcgacgucccuuguauugguaucgagaucgugcacgauggcgggaaagaaacauggcauagcgccgcaacugccauuuauugcuugaugggaucaggccagcuacugugggacaccgugacaggugucgauauggcucucuga

SEQ ID NO: 157256 - RNA, 1401 nt, Artificial Sequence; identical to SEQ ID NO: 157210
  derived and/or modified CDS sequence (opt3) from neuraminidase__InfluenzaB__AGX17087

SEQ ID NO: 157257 - RNA, 1401 nt, Artificial Sequence; identical to SEQ ID NO: 157210
  derived and/or modified CDS sequence (opt3) from neuraminidase__InfluenzaB__AGX17098

SEQ ID NO: 157258 - RNA, 1401 nt, Artificial Sequence; identical to SEQ ID NO: 157210
  derived and/or modified CDS sequence (opt3) from neuraminidase__InfluenzaB__AGX17109

SEQ ID NO: 157259 - RNA, 1401 nt, Artificial Sequence; identical to SEQ ID NO: 157210
  derived and/or modified CDS sequence (opt3) from neuraminidase__InfluenzaB__AGX17120

SEQ ID NO: 157260 - RNA, 1401 nt, Artificial Sequence; identical to SEQ ID NO: 156662
  derived and/or modified CDS sequence (opt3) from neuraminidase__InfluenzaB__AGX17131

SEQ ID NO: 157261 - RNA, 1401 nt, Artificial Sequence; identical to SEQ ID NO: 156664
  derived and/or modified CDS sequence (opt3) from neuraminidase__InfluenzaB__AGX17142

SEQ ID NO: 157262 - RNA, 1401 nt, Artificial Sequence
  derived and/or modified CDS sequence (opt3) from neuraminidase__InfluenzaB__AGX17153
augcugcccagcaccauccagacacucacucuuuuccugacguccggcgggguguuguuaucucuguacgucucagccagucuaagcuaucuccuguacuccgacauucuucugaaguuuucuccuaccgagauaacagcuccaacuaugccguuggauugcgcaaacgccucgaauguucaagcggugaacagaucagcuaccaaaggaguaacacuccugcugcccgaaccugaguggaccuauccaaggcucagcugucccgguaguacuuuccagaaggccuuacugaucuccccucaccgguuuggcgaaacaaaaggaaauucugcaccacuuauuauccgcgagcccuucauugccugcgggccuaaggaauguaaacauuuugcuuugacccacuacgcagcccagccaggcgguuauuacaacgggacgcgaggagaccguaauaagcugagacaucuaaucagcgugaagcucggcaaaauaccgacugucgagaacuccaucuuccacauggcugccuggucaggcagugcgugccaugaugggaaggaguggaccuauauuggaguggacggucccgauaauaacgcacugcuuaaaaucaaguacggcgaagccuacacagacacuuaucacagcuacgcuaauaacauucugaggacccaggagucugccuguaauugcaucgggggaaacuguuauuugaugauaacagauggcuccgcaucagguauuagcgaaugccgguuucucaaaauccgcgaggggagaauuaucaaggagaucuucccuaccggaaggguuaagcacacggaagaguguacuugcggcuuugcuaguaauaaaacaauugaaugugccugccgggacaacucuuacaccgcgaagcgcccauucgugaaacugaaugucgagacugauacagccgaaauacgauuaaugugcaccgagacguaucuggacacccccagaccugaugacggcuccaucauugggccaugugagagcaacggagauaaggguucgggcgggaucaaaggaggcuuugugcaucaaaggauggcaucuaagauaggucggugguacucccguacaaugucaaaaacuaagcgcauggggaugggccucuauguaaaguacgacggagaccccugggcugauagugacgcccuugcucugagcggcguuaugguguccauggaggaaccggggugguacucuuucggauuugaaauuaaagauaagaaaugcgacgucccuuguaucgguaucgagauggugcacgauggcgggaaggaaaccuggcauagcgccgcaacagccauuuauugcuugaugggaucaggccagcuacugugggacacugugaccggugucgauauggcucucuga

SEQ ID NO: 157263 - RNA, 1401 nt, Artificial Sequence; identical to SEQ ID NO: 157210
  derived and/or modified CDS sequence (opt3) from neuraminidase__InfluenzaB__AGX17164

SEQ ID NO: 157264 - RNA, 1404 nt, Artificial Sequence
  derived and/or modified CDS sequence (opt3) from neuraminidase__InfluenzaB__AGX17175
augcugcccagcaccauccagacacucacucuuuuccugacguccggcgggguguuguuaucucuguacgucucagccagucuaagcuaucuccuguacuccgacauucuucugaaguuuucuccuaccgagauaacagcuccaacuaugccguuggauugcgcaaacgccucgaauguucaagcggugaacagaucagcuaccaaaggaguaacacuccugcugcuccccgaaccugaguggaccuauccaagguuaagcugucccgguaguacuuuccagaaggcccugcuuaucuccccucaccgguuuggcgaaacaaaaggaaauucugcaccauugauuauccgcgagcccuucauugccugcgggccuaaggaauguaaacauuuugcucugacccacuacgcagcccagccaggcgguuauuacaacgggacgcgaggagaccguaauaagcuaagacaucucaucagcgugaagcugggcaaaauaccgacugucgagaacuccaucuuccacauggcugccuggucaggcagugcgugccaugaugggaaggaguggaccuauauuggaguggacggucccgauaauaacgcacuucugaaaaucaaguacggcgaagccuacacagacacuuaucacagcuacgcuaauaacauuuugaggacccaggagucugccuguaauugcaucgggggaaacuguuaucucaugauaacagauggcuccgcaucagguauuagcgaaugccgguuucugaaaauccgcgaggggagaauuaucaaggagaucuucccuaccggaaggguuaagcacacggaagaguguacuugcggcuuugcuaguaauaaaacaauugaaugugccugccgggacaacucuuacaccgcgaagcgcccauucgugaaauuaaaugucgagacugauacagccgaaauacgacugaugugcaccgagacguaucucgacacccccagaccugaugacggcuccaucacagggccaugugagagcaacggagauaaggguucgggcgggauuaaaggaggcuuugugcaucaaaggauggcaucuaagaucggucggugguacucccguacuaugucaaaaaccaagcgcauggggaugggccuuuauguaaaguacgacggagaccccugggcugauagugacgcccuggcuuugagcggcguuaugguguccauggaggaaccggggugguacucuuucggauuugaaauaagagauaaaaagugcgacgucccuuguauugguaucgagauggugcacgauggcgggaaagaaacauggcauagcgccgcaacugccaucuauugccuaaugggaucaggccagcugcucugggacaccgugacaggugucgauauggcucuguga

SEQ ID NO: 157265 - RNA, 1401 nt, Artificial Sequence
  derived and/or modified CDS sequence (opt3) from neuraminidase__InfluenzaB__AGX17186
augcugcccagcaccauccagacacucacucuuuuccugacguccggcgggguguuguuaucucuguacgucucagccagucuaagcuaucuccuguacuccgacauucuucugaaguuuucuccuaccgagauaacaacuccaaccaugccguuggauugcgcuaacgcaucgaauguucaagccgugaacagaucagcgacaaaaggaguaacccuccugcugcccgaaccugaguggacuuauccaaggcucagcugucccgguaguacauuccagaaggcuuuacugaucuccccucaccgguuuggcgaaaccaaaggaaauucugccccacuuauuauccgcgagcccuucauugcaugcgggccuaaggaauguaaacauuuugccuugacgcacuacgcugcacagccaggcgguuauuacaacgggacucgaggagaccguaauaagcugagacaucuaaucagcgugaagcucggcaaaauaccgaccgucgagaacuccaucuuccacauggccgcuuggucaggcagugccugccaugaugggaaggaguggacauauauuggaguggacggucccgauaauaacgcgcugcuuaaaaucaaguacggcgaagcauacacugacaccuaucacagcuacgccaauaacauucugaggacacaggagucugcuuguaauugcaucgggggaaacuguuauuugaugauaaccgauggcuccgccucagguauuagcgaaugccgguuucucaaaauccgcgaggggagaauuaucaaggagaucuucccuacgggaaggguuaaguacacugaagaguguacaugcggcuuugcaaguaauaaaaccauugaaugugcuugccgggacaacucuuauacugccaagcgcccauucgugaaacugaaugucgagacagauaccgcggaaauacgauuaaugugcacggagaccuaccuggacacacccagaccugaugacggcuccaucacugggccaugugagagcaacggagauaaggguucgggcgggauuaaaggaggcuuugugcaccaaaggauggccucuaagaucggucggugguauucccguaccaugucaaaaacacgcagaauggggaugggccucuacguaaaguacgacggagaccccugggcagauagugacgcucuugcccugagcggcguuaugguguccauggaggaaccggggugguauucuuucggauuugaaauaaaggauaaaaagugcgacgucccuuguauugguaucgagauggugcaugauggcgggaaagaaacuuggcacagcgcugccaccgcaaucuacugcuugaugggaucaggccagcuacugugggacacagugaccggugucgauauggcccucuga

SEQ ID NO: 157266 - RNA, 1401 nt, Artificial Sequence; identical to SEQ ID NO: 157241
  derived and/or modified CDS sequence (opt3) from neuraminidase__InfluenzaB__AGX17197

SEQ ID NO: 157267 - RNA, 1401 nt, Artificial Sequence
  derived and/or modified CDS sequence (opt3) from neuraminidase__InfluenzaB__AGX17208
augcugcccagcaccauccagacacucacucuuuuccugacguccggcgggguguuguuaucucuguacgucucagccagucuaagcuaucuccuguacuccgacauucuucugaaguuuucuccuaccgagauaacaacuccaaccaugccguuggauugcgcuaacgcaucgaauguucaagccgugaacagaucagcgacaaaaggaguaacccuccugcugcccgaaccugaguggacuuauccaaggcucagcugucccgguaguacauuccagaaggcuuuacugaucuccccucaccgguuuggcgaaaccaaaggaaauucugccccacuuauuauccgcgagcccuucauugcaugcgggccuaaggaauguaaacauuuugccuugacgcacuacgcugcacagccaggcgguuauuacaacgggacucgaggagaccguaauaagcugagacaucuaaucagcgugaagcucggcaaaauaccgaccgucgagaacuccaucuuccacauggccgcuuggucaggcagugccugccaugaugggaaggaguggacauauauuggaguggacggucccgauaauaacgcgcugcuuaaaaucaaguacggcgaagcauacacugacaccuaucacagcuacgccaauaacauucugaggacacaggagucugcuuguaauugcaucgggggaaacuguuauuugaugauaaccgauggcuccgccucagguauuagcgaaugccgguuucucaaaauccgcgaggggagaauuaucaaggagaucuucccuacgggaaggguuaagcacacugaagaguguacaugcggcuuugcaaguaauaaaaccauugaaugugcuugccgggacaacucuuacacugccaagcgcccauucgugaaacugaaugucgagacagauaccgcggaaauacgauuaaugugcacggagaccuaucuggacacacccagaccugaugacggcuccaucacugggccaugugagagcaacggagauaaggguucgggcgggauuaaaggaggcuuugugcaucaaaggauggccucuaagaucggucggugguacucccguaccaugucaaaaacacgcagaauggggaugggccucuauguaaaguacgacggagaccccugggcagauagugacgcucuugcccugagcggcguuaugguguccauggaggaaccggggugguacucuuucggauuugaaauaaaggauaaaaagugcgacgucccuuguauugguaucgagauggugcacgauggcgggaaagaaacuuggcauagcgcugccaccgcaaucuauugcuugaugggaucaggccagcuacugugggacacagugaccggugucgauauggcccucuga

SEQ ID NO: 157268 - RNA, 1401 nt, Artificial Sequence; identical to SEQ ID NO: 157210
  derived and/or modified CDS sequence (opt3) from neuraminidase__InfluenzaB__AGX17219

SEQ ID NO: 157269 - RNA, 1401 nt, Artificial Sequence; identical to SEQ ID NO: 156664
  derived and/or modified CDS sequence (opt3) from neuraminidase__InfluenzaB__AGX17230

SEQ ID NO: 157270 - RNA, 1401 nt, Artificial Sequence; identical to SEQ ID NO: 157210
  derived and/or modified CDS sequence (opt3) from neuraminidase__InfluenzaB__AGX17241

SEQ ID NO: 157271 - RNA, 1401 nt, Artificial Sequence
  derived and/or modified CDS sequence (opt3) from neuraminidase__InfluenzaB__AGX17252
augcugcccagcaccauccagacacucacucuuuuccugacguccggcgggguguuguuaucucuguacgucucagccagucuaagcuaucuccuguacuccgacauucuucugaaguuuucuccuaccgagauaacagcuccaacuaugccguuggauugcgcaaacgccucgaauguucaagcggugaacagaucagcuaccaaaggaguaacacuccugcugcccgaacucgaguggaccuauccuagguuaagcuguccagguaguacuuuccagaaggcccugcuuaucucuccccaccgguuuggcgaaacaaaaggaaauuccgcaccuuugauuauccgcgagccauucauugccugcgggcccaaggaauguaaacauuuugcucugaccuacuaugcagcccagccuggcgguuacuauaacgggacgcgaggagaccguaauaagcuaagacaccucaucagcgugaagcugggcaaaauaccaacugucgagaacuccaucuuccauauggcugccuggucaggcagugcgugccacgaugggaaggaguggaccuacauuggaguggacgguccggauaauaacgcacuucugaaaaucaaguacggcgaagccuauacagacacuuaccauagcuaugcuaauaacauuuugaggacccaggagucugccuguaauugcaucgggggaaacuguuaccucaugauaacagauggcuccgcaucagguauuagcgaaugccgguuucugaaaauccgcgaggggagaauuaucaaggagaucuuccccaccggaaggguuaagcacacggaagaguguacuugcggcuuugcuaguaauaaaacaauugaaugugccugccgggacaacucuuauaccgcgaagcgcccuuucgugaaauuaaaugucgagacugauacagccgaaauacgacugaugugcaccgagacguaccucgacaccccaagacccgcagauggcuccaucacagggccuugugagagcaacggagacaaggguucgggcgggauuaaaggaggcuuugugcaccaaaggauggcuucuaagaucggucggugguauucccguacuaugucaaaaaccaagcgcauggggaugggccuuuacguaaaguacgauggagacccaugggccgacagugaugcucuggccuugagcggcguuaugguguccauggaggaacccgggugguauucuuucggauuugaaauaaaagacaagaaaugcgaugucccguguauugguaucgagauggugcaugacggcgggaaggaaacauggcacagcgcagccacugcuaucuacugccuaaugggaucaggccagcugcucugggauaccgugacaggugucgacauggcgcuguga

SEQ ID NO: 157272 - RNA, 1401 nt, Artificial Sequence
  derived and/or modified CDS sequence (opt3) from neuraminidase__InfluenzaB__AGX17263
augcugcccagcaccauccagacacucacucuuuuccugacguccggcgggguguuguuaucucuguacgucucagccagucuaagcuaucuccuguacuccgacauucuucugaaguugucuccuaccgagauaacagcuccaacuaugccgcucgauugcgcaaacgccucgaauguucaagcggugaacagaucagcuaccaaaggaguaacacugcugcuccccgaaccugaguggaccuauccaagguuaagcugucccgguaguacuuuucagaaggcccugcuuaucuccccucaccgguucggcgaaacaaaaggaaauucugcaccauugauuauccgcgagcccuuuauugccugcgggccuaaggaauguaaacauuucgcucugacccacuacgcagcccagccaggcgguuauuacaacgggacgcgaggagaccguaauaagcuaagacaucucaucagcgugaagcugggcaaaauaccgacugucgagaacuccaucuuucacauggcugccuggucaggcagugcgugccaugaugggaaggaguggaccuauauuggaguggacggucccgauaauaacgcacuucugaaaaucaaguacggcgaagccuacacagacacuuaucacagcuacgcuaauaacauuuugaggacccaggagucugccuguaauugcaucgggggaaacuguuaucucaugauaacagauggcuccgcaucagguauuagcgaaugccgguuccugaaaauccgcgaggggagaauuaucaaggagaucuuuccuaccggaaggguuaagcacacggaagaguguacuugcggcuucgcuaguaauaaaacaauugaaugugccugccgggacaacucuuacaccgcgaagcgcccauuugugaaauuaaaugucgagacugauacagccgaaauacgacugaugugcaccgagacguaucucgacacccccagaccugaugacggcuccaucacagggccaugugagagcaacggagauaaggguucgggcgggauuaaaggaggcuucgugcaucaaaggauggcaucuaagaucggucggugguacucccguacuaugucaaaaaccaagcgcauggggaugggccuuuauguaaaguacgacggagaccccugggcugauagugacgcccuggcuuugagcggcguuaugguguccauggaggaaccggggugguacucuuuuggauucgaaauaaaagauaagaaaugcgacgucccuuguauugguaucgagauggugcacgauggcgggaaggaaacauggcauagcgccgcaacugccaucuauugccuaaugggaucaggccagcugcucugggacaccgugacaggugucgauauggcucuguga

SEQ ID NO: 157273 - RNA, 1401 nt, Artificial Sequence
  derived and/or modified CDS sequence (opt3) from neuraminidase__InfluenzaB__AGX17274
augcugcccagcaccauccagacacucacucuuuuccugacguccggcgggguguuguuaucucuguacgucucagccagucuaagcuaucuccuguacuccgacauucuucugaaguuuucuccuaccgagauaaacgcuccaacaaugccguuggauugcgcaaaugccucgaacguucaagcggugaauagaucagcuacuaaaggaguaacccuccugcugcccgaaccugaguggacauauccaaggcucagcugucccgguaguaccuuccagaaggccuuacugaucuccccucaccgguuuggcgaaacuaaagggaacucugcaccacuuauuauccgcgagcccuucauugccugcggaccuaaggaauguaaacauuuugcuuugacacacuacgcagcccagccaggcgguuauuacaaugggacccgaggagaccguaacaagcugagacaucuaaucagcgugaagcucggcaaaauaccgacggucgaaaauuccaucuuccacauggcugccuggucaggcagugcgugccaugaugggaaggaguggacuuauauuggaguggacggucccgauaacaaugcacugcuuaaaaucaaguacggcgaagccuacaccgacacauaucacagcuacgcuaacaauauucugaggacucaggagucugccuguaacugcaucgggggaaauuguuauuugaugauaaccgauggcuccgcaucagguauuagcgaaugccgguuucucaaaauccgcgaggggagaauuaucaaggagaucuucccuacaggaaggguuaagcacaccgaagaguguacgugcggcuuugcuaguaacaaaacuauugaaugugccugccgggacaauucuuacacagcgaagcgcccauucgugaaacugaacgucgagaccgauacugccgaaauacgauuaaugugcacagagaccuaucuggacacgcccagaccugaugacggcuccaucaccgggccaugugagagcaacggagauaaggguucgggcgggauuaaaggaggcuuugugcaucaaaggauggcaucuaagaucggucggugguacucccguacaaugucaaaaacuaagcgcauggggaugggccucuauguaaaguacgacggagaccccugggcugauagugacgcccuugcucugagcggcguuaugguguccauggaggagccggggugguacucuuucggauuugaaauaaaagauaagaaaugcgacgucccuuguauugguaucgagauggugcacgauggcgggaaggaaaccuggcauagcgccgcaacagccaucuauugcuugaugggaucaggccagcuacugugggacacugugaccggugucgauauggcucucuga

SEQ ID NO: 157274 - RNA, 1401 nt, Artificial Sequence
  derived and/or modified CDS sequence (opt3) from neuraminidase__InfluenzaB__AGX17285
augcugcccagcaccauccagacacucacucuuuuccugacguccggcgggguguuguuaucucuguacaugucagccagucuaagcuaucuccuguacuccgacauucuucugaaguuuucuccuaccgagauaacagcuccaacuaugccguuggauugcgcaaacgccucgaauguccaagcgguuaacagaucagcuaccaaaggagugacacuccugcugcccgaaccugaguggaccuauccaaggcucagcugucccgguaguacuuuccagaaggccuuacugaucuccccucaccgguuuggcgaaacaaaaggaaauucugcaccacuuauuauccgcgagcccuucauugccugcgggccuaaggaauguaaacauuuugcuuugacccacuacgcagcccagccaggcgguuauuacaacgggacgcgaggagaccguaauaagcugagacaucuaaucagcguaaagcucggcaaaauaccgacuguggagaacuccaucuuccacauggcugccuggucaggcagugcgugccaugaugggaaggaguggaccuauauuggagucgacggucccgauaauaacgcacugcuuaaaaucaaguacggcgaagccuacacagacacuuaucacagcuacgcuaauaacauucugaggacccaggagucugccuguaauugcaucgggggaaacuguuauuugaugauaacagauggcuccgcaucagguauuagcgaaugccgguuucucaaaauccgcgaggggagaauuaucaaggagaucuucccuaccggaagggugaagcacacggaagaguguacuugcggcuuugcuaguaauaaaacaauugaaugugccugccgggacaacucuuacaccgcgaagcgcccauucguuaaacugaauguggagacugauacagccgaaauacgauuaaugugcaccgagacguaucuggacacccccagaccugaugacggcuccaucacagggccaugugagagcaacggagauaaggguucgggcgggauuaaaggaggcuuuguccaucaaaggauggcaucuaagaucggucggugguacucccguacuaugucaaaaaccaagcgcauggggaugggccucuaugugaaguacgacggagaccccugggcugauagugacgcccuugcucugagcggcguaaugguuuccauggaggaaccggggugguacucuuucggauuugaaauaaaagauaagaaaugcgacgugccuuguauugguaucgagaugguccacgauggcgggaaggaaacauggcauagcgccgcaacugccaucuauugcuugaugggaucaggccagcuacugugggacaccgugacagguguggauauggcucucuga

SEQ ID NO: 157275 - RNA, 1401 nt, Artificial Sequence
  derived and/or modified CDS sequence (opt3) from neuraminidase__InfluenzaB__AGX17296
augcugcccagcaccauccagacacucacucuuuuccugacguccggcgggguguuguuaucucuguacgucucagccagucuaagcuaucuccuguacuccgacauucuucugaaguuuucuccuaccgagauaacagcuccaacuaugccguuggauugcgcaaacgccucgaauguucaagcggugaacagaucagcuaccaaaggaguaacacuccugcugcccgaaccugaguggaccuauccaaggcucagcugucccgguaguacuuuccagaaggccuuacugaucuccccucaccgguuuggcgaagcaaaaggaaauucugccccacuuauuauccgcgagcccuucauugcuugcgggccuaaggaauguaaacauuuugcauugacacacuacgccgcucagccaggcgguuauuacaacgggacccgaggagaccguaauaagcugagacaucuaaucagcgugaagcucggcaaaauaccgacggucgagaacuccaucuuccacauggccgcguggucaggcagugcaugccaugaugggaaggaguggacuuauauuggaguggacggucccgauaauaacgcccugcuuaaaaucaaguacggcgaggcuuacaccgacacauaucacagcuacgccaauaacauucugaggacucaggagucugcauguaauugcaucgggggaaacuguuauuugaugauaaccgauggcuccgcuucagguauuagcgaaugccgguuucucaaaauccgcgaggggagaauuaucaaggagaucuucccuacaggaaggguuaagcacaccgaagaguguacgugcggcuuugccaguaauaaaacuauugaaugugcgugccgggacaacucuuacacagccaagcgcccauucgugaaacugaaugucgagaccgauacugcagaaauacgauuaaugugcacagagaccuaucuggacacgcccagaccugaugacggcuccaucaccgggccaugugagagcaacggagauaaggguucgggcgggauuaaaggaggcuuugugcaucaaaggauggcuucuaagaucggucggugguacucccguacaaugucaaaaacuaagcgcauggggaugggccucuauguaaaguacgacggagaccccugggccgauagugacgcucuugcccugagcggcguuaugguguccauggaagaaccggggugguacucuuucggauuugaaauaaaagauaagaaaugcgacgucccuuguauugguaucgagauggugcacgauggcgggaaggaaaccuggcauagcgcagccacagcuaucuauugcuugaugggaucaggccagcuacugugggacacugugaccggugucgauauggcgcucuga

SEQ ID NO: 157276 - RNA, 1401 nt, Artificial Sequence; identical to SEQ ID NO: 157208
  derived and/or modified CDS sequence (opt3) from neuraminidase__InfluenzaB__AGX17307

SEQ ID NO: 157277 - RNA, 1401 nt, Artificial Sequence; identical to SEQ ID NO: 156662
  derived and/or modified CDS sequence (opt3) from neuraminidase__InfluenzaB__AGX17318

SEQ ID NO: 157278 - RNA, 1401 nt, Artificial Sequence
  derived and/or modified CDS sequence (opt3) from neuraminidase__InfluenzaB__AGX17329
augcugcccagcaccauccagacacucacucuuuuccugacguccggcgggguguuguuaucucuguacgucucagccagucuaagcuaucuccuguacuccgacaugcuucugaaguuuucuccuaccgagauuacagcuccaacuaugccguuggauugcgcaaacgccucgaauguucaagcggugaacagaucagcuaccaaaggaguaacacuccugcugcccgaaccugaguggaccuauccaaggcucagcugucccgguaguacuuuccagaaggccuuacugauauccccucaccgguuuggcgaaacaaaaggaaauucugcaccacuuaucauucgcgagcccuucaucgccugcgggccuaaggaauguaaacauuuugcuuugacccacuacgcagcccagccaggcgguuauuacagcgggacgcgaggagaccguaacaagcugagacaucuaauuuccgugaagcucggcaaaaucccgacugucgaaaauucaauauuccacauggcugccuggaguggcagcgcgugccaugaugggaaggaguggaccuauaucggaguggacggucccgauaacaaugcacugcuuaaaauuaaguacggcgaagccuacacagacacuuaucacucuuacgcuaacaauauccugaggacccaggaguccgccuguaacugcauugggggaaauuguuauuugaugaucacagauggcucagcaagcgguauaagugaaugccgguuucucaaaauucgcgaggggagaaucauuaaggagaucuucccuaccggaaggguuaagcacacggaagaguguacuugcggcuuugcuucuaacaaaacaaucgaaugugccugccgggacaauuccuacaccgcgaagcgcccauucgugaaacugaacgucgagacugauacagccgaaauucgauuaaugugcaccgagacguaucuggacacccccagaccugaugacggcagcauaacagggccaugugagucgaauggagauaaggguucuggcgggaucaaaggaggcuuugugcaucaaaggauggcauccaagauuggucggugguacucacguacuaugaguaaaaacaagcgcauggggaugggccucuauguaaaguacgacggagaccccugggcugauagcgacgcccuugcucuguccggcguuauggugucuauggaggagccggggugguacagcuucggauuugaaaucaaagauaagaaaugcgacgucccuuguauagguauugagauggugcacgauggcgggaaggaaaccuggcauucagccgcaacagccaucuauugcuugaugggaaguggccagcuacugugggacacugugaccggugucgauauggcucucuga

SEQ ID NO: 157279 - RNA, 1401 nt, Artificial Sequence; identical to SEQ ID NO: 157210
  derived and/or modified CDS sequence (opt3) from neuraminidase__InfluenzaB__AGX17340

SEQ ID NO: 157280 - RNA, 1401 nt, Artificial Sequence
  derived and/or modified CDS sequence (opt3) from neuraminidase__InfluenzaB__AGX17351
augcugcccagcaccauccagacacucacucuuuuccugacguccggcgggguguuguuaucucuguacgucucagccagucuaagcuaucuccuguacuccgacauucuucugaaguuuucuccuaccgagauaacagcuccaacuaugccguuggauugcgcaaacgccucgaauguucaagcggugaacagaucagcuaccaaaggaguaacacuccugcugcccgaaccugaguggaccuauccaaggcucagcugucccgguaguacuuuccagaaggccuuacugaucuccccucaccgguuuggcgaaacaaaaggaaauucugcaccacuuauuauccgcgagcccuucauugccugcgggccuaaggaauguaaacauuuugcuuugacccacuacgcagcccagccaggcgguuauuacaacgggacgcgaggagaccguaauaagcugagacaucuaaucagcgugaagcucggcaaaauaccgacugucgagaacuccaucuuccacauggcugccuggucaggcagugcgugccaugaugggaaggaguggaccuauauuggaguggacggucccgauaauaacgcacugcuuaaaaucaaguacggcgaagccuacacagacacuuaucacagcuacgcuaauaacauucugaggacccaggagucugccuguaauugcaucgggggaaacuguuauuugaugauaacagauggcuccgcaucagguauuagcgaaugccgguuucucaaaauccgcgaggggagaauuaucaaggagaucuucccuaccggaaggguuaagcacacggaagaguguacuugcggcuuugcuaguaauaaaacaauugaaugugccugccgggacaacucuuacaccgcgaagcgcccauucgugaaacugaaugucgagacugauacagccgaaauacgauuaaugugcaccgagacguaucuggacacccccagaccugaugacggcuccaucacagggccaugugagacuaacggagauaaggguagcggcgggauuaaaggaggcuuugugcaucaaaggauggcaucgaagaucggucggugguacucucguaccauguccaaaacaaagcgcauggggaugggccucuauguaaaguacgacggagaccccugggcugauucagacgcccuugcucugaguggcguuauggugagcauggaggaaccggggugguacuccuucggauuugaaauaaaagauaagaaaugcgacgucccuuguauugguaucgagauggugcacgauggcgggaaggaaacuuggcauucugccgcaaccgccaucuauugcuugaugggaagcggccagcuacugugggacacagugaccggugucgauauggcucucuga

SEQ ID NO: 157281 - RNA, 1401 nt, Artificial Sequence
  derived and/or modified CDS sequence (opt3) from neuraminidase__InfluenzaB__AGX17362
augcugcccagcaccauccagacacucacucuuuuccugacguccggcgggguguuguuaucucuguacgucucagccagucuaagcuaucuccuguacuccgacauucuucugaaguuuucuccuaccgagauaacagcuccaacuaucccguuggauugcgcaaacgccucgaauauucaagcgguuaacagaucagcuaccaaaggagugacacuccugcugcccgaaccugaguggaccuauccaaggcucagcugucccgguaguacuuuccagaaggccuuacugaucuccccucaccgguuuggcgaaacaaaaggaaauucugcaccacuuauuauccgcgagcccuucauagccugcgggccuaaggaauguaaacauuuugcuuugacccacuacgcagcccagccaggcgguuauuacaacgggacgcgaggagaccguaauaagcugagacaucuaaucagcguaaagcucggcaaaauuccgacuguggagaacuccaucuuccacauggcugccuggucaggcagugcgugccaugaugggaaggaguggaccuauauuggagucgacggucccgauaauaacgcacugcuuaaaaucaaguacggcgaagccuacacagacacuuaucacagcuacgcuaauaacauacugaggacccaggagucugccuguaauugcauugggggaaacuguuauuugaugaucacagauggcuccgcaucagguauuagcgaaugccgguuucucaaaauccgcgaggggagaaucauuaaggagauauucccuaccggaagggugaagcacacggaagaguguacuugcggcuuugcuaguaauaaaacaaucgaaugugccugccgggacaacucuuacaccgcgaagcgcccauucguuaaacugaauguggagacugauacagccgaaauucgauuaaugugcaccgagacguaucuggacacccccagaccugaugacggcuccaucacagggccaugugagagcaacggagauaaggguucgggcgggauaaaaggaggcuuuguccaucaaaggauggcaucuaagauuggucggugguacucccguacuaugucaaaaaccaagcgcauggggaugggccucuaugugaaguacgacggagaccccugggcugauagugacgcccuugcucugagcggcguaaugguuuccauggaggaaccggggugguacucuuucggauuugaaaucaaagauaagaaaugcgacgugccuuguaucgguauugagaugguccacgauggcgggaaggaaacauggcauagcgccgcaacugccaucuauugcuugaugggaucaggccagcuacugugggacaccgugacagguguggauauggcucucuga

SEQ ID NO: 157282 - RNA, 1401 nt, Artificial Sequence
  derived and/or modified CDS sequence (opt3) from neuraminidase__InfluenzaB__AGX17373
augcugcccagcaccauccagacacucacucuuuuccugacguccggcgggguguuguuaucucuguacgucucagccagucuaagcuaucuccuguacuccgacauucuucugaaguuuucuccuaccgagauaacagcuccaacuaugccguuggauugcgcaaacgccucgaauguucaagcggugaacagaucagcuaccaaaggaguaacacuccugcugcccgaaccugaguggaccuauccaaggcucagcugucccgguaguacuuuccagaaggccuuacugaucuccccucaccgguuuggcgaaacaaaaggaaauucugcaccacuuauuauccgcgagcccuucauugccugcgggccuaaggaauguaaacauuuugcuuugacccacuacgcagcccagccaggcgguuauuacaacgggacgcgaggagaccguaauaagcugagacaucuaaucagcgugaagcucggcaaaauaccgacugucgagaacuccaucuuccacauggcugccuggucaggcagugcgugccaugaugggaaggaguggaccuauauuggaguggacggucccgauaauaacgcacugcuuaaaaucaaguacggcgaagccuacacagacacuuaucacagcuacgcuaauaacauucugaggacccaggagucugccuguaauugcaucgggggaaacuguuauuugaugauaacagauggcuccgcaucagguguuagcgaaugccgguuucucaaaauucgcgaggggagaaucauuaaggagaucuucccuaccggaagggugaagcacacggaagaguguacuugcggcuuugcuaauaacaaaacaaucgaaugugccugccgggacaauaguuacaccgcgaagcgcccauucgucaaacugaacguggagacugauacagccgaaauucgauuaaugugcaccgagacguaucuggacacccccagaccugaugacggcucuauaacagggccaugugaguccaacggagauaaggguagcggcgggaucaaaggaggcuuuguacaucaaaggauggcaucgaagauuggucggugguacucucguacuauguccaaaaccaagcgcauggggaugggccucuauguuaaguacgacggagaccccugggcugauucagacgcccuugcucugaguggcgugauggucagcauggaggaaccggggugguacuccuucggauuugaaaucaaagauaagaaaugcgacgugccuuguauagguauugagauggugcacgauggcgggaaggaaacauggcauucugccgcaacugccaucuauugcuugaugggaagcggccagcuacugugggacaccgucacagguguuaauauggcucucuga

SEQ ID NO: 157283 - RNA, 1401 nt, Artificial Sequence; identical to SEQ ID NO: 156662
  derived and/or modified CDS sequence (opt3) from neuraminidase__InfluenzaB__AGX17384

SEQ ID NO: 157284 - RNA, 1401 nt, Artificial Sequence; identical to SEQ ID NO: 156730
  derived and/or modified CDS sequence (opt3) from neuraminidase__InfluenzaB__AGX17395

SEQ ID NO: 157285 - RNA, 1401 nt, Artificial Sequence
  derived and/or modified CDS sequence (opt3) from neuraminidase__InfluenzaB__AGX17404
augcugcccagcaccauccagacacucacucuuuuccugacguccggcgggguguuguuaucucuguacgucucagccagucuaagcuaucuccuguacuccgacauucuucugaaguuuucuccuaccgagauaacagcuccaacuaugccguuggauugcgcaaacgccucgaauguucaagcggugaacagaucagcuaccaaaggaguaacacuccugcugcccgaaccugaguggaccuauccaaggcucagcugucccgguaguacuuuccagaaggccuuacugaucuccccucaccgguuuggcgaaacaaaaggaaauucugcaccacuuauuauccgcgagcccuucauugccugcgggccuaaggaauguaaacauuuugcuuugacccacuacgcagcccagccaggcgguuauuacaacgggacgcgaggagaccguaauaagcugagacaucuaaucagcgugaagcucggcaaaauaccgacugucgagaacuccaucuuccacauggcugccuggucaggcagugcgugccaugaugggaaggaguggaccuauauuggaguggacgguagcgauaauaacgcacugcuuaaaaucaaguacggcgaagccuacacagacacuuaucacucuuacgcuaauaacauucugaggacccaggaguccgccuguaauugcaucgggggaaacuguuauuugaugauaacagauggcucagcaagcgguauuagugaaugccgguuucucaaaauccgcgaggggagaauuaucaaggagaucuuccccaccggaaggguuaagcacacggaagaguguacuugcggcuuugcuucuaauaaaacaauugaaugugccugccgggacaacuccuacaccgcgaagcgcccuuucgugaaacugaaugucgagacugauacagccgaaauacgauuaaugugcaccgagacguaucuggacaccccaagacccgaugacggcagcaucacagggccuugugagucgaacggagauaaggguucuggcgggauuaaaggaggcuuugugcaucaaaggauggcauccaagaucggucggugguacucacguacuaugaguaaaaccaagcgcauggggaugggccucuauguaaaguacgacggagacccaugggcugauagcgacgcccuugcucuguccggcauaaugguuucuauggaggaacccgggugguacagcuucggauuugaaauuaaagauaagaaaugcgacgugccguguaucgguaucgagaugguccacgauggcgggaaggaaacauggcauucagccgcaacugccauuuauugcuugaugggaaguggccagcuacugugggacaccgugacagguguggauauggcucucuga

SEQ ID NO: 157286 - RNA, 1401 nt, Artificial Sequence
  derived and/or modified CDS sequence (opt3) from neuraminidase__InfluenzaB__AGX17415
augcugcccagcaccauccagacacucacucuuuuccugacguccggcgggguguuguuaucucuguacgucucagccagucuaagcuaucuccuguacuccgacauucuucugaaguuuucuccuaccgagauaacagcuccaacuaugccguuggauugcgcaaacgccucgaauguucaagcggugaacagaucagcuaccaaaggaguaacacuccugcugcccgaaccugacuggaccuauccaaggcucagcugucccgguaguacuuuccagaaggccuuacugaucuccccucaccgguuuggcgagacaaaaggaaauucugcaccacuuauuauccgcgaacccuucauugccugcgggccuaaggaguguaaacauuuugcuuugacccacuacgcagcccagccaggcgguuauuacaacgggacgcgaggagaucguaauaagcugagacaucuaaucagcgugaagcucggcaaaauaccgacugucgaaaacuccaucuuccacauggcugccuggucaggcagugcgugccaugacgggaaggaguggaccuauauuggaguggauggucccgacaauaacgcacugcuuaaaaucaaguacggcgaggccuacacagauacuuaucacagcuacgcuaauaacauucugaggacccaggaaucugccuguaauugcaucgggggaaacuguuauuugaugauaacagacggcuccgcaucagguauuagcgagugccgguuucucaaaauccgcgaagggagaauuaucaaggagaucuucccuaccggaaggguuaagcacacggaggaauguacuugcggcuuugcuaguaauaaaacaauugagugugccugccgggauaacucuuacaccgcgaagcgcccauucgugaaacugaaugucgaaacugacacagccgagauacgauuaaugugcaccgaaacguaucuggauacccccagaccugacgauggcuccaucacagggccaugugagagcaacggagacaaggguucgggcgggauuaaaggaggcuuugugcaucaaaggauggcaucuaagaucggucggugguacucccguacuaugucaaaaaccaagcgcauggggaugggccucuauguaaaguacgacggagaucccugggcugacagugaugcccuugcucugagcggcguuaugguguccauggaggaaccggggugguacucuuucggauuugagauaaaagacaagaaaugcgaugucccuuguauugguaucgaaauggugcacgacggcgggaaggagacauggcauagcgccgcaacugccaucuauugcuugaugggaucaggccagcuacugugggauaccgugacaggugucgacauggcucucuga

SEQ ID NO: 157287 - RNA, 1401 nt, Artificial Sequence
  derived and/or modified CDS sequence (opt3) from neuraminidase__InfluenzaB__AGX17426
augcugcccagcaccauccagacacucacucuuuuccugacguccggcgggguguuguuaucucuguacgucucagccagucuaagcuaucuccuguacuccgacauucuucugaaguuuucuccuaccgagauaacagcuccaacuaugccguuggauugcgcaaacgccucgaauguucaagcggugaacagaucagcuaccaaaggaguaacauuccuccugcccgaaccugaguggaccuauccaaggcugagcugucccgguaguacuuuucagaaggcccucuuaaucuccccucaccgguucggcgaaacaaaaggaaauucugcaccacugauuauccgcgagcccuuuauugccugcgggccuaaggaauguaaacauuucgcucuuacccacuacgcagcccagccaggcgguuauuacaacgggacgcgaggagaccguaauaaguugagacaucugaucagcgugaagcuaggcaaaauaccgacugucgagaacuccaucuuucacauggcugccuggucaggcagugcgugccaugaugggaaggaguggaccuauauuggaguggacggucccgauaauaacgcacuccugaaaaucaaguacggcgaagccuacacagacacuuaucacagcuacgcuaauaacauucuuaggacccaggagucugccuguaauugcaucgggggaaacuguuaucugaugauaacagauggcuccgcaucagguauuagcgaaugccgguucuugaaaauccgcgaggggagaauuaucaaggagaucuuuccuaccggaaggguuaagcacacggaagaguguacuugcggcuucgcuaguaauaaaacaauugaaugugccugccgggacaacucuuacaccgcgaagcgcccauuugugaaacucaaugucgagacugauacagccgaaauacgacugaugugcaccgagacguauuuagacacccccagaccugaugacggcuccaucacagggccaugugagagcaacggagauaaggguucgggcgggauuaaaggaggcuucgugcaucaaaggauggcaucuaagaucggucggugguacucccguacuaugucaaaaaccaagcgcauggggaugggccuguauguaaaguacgacggagaccccugggcugauagugacgcccucgcucuuagcggcguuaugguguccauggaggaaccggggugguacucuuuuggauucgaaauaagagauaaaaagugcgacgucccuuguauugguaucgagauggugcacgauggcgggaaagaaacauggcauagcgccgcaacugccaucuauugccugaugggaucaggccaguugcuaugggacaccgugacaggugucgauauggcucuguga

SEQ ID NO: 157288 - RNA, 1401 nt, Artificial Sequence
  derived and/or modified CDS sequence (opt3) from neuraminidase__InfluenzaB__AGX17437
augcugcccagcaccauccagacacucacucuuuuccugacguccggcgggguguuguuaucucuguacgucucaguuagucuaagcuaucuccuguacuccgacauucuucugaaguuuucuccuaccgagauaacagcccaaacuaugccauuggauuucgcuaacgcaucgaaugugcaggccguaaacagaucagcgaccaaaggagugacacuccugcugccggaacccgaguggaccuauccuaggcucagcugcccagguaguacuuuucagaaggcuuuacugaucucuccccaccgguucggcgaaacaaaaggaaauuccgccccucuuauuauccgcgagccauuuauugcaugugggcccaaggaaugcaaacauuucgccuugacccacuacgcugcacagccuggcgguuauuacaacgggacgcgaggagaccguaauaagcugagacaucuaaucagcgucaagcucggcaaaauaccaacuguggagaacuccaucuuucacauggccgcuuggucaggcagugccugucaugaugggaaggaguggaccuauauuggaguugacgguccggauaauaacgcgcugcuuaaaaucaaguacggcgaagcauacacagacacuuaucacagcuacgccaauaacauucugaggacccaagagucugcuugcaauuguaucgggggaaacugcuauuugaugauaacagauggcuccgccucagguauuagcgaaugucgguuccucaaaauccgcgaggggagaauuaucaaggagaucuuucccaccggaagggugaagcacacggaagagugcacuuguggcuucgcaaguaauaaaacaauugaaugcgcuugucgggacaacucuuacaccgccaagcgcccuuuugucaaacugaauguggagacugauacagcggaaauacgauuaaugugcaccgagacguaucuggacaccccaagacccgaugacggcuccaucacagggccuugcgagagcaacggagauaaggguucgggcgggauuaaaggaggcuucguacaucagaggauggccucuaagaucggucggugguacucccguacuaugucaaaaaccaagcgcauggggaugggccucuauguuaaguacgacggagacccaugggcagauagugacgcucuugcccugagcggcgugauggucuccauggaggaacccgggugguacucuuuuggauucgaaauaagagauaaaaagugugacgugccgugcauugguaucgagauggugcacgauggcgggaaagaaacauggcauagcgcugccacugcaaucuauuguuugaugggaucaggccagcuacugugggacaccgucacagguguugauauggcccucuga

SEQ ID NO: 157289 - RNA, 1401 nt, Artificial Sequence
  derived and/or modified CDS sequence (opt3) from neuraminidase__InfluenzaB__AGX17448
augcugcccagcaccauccagacacucacucuuuuccugacguccggcgggguguuguuaucucuguacgucucagccagucuaagcuaucuccuguacuccgacauucuucugaaguuuucuccuaccgagauaacagcuccaacuaugccguuggauugcgcaaacgccucgaauguucaagcggugaacagaucagcuaccaaaggaguaacacuccugcugcccgaaccugaguggaccuauccaaggcucagcugucccgguaguacuuuccagaaggccuuacugaucuccccucaccgguuuggcgaaacaaaaggaaauucugcaccacuuauuauccgcgagcccuucauugccugcgggccuaaggaauguaaacauuuugcuuugacccacuacgcagcccagccaggcgguuauuacaacgggacgcgaggagaccguaauaagcugagacaucuaaucagcgugaagcucggcaaaauaccgacugucgagaacuccaucuuccacauggcugccuggucaggcagugcgugccaugaugggaaggaguggaccuauauuggaguggacggucccgauaauaacgcacugcuuaaaaucaaguacggcgaagccuacacagacacuuaucacagcuacgcuaauaacauucugaggacccaggagucugccuguaauugcaucgggggaaacuguuauuugaugauaacagauggcuccgcaucagguauuagcgaaugccgguuucucaaaauccgcgaggggagaauuaucaaggagaucuucccuaccggaaggguuaagcacacggaagaguguacuugcggcuuugcuaguaauaaaacaauugaaugugccugccgggacaacucuuacaccgcgaagcgcccauucgugaaacugaaugucgagacugauacagccgaaauacgauuaaugugcaccgagacguaucuggacacccccagaccugaugacggcuccaucacagggccaugugagacuaacggagauaaggguagcggcgggauuaaaggaggcuuugugcaucaaaggauggcaucgaagaucggucggugguacucucguaccauguccaaaacaaagcgcauggggaugggccucuauguaaaguacgacggagaccccugggcugauucagacgcccuuguucugaguggcgugauggucagcauggaggaaccggggugguacuccuucggauuugaaauaaaagauaagaaaugcgacgugccuuguauugguaucgagauggugcacgauggcgggaaggaaacuuggcauucugcugccaccgcaaucuauugcuugaugggaagcggccagcuacugugggacacagucaccgguguugauauggcccucuga

SEQ ID NO: 157290 - RNA, 1401 nt, Artificial Sequence
  derived and/or modified CDS sequence (opt3) from neuraminidase__InfluenzaB__AGX17459
augcugcccagcaccauccagacacucacucuuuuccugacguccggcgggguguuguuaucucuguacgucucagccagucuaagcuaucuccuguacuccgacauucuucugaaguuuucuccuaccgagauaacagcuucgacuaugccauuggauugcgcaaacgccucaaauguucaagcggugaacagaagcgcuaccaaaggaguaacacuccugcugccggaacccgacuggaccuauccuaggcucaguuguccagguuccacuuuccagaaggccuuacugaucucuccccaccgguuuggcgagacaaaagggaauagcgcaccucuuauuauccgcgaaccauucauugccugcggacccaaggaguguaaacauuuugcuuugacccacuacgcagcccagccuggcgguuauuacaacgggacgcgaggagaucguaauaagcugagacaucuaaucuccgugaagcucggcaaaauaccaacugucgaaaacucaaucuuccacauggcugccuggaguggcagcgcgugccaugacgggaaggaguggaccuauauuggaguggaugguccggacaauaacgcacugcuuaaaaucaaguacggcgaggccuacacagauacuuaucacucuuacgcuaauaacauucugaggacccaggaauccgccuguaauugcaucgggggaaacuguuauuugaugauaacagacggcucagcaagcgguauuagugagugccgguuucucaaaauccgcgaagggagaauuaucaaggagaucuuccccaccggaaggguuaagcacacggaggaauguacuugcggcuuugcuucuaauaaaacaauugagugugccugccgggauaacuccuacaccgcgaagcgcccuuucgugaaacugaaugucgaaacugacacagccgagauacgauuaaugugcaccgaaacguaucuggauaccccaagacccgacgauggcagcaucacagggccuugugagucgaacggagacaaggguucuggcgggauuaaaggaggcuuugugcaucaaaggauggcauccaagaucggucggugguacucacguacuaugaguaaaaccaagcgcauggggaugggccucuauguaaaguacgacggagauccaugggcugacagcgaugcccuugcucuguccggcguuauggugucuauggaggaacccgggugguacagcuucggauuugagauaaaagacaagaaaugcgaugucccguguauugguaucgaaauggugcacgacggcgggaaggagacauggcauucagccgcaacugccaucuauugcuugaugggaaguggccagcuacugugggauaccgugacaggugucgacauggcucucuga

SEQ ID NO: 157291 - RNA, 1401 nt, Artificial Sequence; identical to SEQ ID NO: 156662
  derived and/or modified CDS sequence (opt3) from neuraminidase__InfluenzaB__AGX17470

SEQ ID NO: 157292 - RNA, 1401 nt, Artificial Sequence
  derived and/or modified CDS sequence (opt3) from neuraminidase__InfluenzaB__AGX17481
augcugcccagcaccauccagacacucacucuuuuccugacguccggcgggguguuguuaucucuguacgucucagccagucuaagcuaucuccuguacuccgacauucuucugaaguuuucuccuaccgagauaacagcuccaacuaugccguuggauugcgcaaacgccucgaauguucaagcggugaacagaucagcuaccaaaggaguaacacucauccugcccgaaccugaguggaccuauccaaggcugagcugucccgguaguacuuuccagaaggcccucuuaauuuccccucaccgguuuggcgaaacaaaaggaaauucugcaccacugaucauucgcgagcccuucaucgccugcgggccuaaggaauguaaacauuuugcucuuacccacuacgcagcccagccaggcgguuauuacaacgggacgcgaggagaccguaauaaguugagacaucugauaagcgugaagcuaggcaaaaucccgacugucgagaacuccauuuuccacauggcugccuggucaggcagugcgugccaugaugggaaggaguggaccuauaucggaguggacggucccgauaauaacgcacuccugaaaauuaaguacggcgaagccuacacagacacuuaucacagcuacgcuaauaacauccuuaggacccaggagucugccuguaauugcauagggggaaacuguuaucugaugauuacagauggcuccgcaucagguaucagcgaaugccgguuuuugaaaauucgcgaggggagaaucaucaaggagauuuucccuaccggaaggguuaagcacacggaagaguguacuugcggcuuugcuaguaauaaaacaauagaaugugccugccgggacaacucuuacaccgcgaagcgcccauucgugaaacucaaugucgagacugauacagccgaaauccgacugaugugcaccgagacguauuuagacacccccagaccugaugacggcuccauuacagggccaugugagagcaacggagauaaggguucgggcgggaucaaaggaggcuuugugcaucaaaggauggcaucuaagauaggucggugguacucccguacuaugucaaaaaccaagcgcauggggaugggccuguauguaaaguacgacggagaccccugggcugauagugacgcccucgcucuuagcggcguuaugguguccgucgaggaaccggggugguacucuuucggauuugaaauuaaagauaagaaaugcgacgugccuuguaucgguaucgagauggugcacgauggcgggaaggaaacauggcauagcgccgcaacugccauuuauugccugaugggaucaggccaguugcuaugggacaccgucacagguguugauauggcucuguga

SEQ ID NO: 157293 - RNA, 1401 nt, Artificial Sequence
  derived and/or modified CDS sequence (opt3) from neuraminidase__InfluenzaB__AGX17492
augcugcccagcaccauccagacacucacucuuuuccugacguccggcgggguguuguuaucucuguacgucucagccagucuaagcuaucuccuguacuccgacauucuucugaaguuuucuccuaccgagauaacagcuccaacuaugccguuggauugcgcaaacgccucgaauguucaagcggugaacagaucagcuaccaaaggaguaacacuccugcugcccgaaccugaguggaccuauccaaggcucagcugucccgguaguacuuuccagaaggccuuacugaucuccccucaccgguuuggcgaaacaaaaggaaauucugcaccacuuauuauccgcgagcccuucauugccugcgggccuaaggaauguaaacauuuugcuuugacccacuacgcagcccagccaggcgguuauuacaacgggacgcgaggagaccguaauaagcugagacaucuaaucagcgugaagcucggcaaaauaccgacugucgagaacuccaucuuccacauggcugccuggucaggcagugcgugccaugaugggaaggaguggaccuauauuggaguggacggucccgauaauaacgcacugcuuaaaaucaaguacggcgaagccuacacagacacuuaucacagcuacgcuaauaacauucugaggacccaggagucugccuguaauugcaucgggggaaacuguuauuugaugauaacagauggcuccgcaucagguauuagcgaaugccgguuucucaaaauccgcgaggggagaauuaucaaggagaucuucccuaccggaaggguuaagcacacggaagaguguacuugcggcuuugcuaguaauaaaacaauugaaugugccugccgggacaacucuuacaccgcgaagcgcccauucgugaaacugaaugucgagacugauacagccgaaauacgauuaaugugcaccgagacguaucuggacacccccagaccugaugacggcuccaucacagggccaugugagagcaacggagauaaggguucgggcgggauuaaaggaggcuuugugcaucaaaggauggcaucuaagaucggucggugguacucccguacuaugucaaaaaccaagcgcauggggaugggccucuauguaaaguacgacggagaccccugggcugauagugacgcccuugcucugagcggcguuaugguguccauggaggaaccggggugguacucuuucggauuugaaauaaaagauaagaaaugcgacgucccuuguauugguaucgagauggugcacgauggcgggaaggaaacauggcauagcgccgcaacugccaucuauugcuugaugggaucaggccagcuacugugggacaccgugacaggugucgauauugcucucuga

SEQ ID NO: 157294 - RNA, 1401 nt, Artificial Sequence
  derived and/or modified CDS sequence (opt3) from neuraminidase__InfluenzaB__AGX17503
augcugcccagcaccauccagacacucacucuuuuccugacguccggcgggguguuguuaucucuguacgucucagccagucuaagcuaucuccuguacuccgacauucuucugaaguuuucuccuaccgagauaacagcuccaacuaugccguuggauugcgcaaacgccucgaauguucaagcggugaacagaucagcuaccaaaggaguaacacuccugcugcccgaaccugaguggaccuauccaaggcucagcugucccgguuuaacuuuccagaaggcccugcuuaucaguccucaccgguuuggcgaaacaaaaggaaauuccgcaccauugauuauccgcgagcccuucauugccugcgggccuaaggaauguaaacauuuugcucugacccacuacgcagcccagccaggcgguuauuacaacgggacgcgaggagaccguaauaagcuaagacaucucaucucugugaagcugggcaaaauaccgacugucgagaacagcaucuuccacauggcugccugguccggcucagcgugccaugaugggaaggaguggaccuauauuggaguggacggucccgauaauaacgcacuucugaaaaucaaguacggcgaagccuacacagacacuuaucacaguuacgcuaauaacauuuugaggacccaggagagcgccuguaauugcaucgggggaaacuguuaucucaugauaacagauggcucugcauccgguauuucagaaugccgguuucugaaaauccgcgaggggagaauuaucaaggagaucuucccuaccggaaggguuaagcacacggaagaguguacuugcggcuuugcuagcaauaaaacaauugaaugugccugccgggacaacaguuacaccgcgaagcgcccauucgugaaauuaaaugucgagacugauacagccgaaauacgacugaugugcaccgagacguaucucgacacccccagaccugaugacggcucuaucacagggccaugugaguccaacggagauaaggguagcggcgggauuaaaggaggcuuugugcaucaaaggauggcaucgaagaucggucggugguacucucguacuauguccaaaaccaagcgcauggggaugggccuuuauguaaaguacgacggagaccccugggcugauucagacgcccuggcuuugaguggcguuauggugagcauggaggaaccggggugguacuccuucggauuugaaauaaaagauaagaaaugcgacgucccuuguauugguaucgagauggugcacgauggcgggaaggaaacauggcauucugccgcaacugccaucuauugccuaaugggaagcggccagcugcucugggacaccgugacaggugucgauauggcucuguga

SEQ ID NO: 157295 - RNA, 1401 nt, Artificial Sequence; identical to SEQ ID NO: 156662
  derived and/or modified CDS sequence (opt3) from neuraminidase__InfluenzaB__AGX17514

SEQ ID NO: 157296 - RNA, 1401 nt, Artificial Sequence
  derived and/or modified CDS sequence (opt3) from neuraminidase__InfluenzaB__AGX17525
augcugcccagcaccauccagacacucacucuuuuccugacguccggcgggguguuguuaucucuguacgucucagccagucuaagcuaucuccuguacuccgacauucuucugaaguuuucuccuaccgagauaacagcuccaacuaugccguuggauugcgcaaacgccucgaauguucaagcggugaacagaucagcuaccaaaggaguaacacuccugcugcccgaaccugaguggaccuauccaaggcucagcugucccgguaguacuuuccagaaggccuuacugaucuccccucaccgguuuggcgaaacaaaaggaaauucugcaccacuuauuauccgcgagcccuucauugccugcgggccuaaggaauguaaacauuuugcuuugacccacuacgcagcccagccaggcgguuauuacaacgggaagcgaggagaccguaauaagcugagacaucuaaucagcgugaaacucggcaagauaccgacggucgagaacuccaucuuccacauggcugccuggucaggcagugcgugccaugaugggaaagaguggacuuauauuggaguggacggucccgauaauaacgcacugcuuaagaucaaauacggcgaagccuacaccgacacauaucacagcuacgcuaauaacauucugaggacucaggagucugccuguaauugcaucgggggaaacuguuauuugaugauaaccgauggcuccgcaucagguauuagcgaaugccgguuucucaagauccgcgaggggagaauuaucaaggagaucuucccuacaggaaggguuaaacacaccgaagaguguacgugcggcuuugcuaguaauaagacuauugaaugugccugccgggacaacucuuacacagcgaaacgcccauucgugaagcugaaugucgagaccgauacugccgaaauacgauuaaugugcacagagaccuaucuggacacgcccagaccugaugacggcuccaucaccgggccaugugagagcaacggagauaaagguucgggcgggauuaagggaggcuuugugcaucaaaggauggcaucuaaaaucggucggugguacucccguacaaugucaaagacuaagcgcauggggaugggccucuauguaaaauacgacggagaccccugggcugauagugacgcccuugcucugagcggcguuaugguguccauggaggaaccggggugguacucuuucggauuugaaauaagagauaagaaaugcgacgucccuuguauugguaucgagauggugcacgauggcgggaaggaaaccuggcauagcgccgcaacagccaucuauugcuugaugggaucaggccagcuacugugggacacugugaccggugucgauauggcucucuga

SEQ ID NO: 157297 - RNA, 1401 nt, Artificial Sequence; identical to SEQ ID NO: 157241
  derived and/or modified CDS sequence (opt3) from neuraminidase__InfluenzaB__AGX17536

SEQ ID NO: 157298 - RNA, 1401 nt, Artificial Sequence; identical to SEQ ID NO: 157272
  derived and/or modified CDS sequence (opt3) from neuraminidase__InfluenzaB__AGX17547

SEQ ID NO: 157299 - RNA, 1401 nt, Artificial Sequence
  derived and/or modified CDS sequence (opt3) from neuraminidase__InfluenzaB__AGX17558
augcugcccagcaccauccagacacucacucuuuuccugacguccggcgggguguuguuaucucuguacgucucagccagucuaagcuaucuccuguacuccgacguucuucugaaguuuucuccugcugagauuaccgcaccaacaaugccguuggauugcgccaacgcgucgaaugugcaagcuguaaacagaucagccacuaaaggagugacccuccugcugcccgaaccugaguggacauauccaaggcucagcugucccgguaguaccuuccagaaggcauuacugauauccccucaccgguuuggcgaaacuaaaggaaauucugccccacuuaucauucgcgagcccuucaucgcuugcgggccuaaggaauguaaacauuuugcauugacacacuacgccgcucagccaggcgguuauuacaacgggacccgaggagaccguaauaagcugagacaucuaauuagcgucaagcucggcaaaaucccgacgguggagaacuccauauuccacauggccgcguggucaggcagugcaugccaugaugggaaggaguggacuuauaucggaguugacggucccgauaauaacgcccugcuuaaaauuaaguacggcgaggcuuacaccgacacauaucacagcuacgccaauaacauccugaggacucaggagucugcauguaauugcauugggggaaacuguuauuugaugaucaccgauggcuccgcuucaggugugagcgaaugccgguuucucaaaauacgcgaggggagaauuaucaaggagauuuucccuacaggaagggucaagcacaccgaagaguguacgugcggcuuugccaguaauaaaacuaucgaaugugcgugccgggacaacucuuacacagccaagcgcccauucgugaaacugaauguagagaccgauacugcagaaauccgauuaaugugcacagagaccuaucuggacacgcccagaccugaugacggcuccauuaccgggccaugugagagcaacggagauaaggguucgggcgggauaaaaggaggcuuuguucaucaaaggauggcuucuaagaucggucggugguacucccguacaaugucaaaaacuaagcgcauggggaugggccucuaugugaaguacgacggagaccccugggccgauagugacgcucuugcccugagcggcgucaugguguccauggaagaaccggggugguacucuuucggauuugaaauuaaagauaagaaaugcgacgugccuuguaucgguauagagaugguccacgauggcgggaaggaaaccuggcauagcgcagccacagcuauuuauugcuugaugggaucaggccagcuacugugggacacuguuaccgguguggauauggcgcucuga

SEQ ID NO: 157300 - RNA, 1401 nt, Artificial Sequence; identical to SEQ ID NO: 156791
  derived and/or modified CDS sequence (opt3) from neuraminidase__InfluenzaB__AGX17569

SEQ ID NO: 157301 - RNA, 1401 nt, Artificial Sequence; identical to SEQ ID NO: 156718
  derived and/or modified CDS sequence (opt3) from neuraminidase__InfluenzaB__AGX17580

SEQ ID NO: 157302 - RNA, 1401 nt, Artificial Sequence
  derived and/or modified CDS sequence (opt3) from neuraminidase__InfluenzaB__AGX17591
augcugcccagcaccauccagacacucacucuuuuccugacguccggcgggguguuguuaucucuguacgucucagccagucuaagcuaucuccuguacuccgacauucuucugaaguuuccuccaaccgagauaacagcuccgacuaugcccuuggauugcgcaaacgccucuaauguucaagcggugaacagaucggcuaccaaaggaguaacacuccugcugccugaaccagaguggaccuaucccaggcucucauguccugguagcacuuuccagaaggccuuacugaucaguccacaccgguuuggcgaaacaaaaggaaauuccgcaccccuuauuauccgcgagccuuucauugccugcgggccaaaggaauguaaacauuuugcuuugacccacuacgcagcccagccgggcgguuauuacaacgggacgcgaggagaccguaauaagcugagacaucuaaucucugugaagcucggcaaaauacccacugucgagaacagcaucuuccacauggcugccugguccggcucagcgugccaugaugggaaggaguggaccuauauuggaguggacgguccugauaauaacgcacugcuuaaaaucaaguacggcgaagccuacacagacacuuaucacaguuacgcuaauaacauucugaggacccaggagagcgccuguaauugcaucgggggaaacuguuauuugaugauaacagauggcucugcauccgguguuucagaaugccgguuucucaaaauucgcgaggggagaaucauuaaggagaucuucccaaccggaagggugaagcacacggaagaguguacuugcggcuuugcuagcaauaaaacaaucgaaugugccugccgggacaacaguuacaccgcgaagcgccccuucgucaaacugaauguggagacugauacagccgaaauucgauuaaugugcaccgagacguaucuggacaccccuagaccagaugacggcucuauaacagggcccugugaguccaacggagauaaggguagcggcgggaucaaaggaggcuuuguacaucaaaggauggcaucgaagauuggucggugguacucucguacuauguccaaaaccaagcgcauggggaugggccucuauguuaaguacgacggagacccgugggcugauucagacgcccuugcuuucaguggcgugauggucagcauggaggaaccugggugguacuccuuuggauucgaaaucaaagauaagaaaugcgacgugcccuguauagguauugagauggugcacgauggcgggaaggaaacauggcauucugccgcaacugccaucuauugccugaugggaagcggccaguugcuaugggacaccgucacagguguuaacauggcucuguga

SEQ ID NO: 157303 - RNA, 1401 nt, Artificial Sequence; identical to SEQ ID NO: 156716
  derived and/or modified CDS sequence (opt3) from neuraminidase__InfluenzaB__AGX17602

SEQ ID NO: 157304 - RNA, 1401 nt, Artificial Sequence; identical to SEQ ID NO: 157302
  derived and/or modified CDS sequence (opt3) from neuraminidase__InfluenzaB__AGX17613

SEQ ID NO: 157305 - RNA, 1401 nt, Artificial Sequence; identical to SEQ ID NO: 156889
  derived and/or modified CDS sequence (opt3) from neuraminidase__InfluenzaB__AGX17624

SEQ ID NO: 157306 - RNA, 1401 nt, Artificial Sequence
  derived and/or modified CDS sequence (opt3) from neuraminidase__InfluenzaB__AGX17635
augcugcccagcaccauccagacacucacucuuuuccugacguccggcgggguguuguuaucucuguacgucucagccagucuaagcuaucuccuguacuccgacauucuucugaaguuuccuccaaccgagauaacagcuccgacuaugcccuuggauugcgcaaacgccucuaauguucaagcggugaacagaucggcuaccaaaggaguaacacuccugcugccugaaccagaguggaccuaucccaggcucucauguccugguagcacuuuccagaaggccuuacugaucaguccacaccgguuuggcgaaacaaaaggaaauuccgcaccccuuauuauccgcgagccuuucauugccugcgggccaaaggaauguaaacauuuugcuuugacccacuacgcagcccagccgggcgguuauuacaacgggacgcgaggagaccguaauaagcugagacaucuaaucucugugaagcucggcaaaauacccacugucgagaacagcaucuuccacauggcugccugguccggcucagcgugccaugaugggaaggaguggaccuauauuggaguggacgguccugauaauaacgcacugcuuaaaaucaaguacggcgaagccuacacagacacuuaucacaguuacgcuaauaacauucugaggacccaggagagcgccuguaauugcaucgggggaaacuguuauuugaugauaacagauggcucugcauccgguauuucagaaugccgguuucucaaaauccgcgaggggagaauuaucaaggagaucuucccaaccggaaggguuaagcacacggaagaguguacuugcggcuuugcuagcaauaaaacaauugaaugugccugccgggacaacaguuacaccgcgaagcgccccuucgugaaacugaaugucgagacugauacagccgaaauacgauuaaugugcaccgagacguaucuggacaccccuagaccagaugacggcucuaucacagggcccugugaguccaacggagauaaggguagcggcgggauuaaaggaggcuuugugcaucaaaggauggcaucgaagaucggucggugguacucucguacuauguccaaaaccaagcgcauggggaugggccucuauguaaaguacgacggagacccgugggcugauucagacgcccuugcuuucaguggcguuauggugagcauggaggaaccugggugguacuccuuuggauucgaaauaaaagauaagaaaugcgacguccccuguauugguaucgagauggugcacgauggcgggaaggaaacauggcauucugccgcaacugccaucuauugccugaugggaagcggccaguugcuaugggacaccgugacaggugucaacauggcucuguga

SEQ ID NO: 157307 - RNA, 1401 nt, Artificial Sequence; identical to SEQ ID NO: 156889
  derived and/or modified CDS sequence (opt3) from neuraminidase__InfluenzaB__AGX17657

SEQ ID NO: 157308 - RNA, 1401 nt, Artificial Sequence; identical to SEQ ID NO: 157302
  derived and/or modified CDS sequence (opt3) from neuraminidase__InfluenzaB__AGX17668

SEQ ID NO: 157309 - RNA, 1401 nt, Artificial Sequence
  derived and/or modified CDS sequence (opt3) from neuraminidase__InfluenzaB__AGX17679
augcugcccagcaccauccagacacucacucuuuuccugacguccggcgggguguuguuaucucuguacgucucagccagucuaagcuaucuccuguacuccgacauucuucugaaguuuucuccuaccgagauaacagcuccaacuaugccguuggauugcgcaaacgccucgaauguucaagcggugaacagaucagcuaccaaaggaguaacacuccugcugcccgaaccugaguggaccuauccaaggcucagcugucccgguaguacuuuccagaaggccuuacugaucuccccucaccgguuuggcgaaacaaaaggaaauucugcaccacuuauuauccgcgagcccuucauugccugcgggccuaacgaauguaagcauuuugcuuugacccacuacgcagcccagccaggcgguuauuacaaugggacgcgaggagaccguaacaaacugagacaucuaaucagcgugaagcucggcaagauaccgacugucgaaaauuccaucuuccacauggcugccuggucaggcagugcgugccaugaugggaaagaguggaccuauauuggaguggacggucccgauaacaaugcacugcuuaagaucaaauacggcgaggccuacacagacacuuaucacagcuacgcuaacaauauucugaggacccaggagucugccuguaacugcaucgggggaaauuguuauuugaugauaacagauggcuccgcaucagguguuagcgaaugccgguuucucaagauucgcgaggggagaaucauuaaagagaucuucccuaccggaagggugaagcacacggaagaguguacuugcggcuuugcuaguaacaagacaaucgaaugugccugccgggacaauucuuacaccgcgaaacgcccauucgucaagcugaacguggagauugauacugccgaaauacgauuaaugugcacagacaccuaucuggauacgcccagaccugacgauggcuccaucaccgggccaugugagagcaacggagacaaagguucgggcgggauuaagggaggcuuuguacaucaaaggauggcaucuaaaaucggucggugguacucccguacaaugucaaagacugagcgcauggggaugggccucuauguuaaauacgacggagaucccugggcugacagugaugcccuugcuuucagcggcgugauggucuccaugaaggaaccggggugguacucuuuuggauucgagauaaaggacaaaaagugcgaugugccuuguauugguaucgaaauggugcacgacggcgggaaagagaccuggcauagcgccgcaacagccaucuauugccugaugggaucaggccaguugcuaugggauacugucaccgguguugacauggcucuguga

SEQ ID NO: 157310 - RNA, 1401 nt, Artificial Sequence; identical to SEQ ID NO: 156889
  derived and/or modified CDS sequence (opt3) from neuraminidase__InfluenzaB__AGX17690

SEQ ID NO: 157311 - RNA, 1401 nt, Artificial Sequence
  derived and/or modified CDS sequence (opt3) from neuraminidase__InfluenzaB__AGX17701
augcugcccagcaccauccagacacucacucuuuuccugacguccggcgggguguuguuaucucuguacgucucagccagucuaagcuaucuccuguacuccgacauucuucugaaguuuccuccaaccgagauaacagcuccgacuaugcccuuggauugcgcaaacgccucuaauguucaagcggugaacagaucggcuaccaaaggaguaacacuccugcugccugaaccagaguggaccuaucccaggcucucauguccugguagcacuuuccagaaggccuuacugaucaguccacaccgguuuggcgaaacaaaaggaaauuccgcaccccuuauuauccgcgagccuuucauugccugcgggccaaaggaauguaaacauuuugcuuugacccacuacgcagcccagccgggcgguuauuacaacgggaagcgaggagaccguaauaagcugagacaucuaaucucugugaaacucggcaagauacccacggucgagaacagcaucuuccacauggcugccugguccggcucagcgugccaugaugggaaagaguggacuuauauuggaguggacgguccugauaauaacgcacugcuuaagaucaaauacggcgaagccuacaccgacacauaucacaguuacgcuaauaacauucugaggacucaggagagcgccuguaauugcaucgggggaaacuguuauuugaugauaaccgauggcucugcauccgguguuucagaaugccgguuucucaagauucgcgaggggagaaucauuaaggagaucuucccaacaggaagggugaaacacaccgaagaguguacgugcggcuuugcuagcaauaagacuaucgaaugugccugccgggacaacaguuacacagcgaaacgccccuucgucaagcugaauguggagaccgauacugccgaaauucgauuaaugugcacagagaccuaucuggacacgccuagaccagaugacggcucuauaaccgggcccugugaguccaacggagauaaagguagcggcgggaucaagggaggcuuuguacaucaaaggauggcaucgaaaauuggucggugguacucucguacaauguccaagacuaagcgcauggggaugggccucuauguuaaauacgacggagacccgugggcugauucagacgcccuugcuuucaguggcgugauggucagcauggaggaaccugggugguacuccuuuggauucgaaaucaaggauaaaaagugcgacgugcccuguauagguauugagauggugcacgauggcgggaaagaaaccuggcauucugccgcaacagccaucuauugccugaugggaagcggccaguugcuaugggacacugucaccgguguuaacauggcucuguga

SEQ ID NO: 157312 - RNA, 1401 nt, Artificial Sequence; identical to SEQ ID NO: 156889
  derived and/or modified CDS sequence (opt3) from neuraminidase__InfluenzaB__AGX17723

SEQ ID NO: 157313 - RNA, 1401 nt, Artificial Sequence; identical to SEQ ID NO: 157309
  derived and/or modified CDS sequence (opt3) from neuraminidase__InfluenzaB__AGX17734

SEQ ID NO: 157314 - RNA, 1401 nt, Artificial Sequence
  derived and/or modified CDS sequence (opt3) from neuraminidase__InfluenzaB__AGX17745
augcugcccagcaccauccagacacucacucuuuuccugacguccggcgggguguuguuaucucuguacgucucagccagucuaagcuaucuccuguacuccgacauucuucugaaguuuccuccaaccgagauaacagcuccgacuaugcccuuggauugcgcaaacgccucuaauguucaagcggugaacagaucggcuaccaaaggaguaacacuccugcugccugaaccagaguggaccuaucccaggcucucauguagcgguaguacuuuccagaaggccuuacugaucuccccucaccgguuuggcgaaauuaaaggaaauucugcaccacuuaucauucgcgagcccuucaucgccugcgggccuaaggaauguaaacauuuugcuuugacacacuacgcagcccagccaggcgguuauuacaacgggacccgaggagaccguaauaagcugagacaucuaauaagcgugaagcucggcaaaaucccgacggucgagaacuccauuuuccacauggcugccuggucaggcagugcgugccaugaugggaaggaguggacuuauaucggaguggacggucccgauaauaacgcacugcuuaaaauuaaguacggcgaagccuacaccgacacauaucacagcuacgcuaauaacauccugaggacucaggagucugccuguaauugcauagggggaaacuguuauuugaugauuaccgauggcuccgcaucagguguuagcgaaugccgguuucucaaaauccgcgaggggagaauuaucaaggagaucuucccuacaggaagggugaagcacaccgaagaguguacgugcggcuuugcuaguaauaaaacuauugaaugugccugccgggacaacucuuacacagcgaagcgcccauucgucaaacugaauguggagaccgauacugccgaaauacgauuaaugugcacagagaccuaucuggacacgcccagaccugaugacggcuccaucaccgggccaugugagagcaacggagauaaggguucgggcgggauuaaaggaggcuuuguacaucaaaggauggcaucuaagaucggucggugguacucccguacaaugucaaaaacuaagcgcauggggaugggccucuauguuaaguacgacggagaccccugggcugauagugacgcccuugcuuucagcggcgugauggucuccauggaggaaccggggugguacucuuuuggauucgaaauaaaagauaagaaaugcgacgugccuuguauugguaucgagauggugcacgauggcgggaaggaaaccuggcauagcgccgcaacagccaucuauugccugaugggaucaggccaguugcuaugggacacugucaccgguguuaacauggcucuguga

SEQ ID NO: 157315 - RNA, 1401 nt, Artificial Sequence
  derived and/or modified CDS sequence (opt3) from neuraminidase__InfluenzaB__AGX17756
augcugcccagcaccauccagacacucacucuuuuccugacguccggcgggguguuguuaucucuguacgucucagccagucuaagcuaucuccuguacuccgacauucuucugaaguuuucuccuaccgagauaacagcuccaacuaugccguuggauugcgcaaacgccucgaauguucacgcggugaacagaucagcuaccaaaggaguaacacuccugcugcccgaaccugaguggaccuauccaaggcucagcugucccgguaguacuuuccaaaaggccuuacugaucuccccucaucgguuuggcgaaacaaaaggaaauucugcaccacuuauuauccgcgagcccuucauugccugcgggccuaacgaauguaagcacuuugcuuugacccauuacgcagcccgaccaggcgguuauuacaaugggacgcguggagacagaaacaaacugaggcaccuaaucagcgugaagcucggcaagauaccgacugucgaaaauuccaucuuccauauggcugccuggucaggcagugcgugccacgaugggaaagaguggaccuauauuggaguggacggucccgauaacaaugcacugcuuaagaucaaauacggcgaggccuacacagacacuuaucacagcuacgcuaacaauauucugcggacccaggagucugccuguaacugcaucgggggaaauuguuauuugaugauaacagauggcuccgcaucagguguuagcgaaugccgcuuucucaagauuagagaggggaggaucauuaaagagaucuucccuaccggacgggugaagcauacggaagaguguacuugcggcuuugcuaguaacaagacaaucgaaugugccugccgcgacaauucuuacaccgcgaaacgaccauucgucaagcugaacguggagacugauacagccgaaauuagauuaaugugcaccgacacguaucuggauacccccaggccugacgauggcuccauaacagggccaugugagagcaacggagacaaagguucgggcgggaucaagggaggcuuuguacaccagcggauggcaucuaaaauuggucguugguacucccgcacuaugucaaagaccgagagaauggggaugggccucuauguuaaauacgacggagaucccugggcugacagugaugcccuugcuuucagcggcgugauggucuccaugaaggaaccggggugguacucuuuuggauucgagaucaaggacaaaaagugcgaugugccuuguauagguauugaaauggugcaugacggcgggaaagagacauggcacagcgccgcaacugccaucuauugccugaugggaucaggccaguugcuaugggauaccgucacagguguugacauggcucuguga

SEQ ID NO: 157316 - RNA, 1401 nt, Artificial Sequence; identical to SEQ ID NO: 156936
  derived and/or modified CDS sequence (opt3) from neuraminidase__InfluenzaB__AGX17767

SEQ ID NO: 157317 - RNA, 1401 nt, Artificial Sequence
  derived and/or modified CDS sequence (opt3) from neuraminidase__InfluenzaB__AGX17778
augcugcccagcaccauccagacacucacucuuuuccugacguccggcgggguguuguuaucucuguacgucucagccagucuaagcuaucuccuguacuccgacauucuucugaaguuuucuccuaccgagauaacagcuccaacuaugccguuggauugcgcaaacgccucgaauguucacgcggugaacagaucagcuaccaaaggaguaacacuccugcugcccgaaccugaguggaccuauccaaggcucagcugucccgguaguacuuuccaaaaggccuuacugaucuccccucaucgguuuggcgaaacaaaaggaaauucugcaccacuuauuauccgcgagcccuucauugccugcgggccuaacgaauguaagcacuuugcuuugacccauuacgcagcccagccaggcgguuauuacaaugggacgcgaggagaccguaacaaacugagacaccuaaucagcgugaagcucggcaagauaccgacugucgaaaauuccaucuuccauauggcugccuggucaggcagugcgugccacgaugggaaagaguggaccuauauuggaguggacggucccgauaacaaugcacugcuuaagaucaaauacggcgaggccuacacagacacuuaucacagcuacgcuaacaauauucugaggacccaggagucugccuguaacugcaucgggggaaauuguuauuugaugauaacagauggcuccgcaucagguguuagcgaaugccgguuucucaagauucgcgaggggagaaucauuaaagagaucuucccuaccggaagggugaagcauacggaagaguguacuugcggcuuugcuaguaacaagacaaucgaaugugccugccgggacaauucuuacaccgcgaaacgcccauucgucaagcugaacguggagacugauacagccgaaauucgauuaaugugcaccgacacguaucuggauacccccagaccugacgauggcuccauaacagggccaugugagagcaacggagacaaagguucgggcgggaucaagggaggcuuuguacaccagaggauggcaucuaaaauuggucggugguacucccguacuaugucaaagaccgagcgcauggggaugggccucuauguuaaauacgacggagaucccugggcugaaagugacgcccuugcuuucagcggcgugauggucuccaugaaggagccggggugguacucuuuuggauucgaaaucaaggauaaaaagugcgacgugccuuguauagguauugagauggugcaugauggcgggaaagaaacauggcacagcgccgcaacugccaucuauugccugaugggaucaggccaauugcuaugggacaccgucacagguguugauauggcucuguga

SEQ ID NO: 157318 - RNA, 1401 nt, Artificial Sequence
  derived and/or modified CDS sequence (opt3) from neuraminidase__InfluenzaB__AGX17789
augcugcccagcaccauccagacacucacucuuuuccugacguccggcgggguguuguuaucucuguacgucucagccagucuaagcuaucuccuguacuccgacauucuucugaaguuuucuccuaccgagauaacagcuccaacuaugccguuggauugcgcaaacgccucgaauguucaagcggugaacagaucagcuaccaaaggaguaacacuccugcugcccgaaccugaguggaccuauccaaggcucagcugucccgguaguacuuuccagaaggccuuacugaucuccccucaccgguuuggcgaaacaaaaggaaauucugcaccacuuauuauccgcgagcccuucauugccugcgggccuaacgaauguaagcauuuugcuuugacccacuacgcagcccagccaggcgguuauuacaaugggacgcgaggagaccguaacaaacugagacaucuaaucagcgugaagcucggcaagauaccgacugucgaaaauuccaucuuccacauggcugccuggucaggcagugcgugccaugaugggaaagaguggaccuauauuggaguggacggucccgauaacaaugcacugcuuaagaucaaauacggcgaggccuacacagacacuuaucacagcuacgcuaacaauauucugaggacccaggagucugccuguaacugcaucgggggaaauuguuauuugaugauaacagauggcuccgcaucagguguuagcgaaugccgguuucucaagauucgcgaggggagaaucauuaaagagaucuucccuaccggaagggugaagcacacggaagaguguacuugcggcuuugcuaguaacaagacaaucgaaugugccugccgggacaauucuuacaccgcgaaacgcccauucgucaagcugaacguggagauugauacugccgaaauacgauuaaugugcacagacaccuaucuggauacgcccagaccugacgauggcuccaucaccgggccaugugagagcaacggagacaaagguucgggcgggauuaagggaggcuuuguacaucaaaggauggcaucuaaaaucggucggugguacucccguacaaugucaaagacugagcgcauggggaugggccucuauguuaaauacgacggagaucccugggcugacagugaugcccuuguguucagcggcgucaugguguccaugaaggaaccggggugguacucuuuuggauucgagauaaaggacaaaaagugcgaugugccuuguauugguaucgaaaugguccacgacggcgggaaagagaccuggcauagcgcugccacagcaaucuauugccugaugggaucaggccaguugcuaugggauacuguuaccgguguggacauggcccuguga

SEQ ID NO: 157319 - RNA, 1401 nt, Artificial Sequence; identical to SEQ ID NO: 156889
  derived and/or modified CDS sequence (opt3) from neuraminidase__InfluenzaB__AGX17800

SEQ ID NO: 157320 - RNA, 1401 nt, Artificial Sequence
  derived and/or modified CDS sequence (opt3) from neuraminidase__InfluenzaB__AGX17811
augcugcccagcaccauccagacacucacucuuuuccugacguccggcgggguguuguuaucucuguacgucucagccagucuaagcuaucuccuguacuccgacauucuucugaaguuuccuccaaccgagauaacagcuccgacuaugcccuuggauugcgcaaacgccucuaauguucaagcggugaacagaucggcuaccaaaggaguaacacuccugcugccugaaccagaguggaccuaucccaggcucucauguccugguagcacuuuccagaaggccuuacugaucaguccacaccgguuuggcgaaacaaaaggaaauuccgcaccccuuauuauccgcgagccuuucauugccugcgggccaaaggaauguaaacauuuugcuuugacccacuacgcagcccagccgggcgguuauuacaacgggacgcgaggagaccguaauaagcugagacaucuaaucucugugaagcucggcaaaauacccacugucgagaacagcaucuuccacauggcugccugguccggcucagcgugccaugaugggaaggaguggaccuauauuggaguggacgguccugauaauaacgcacugcuuaaaaucaaguacggcgaagccuacacagacacuuaucacaguuacgcuaauaacauucugaggacccaggagagcgccuguaauugcaucgggggaaacuguuauuugaugauaacagauggcucugcauccgguguuucagaaugccgguuucucaaaauucgcgaggggagaaucauuaaggagaucuucccaaccggaagggugaagcacacggaagaguguacuugcggcuuugcuagcaauaaaacaaucgaaugugccugccgggacaacaguuacaccgcgaagcgccccuucgucaaacugaauguggagacugauacagccgaaauucgauuaaugugcaccgagacguaucuggacaccccuagaccagaugacggcucuauaacagggcccugugaguccaacggagauaaggguagcggcgggaucaaaggaggcuuuguacaucaaaggauggcaucgaagauuggucggugguacucucguacuauguccaaaaccaagcgcauggggaugggccucuauguuaaguacgacggagacccgugggcugauucagacgcccuugcuuucaguggcgugauggucagcauggaggaaccugggugguacuccuuuggauucgaaaucaaagauaagaaaugcgacgugcccuguauagguauugagauggugcacgauggcgggaaggaaacauggcauucugccgcaacugccaucuauugccugaugggaagcggccaguugcuaugggacaccgucacagguguuaacauggcucaguga

SEQ ID NO: 157321 - RNA, 1401 nt, Artificial Sequence; identical to SEQ ID NO: 157302
  derived and/or modified CDS sequence (opt3) from neuraminidase__InfluenzaB__AGX17822

SEQ ID NO: 157322 - RNA, 1401 nt, Artificial Sequence
  derived and/or modified CDS sequence (opt3) from neuraminidase__InfluenzaB__AGX17833
augcugcccagcaccauccagacacucacucuuuuccugacguccggcgggguguuguuaucucuguacgucucagccagucuaagcuaucuccuguacuccgacauucuucugaaguuuccuccaaccgagauaacagcuccgacuaugcccuuggauugcgcaaacgccucuaauguucaagcggugaacagaucggcuaccaaaggaguaacacuccugcugccugaaccagaguggaccuaucccaggcucucauguccugguagcacuuuccagaaggccuuacugaucaguccacaccgguuuggcgaaacaaaaggaaauuccgcaccccuuauuauccgcgagccuuucauugccugcgggccaaaggaauguaaacauuuugcuuugacccacuacgcagcccagccgggcgguuauuacaacgggacgcgaggagaccguaauaagcugagacaucuaaucucuauaaagcucggcaaaauccccacuguggagaacagcauuuuccacauggcugccugguccggcucagcgugccaugaugggaaggaguggaccuauaucggagucgacgguccugauaauaacgcacugcuuaaaauuaaguacggcgaagccuacacagacacuuaucacaguuacgcuaauaacauccugaggacccaggagagcgccuguaauugcauagggggaaacuguuauuugaugauuacagauggcucugcauccggugugucagaaugccgguuucucaaaauccgcgaggggagaauuaucaaggagaucuucccaaccggaaggguuaagcacacggaagaguguacuugcggcuuugcuagcaauaaaacaauugaaugugccugccgggacaacaguuacaccgcgaagcgccccuucgugaaacugaaugucgagacugauacagccgaaauacgauuaaugugcaccgagacguaucuggacaccccuagaccagaugacggcucuaucacagggcccugugaguccaacggagauaaggguagcggcgggauuaaaggaggcuuugugcaucaaaggauggcaucgaagaucggucggugguacucucguacuauguccaaaaccaagcgcauggggaugggccucuauguaaaguacgacggagacccgugggcugauucagacgcccuugcuuucaguggcguuauggugagcauggaggaaccugggugguacuccuuuggauucgaaauaaaagauaagaaaugcgacguccccuguauugguaucgagauggugcacgauggcgggaaggaaacauggcauucugccgcaacugccaucuauugccugaugggaagcggccaguugcuaugggacaccgugacaggugucaacauggcucuguga

SEQ ID NO: 157323 - RNA, 1401 nt, Artificial Sequence; identical to SEQ ID NO: 157309
  derived and/or modified CDS sequence (opt3) from neuraminidase__InfluenzaB__AGX17844

SEQ ID NO: 157324 - RNA, 1401 nt, Artificial Sequence; identical to SEQ ID NO: 157317
  derived and/or modified CDS sequence (opt3) from neuraminidase__InfluenzaB__AGX17855

SEQ ID NO: 157325 - RNA, 1401 nt, Artificial Sequence; identical to SEQ ID NO: 156936
  derived and/or modified CDS sequence (opt3) from neuraminidase__InfluenzaB__AGX17866

SEQ ID NO: 157326 - RNA, 1401 nt, Artificial Sequence; identical to SEQ ID NO: 157302
  derived and/or modified CDS sequence (opt3) from neuraminidase__InfluenzaB__AGX17877

SEQ ID NO: 157327 - RNA, 1401 nt, Artificial Sequence; identical to SEQ ID NO: 157309
  derived and/or modified CDS sequence (opt3) from neuraminidase__InfluenzaB__AGX17888

SEQ ID NO: 157328 - RNA, 1401 nt, Artificial Sequence; identical to SEQ ID NO: 157302
  derived and/or modified CDS sequence (opt3) from neuraminidase__InfluenzaB__AGX17899

SEQ ID NO: 157329 - RNA, 1401 nt, Artificial Sequence; identical to SEQ ID NO: 157309
  derived and/or modified CDS sequence (opt3) from neuraminidase__InfluenzaB__AGX17910

SEQ ID NO: 157330 - RNA, 1401 nt, Artificial Sequence; identical to SEQ ID NO: 157309
  derived and/or modified CDS sequence (opt3) from neuraminidase__InfluenzaB__AGX17921

SEQ ID NO: 157331 - RNA, 1401 nt, Artificial Sequence; identical to SEQ ID NO: 156936
  derived and/or modified CDS sequence (opt3) from neuraminidase__InfluenzaB__AGX17932

SEQ ID NO: 157332 - RNA, 1401 nt, Artificial Sequence
  derived and/or modified CDS sequence (opt3) from neuraminidase__InfluenzaB__AGX17943
augcugcccagcaccauccagacacucacucuuuuccugacguccggcgggguguuguuaucucuguacgucucagccagucuaagcuaucuccuguacuccgacauucuucugaaguuuccuccaaccgagauaacagcuccgacuaugcccuuggauugcgcaaacgccucuaauguucaagcggugaacagaucggcuaccaaaggaguaacacuccugcugccugaaccagaguggaccuaucccaggcucucauguccugguagcacuuuccagaaggccuuacugaucaguccacaccgguuuggcgaaacaaaaggaaauuccgcaccccuuauuauccgcgagccuuucauugccugcgggccaaaggaauguaaacauuuugcuuugacccacuacgcagcccagccgggcgguuauuacaacgggacgcgaggagaccguaauaagcugagacaucuaaucucugugaggcucggcaagauacccacugucgagaacagcaucuuccacauggcugccugguccggcucagcgugccaugaugggaaagaguggaccuauauuggaguggacgguccugauaauaacgcacugcuuaagaucaaauacggcgaagccuacacagacacuuaucacaguuacgcuaauaacauucugcggacccaggagagcgccuguaauugcaucgggggaaacuguuauuugaugauaacagauggcucugcauccgguguuucagaaugccgcuuucucaagauuagagaggggaggaucauuaaagagaucuucccaaccggacgggugaagcacacggaagaguguacuugcggcuuugcuagcaauaagacaaucgaaugugccugccgcgacaacaguuacaccgcgaaacgacccuucgucaagcugaauguggagacugauacagccgaaauuagauuaaugugcaccgagacguaucuggacaccccuaggccagaugacggcucuauaacagggcccugugaguccaacggagauaaagguagcggcgggaucaagggaggcuuuguacaucaacggauggcaucgaaaauuggucguugguacucucgcacuauguccaagaccaaaagaauggggaugggccucuauguuaaguacgacggagacccgugggcugauucagacgcccuugcuuucaguggcgugauggucagcauggaggaaccugggugguacuccuuuggauucgaaaucaaggauaaaaagugcgacgugcccuguauagguauugagauggugcacgauggcgggaaagaaacauggcauucugccgcaacugccaucuauugccugaugggaagcggccaguugcuaugggacaccgucacagguguuaacauggcucuguga

SEQ ID NO: 157333 - RNA, 1401 nt, Artificial Sequence; identical to SEQ ID NO: 157302
  derived and/or modified CDS sequence (opt3) from neuraminidase__InfluenzaB__AGX17954

SEQ ID NO: 157334 - RNA, 1401 nt, Artificial Sequence
  derived and/or modified CDS sequence (opt3) from neuraminidase__InfluenzaB__AGX17976
augcugcccagcaccauccagacacucacucuuuuccugacguccggcgggguguuguuaucucuguacgucucagccagucuaagcuaucuccuguacuccgacauucuucugaaguuuucuccuaccgagauaacagcuccaacuaugccguuggauugcgcaaacgccucgaauguucacgcggugaacagaucagcuaccaaaggaguaacaccccuccugccugaaccagaguggaccuaucccaggcugagcuguccugguaguacuuuccaaaaggcccucuuaaucuccccacaucgguuuggcgaaacaaaaggaaauucugcaccccugauuauccgcgagccuuucauugccugcgggccaaacgaauguaagcacuuugcucuuacccauuacgcagcccagccgggcgguuauuacaaugggacgcgaggagaccguaacaaauugagacaccugaucagcgugaagcuaggcaagauacccacugucgaaaauuccaucuuccauauggcugccuggucaggcagugcgugccacgaugggaaagaguggaccuauauuggaguggacgguccugauaacaaugcacuccugaagaucaaauacggcgaggccuacacagacacuuaucacagcuacgcuaacaauauucuuaggacccaggagucugccuguaacugcaucgggggaaauuguuaucugaugauaacagauggcuccgcaucagguguuagcgaaugccgguuuuugaagauucgcgaggggagaaucauuaaagagaucuucccaaccggaagggugaagcauacggaagaguguacuugcggcuuugcuaguaacaagacaaucgaaugugccugccgggacaauucuuacaccgcgaaacgccccuucgucaagcucaacguggagacugauacagccgaaauucgacugaugugcaccgacacguauuuagauaccccuagaccagacgauggcuccauaacagggcccugugagagcaacggagacaaagguucgggcgggaucaagggaggcuuuguacaccagaggauggcaucuaaaauuggucggugguacucccguacuaugucaaagaccgagcgcauggggaugggccuguauguuaaauacgacggagauccgugggcugacagugaugcccucgcuuucagcggcgugauggucuccaugaaggaaccugggugguacucuuuuggauucgagaucaaggacaaaaagugcgaugugcccuguauagguauugaaauggugcaugacggcgggaaagagacauggcacagcgccgcaacugccaucuauugccuuaugggaucaggccaacuguugugggauaccgucacagguguugacauggcucuauga

SEQ ID NO: 157335 - RNA, 1401 nt, Artificial Sequence
  derived and/or modified CDS sequence (opt3) from neuraminidase__InfluenzaB__AGX17987
augcugcccagcaccauccagacacucacucuuuuccugacguccggcgggguguuguuaucucuguacgucucaguuagucuaagcuaucuccuguacuccgacauucuucugaaguuuccuccaaccgagauaacagccccgacuaugcccuuggauugcgcuaacgcaucuaaugugcaagccguaaacagaucggcgaccaaaggagugacacuccugcugccugaaccagaguggaccuaucccaggcucucauguccugguagcacuuuccagaaggcuuuacugaucaguccacaccgguuuggcgaaacaaaaggaaauuccgcaccccuuauuauccgcgagccuuucauugccugcgggccaaaggaauguaaacauuuugccuugacccacuacgcugcacagccgggcgguuauuacaacgggacgcgaggagaccguaauaagcugagacaucuaaucucugucaagcucggcaaaauacccacuguggagaacagcaucuuccacauggccgcuugguccggcucagccugccaugaugggaaggaguggaccuauauuggaguugacgguccugauaauaacgcgcugcuuaaaaucaaguacggcgaagcauacacagacacuuaucacaguuacgccaauaacauucugaggacccaggagagcgcuuguaauugcaucgggggaaacuguuauuugaugauaacagauggcucugccuccggugugucagaaugccgguuucucaaaauucgcgaggggagaaucauuaaggagaucuucccaaccggaagggucaagcacacggaagaguguacuugcggcuuugcaagcaauaaaacaaucgaaugugcuugccgggacaacaguuacaccgccaagcgccccuucgugaaacugaauguagagacugauacagcggaaauucgauuaaugugcaccgagacguaucuggacaccccuagaccagaugacggcucuauaacagggcccugugaguccaacggagauaaggguagcggcgggaucaaaggaggcuuuguucaucaaaggauggccucgaagauuggucggugguacucucguacuauguccaaaaccaagcgcauggggaugggccucuaugugaaguacgacggagacccgugggcagauucagacgcucuugccuucaguggcgucauggugagcauggaggaaccugggugguacuccuuuggauucgaaaucaaagauaagaaaugcgacgugcccuguauagguauugagaugguccacgauggcgggaaggaaacauggcauucugcugccacugcaaucuauugccugaugggaagcggccaguugcuaugggacaccguuacaggugugaacauggcccuguga

SEQ ID NO: 157336 - RNA, 1401 nt, Artificial Sequence; identical to SEQ ID NO: 157309
  derived and/or modified CDS sequence (opt3) from neuraminidase__InfluenzaB__AGX17998

SEQ ID NO: 157337 - RNA, 1401 nt, Artificial Sequence; identical to SEQ ID NO: 157302
  derived and/or modified CDS sequence (opt3) from neuraminidase__InfluenzaB__AGX18009

SEQ ID NO: 157338 - RNA, 1401 nt, Artificial Sequence; identical to SEQ ID NO: 157335
  derived and/or modified CDS sequence (opt3) from neuraminidase__InfluenzaB__AGX18020

SEQ ID NO: 157339 - RNA, 1401 nt, Artificial Sequence; identical to SEQ ID NO: 157302
  derived and/or modified CDS sequence (opt3) from neuraminidase__InfluenzaB__AGX18031

SEQ ID NO: 157340 - RNA, 1401 nt, Artificial Sequence
  derived and/or modified CDS sequence (opt3) from neuraminidase__InfluenzaB__AGX18042
augcugcccagcaccauccagacacucacucuuuuccugacguccggcgggguguuguuaucucuguacgucucagccagucuaagcuaucuccuguacuccgacauucuucugaaguuuucuccuaccgagauaacagcuccaacuaugccguugaacugcgcaaaugccucgaacguucaagcggugaauagaucagcuaccaaaggaguaacacuccugcugcccgaaccugaguggaccuauccaaggcucagcugucccgguaguacuuuccagaaggccuuacugaucuccccucaccgguuuggcgaaacaaaagggaacucugcaccacuuauuauccgcgagcccuucauugccugcggaccuaaugaauguaagcauuuugcuuugacccacuacgcagcccagccaggcgguuauuacaacgggacgcgaggagaucguaauaaacugagacaucuaaucagcgugaagcucggcaagauaccgacugucgagaacuccaucuuccacauggcugccuggucaggcagugcgugccaugacgggaaagaguggaccuauauuggaguggauggucccgacaauaacgcacugcuuaagaucaaauacggcgaagccuacacagauacuuaucacagcuacgcuaauaacauucugaggacccaggagucugccuguaauugcaucgggggaaacuguuauuugaugauaacagacggcuccgcaucagguguuagcgaaugccgguuucucaagauucgcgaggggagaaucauuaaagagaucuucccuaccggaagggugaagcacacggaagaguguacuugcggcuuugcuaguaauaagacaaucgaaugugccugccgggauaacucuuacaccgcgaaacgcccauucgucaagcugaacguggagauugacacugccgaaauacgauuaaugugcacagauaccuaucuggacacgcccagaccugaugacggcuccaucaccgggccaugugagagcaauggagauaaagguucgggcgggauuaagggaggcuuuguacaucaaaggauggcaucuaaaaucggucggugguacucccguacaaugucaaagacugagcgcauggggaugggccucuauguuaaauacgacggagaccccugggcugauagugacgcccuugcuuucagcggcgugauggucuccaugaaggaaccggggugguacucuuuuggauucgagauaaaggauaaaaagugcgacgugccuuguauugguaucgaaauggugcacgauggcgggaaagagaccuggcauagcgccgcaacagccaucuauugccugaugggaucaggccaguugcuaugggacacugucaccgguguugauauggcucuguga

SEQ ID NO: 157341 - RNA, 1401 nt, Artificial Sequence; identical to SEQ ID NO: 157309
  derived and/or modified CDS sequence (opt3) from neuraminidase__InfluenzaB__AGX18053

SEQ ID NO: 157342 - RNA, 1401 nt, Artificial Sequence; identical to SEQ ID NO: 157309
  derived and/or modified CDS sequence (opt3) from neuraminidase__InfluenzaB__AGX18064

SEQ ID NO: 157343 - RNA, 1401 nt, Artificial Sequence
  derived and/or modified CDS sequence (opt3) from neuraminidase__InfluenzaB__AGX18075
augcugcccagcaccauccagacacucacucuuuuccugacguccggcgggguguuguuaucucuguacgucucagccagucuaagcuaucuccuguacuccgacauucuucugaaguuuccuccaaccgagauaacagcuccgacuaugcccuuggauugcgcaaacgccucuaauguucaagcggugaacagaucggcuaccaaaggaguaacacuccugcugccugaaccagaguggaccuaucccaggcucucauguccugguagcacuuuccagaaggccuuacugaucaguccacaccgguuuggcgaaacaaaaggaaauuccgcaccccuuauuauccgcgagccuuucauugccugcgggccaaaggaauguaaacauuuugcuuugacccacuacgcagcccagccgggcgguuauuacaacgggacgcgaggagaccguaauaagcugagacaucuaaucucugugaagcucggcaaaauacccacugucgagaacagcaucuuccacauggcugccugguccggcucaaguugccaugaugggaaggaguggaccuauauuggaguggacgguccugauaauaacgcgcugcuuaaaaucaaguacggcgaagcauacacagacacuuaucacagcuacgccaauaacauucugaggacccaggagucugcuuguaauugcaucgggggaaacuguuauuugaugauaacagauggcuccgccucagguguuagcgaaugccgguuucucaaaauucgcgaggggagaaucauuaaggagaucuucccaaccggaagggugaagcacacggaagaguguacuugcggcuuugcaaguaauaaaacaaucgaaugugcuugccgggacaacucuuacaccgccaagcgccccuucgucaaacugaauguggagacugauacagcggaaauucgauuaaugugcaccgagacguaucuggacaccccuagaccagaugacggcuccauaacagggcccugugagagcaacggagauaaggguucgggcgggaucaaaggaggcuuuguacaucaaaggauggccucuaagauuggucggugguacucccguacuaugucaaaaaccaagcgcauggggaugggccucuauguuaaguacgacggagacccgugggcagauagugacgcucuugccuucagcggcgugauggucuccauggaggaaccugggugguacucuuuuggauucgaaaucaaagauaagaaaugcgacgugcccuguauagguauugagauggugcacgauggcgggaaggaaacauggcauagcgcugccacugcaaucuauugccugaugggaucaggccaguugcuaugggacaccgucacagguguuaacauggcccuguga

SEQ ID NO: 157344 - RNA, 1401 nt, Artificial Sequence; identical to SEQ ID NO: 156936
  derived and/or modified CDS sequence (opt3) from neuraminidase__InfluenzaB__AGX18086

SEQ ID NO: 157345 - RNA, 1401 nt, Artificial Sequence; identical to SEQ ID NO: 156936
  derived and/or modified CDS sequence (opt3) from neuraminidase__InfluenzaB__AGX18097

SEQ ID NO: 157346 - RNA, 1401 nt, Artificial Sequence; identical to SEQ ID NO: 156889
  derived and/or modified CDS sequence (opt3) from neuraminidase__InfluenzaB__AGX18108

SEQ ID NO: 157347 - RNA, 1401 nt, Artificial Sequence
  derived and/or modified CDS sequence (opt3) from neuraminidase__InfluenzaB__AGX18119
augcugcccagcaccauccagacacucacucuuuuccugacguccggcgggguguuguuaucucuguacgucucagccagucuaagcuaucuccuguacuccgacauucuucugaaguuuucuccuaccgagauaacagcuccaacuaugccguuggauugcgcaaacaccucgaauguucaagccgugaacagaucagcgacaaaaggaguaacccuccugcugcccgaaccugaguggacuuauccaaggcucagcugucccgguaguacauuccagaaggcuuuacugaucuccccucaccgguuuggcgaaaccaaaggaaauucugccccacuuauuauccgcgagcccuucauugcaugcgggccuaacgaauguaagcauuuugccuugacgcacuacgcugcacagccaggcgguuauuacaaugggacucgaggagaccguaacaaacugagacaucuaaucagcgugaagcucggcaagauaccgaccgucgaaaauuccaucuuccacauggccgcuuggucaggcagugccugccaugaugggaaagaguggacauauauuggaguggacggucccgauaacaaugcgcugcuuaagaucaaauacggcgaggcauacacugacaccuaucacagcuacgccaacaauauucugaggacacaggagucugcuuguaacugcaucgggggaaauuguuauuugaugauaaccgauggcuccgccucagguguuagcgaaugccgguuucucaagauucgcgaggggagaaucauuaaagagaucuucccuacgggaagggugaagcacacugaagaguguacaugcggcuuugcaaguaacaagaccaucgaaugugcuugccgggacaauucuuacacugccaaacgcccauucgucaagcugaacauggagacagauaccgcggaaauuaaauuaaugugcacggacaccuaucuggauacaccccgaccugacgauggcuccauaacugggccaugugagagcaacggagacaaggguucgggcgggaucaaaggaggcuuugugcaucaaagaauggccucuaagauugguaggugguacucccggaccaugucaaaaacagagcguauggggaugggccucuauguaaaguacgacggagaucccugggcagacagugaugcucuugccuucagcggcguuaugguguccaugaaggaaccggggugguacucuuuuggauucgagaucaaagacaagaaaugcgaugucccuuguauagguauugaaauggugcacgacggcgggaaggagacuuggcauagcgcugccaccgcaaucuauugccugaugggaucaggccaguugcuaugggauacagugaccggugucgacauggcccuguga

SEQ ID NO: 157348 - RNA, 1401 nt, Artificial Sequence
  derived and/or modified CDS sequence (opt3) from neuraminidase__InfluenzaB__AGX18130
augcugcccagcaccauccagacacucacucuuuuccugacguccggcgggguguuguuaucucuguacgucucagccagucuaagcuaucuccuguacuccgacauucuucugaaguuuucuccuaccgagauaacagcuccaacuaugccguuggauugcgcaaacgccucgaauguucaagcggugaacagaucagcuaccaaaggaguaacacuccugcugcccgaaccugaguggaccuauccaaggcucagcugucccgguaguacuuuccagaaggccuuacugaucuccccucaccgguuuggcgaaacaaaaggaaauucugcaccacuuauuauccgcgagcccuucauugccugcgggccuaacgaauguaagcauuuugcuuugacccacuacgcagcccagccaggcgguuauuacaaugggacgcgaggagaccguaacaaacugagacaucuaaucagcgugaagcucggcaagauaccgacugucgaaaauuccaucuuccacauggcugccuggucaggcagugcgugccaugaugggaaagaguggaccuauauuggaguggacggucccgauaacaaugcacugcuuaagaucaaauacggcgaggccuacacagacacuuaucacagcuacgcuaacaauauucugaggacccaggagucugccuguaacugcaucgggggaaauuguuauuugaugauaacagauggcuccgcaucagguguuagcgaaugccgguuucucaagauucgcgaggggagaaucauuaaagagaucuucccuaccggaagggugaagcacacggaagaguguacuugcggcuuugcuaguaacaagacaaucgaaugugccugccgggacaauucuuacaccgcgaaacgcccauucgucaagcugaacguggagauugauacugccgaaauacgauuaaugugcacagacaccuaucuggauacgcccagaccugacgauggcuccaucaccgggccaugugagagcaacggagacaaagguucgggcgggauuaagggaggcuuuguacaucaaaggauggcaucuaaaaucggucggugguacucccguacaaugucacgcacugagagaauggggaugggccucuauguuaaguacgacggagaucccugggcugacagugaugcccuugcuuucagcggcgugauggucuccaugaaagaaccggggugguacucuuuuggauucgagauaaaggacaagaaaugcgaugugccuuguauugguaucgaaauggugcacgacggcgggaaggagaccuggcauagcgccgcaacagccaucuauugccugaugggaucaggccaguugcuaugggauacugucaccgguguugacauggcucuguga

SEQ ID NO: 157349 - RNA, 1401 nt, Artificial Sequence
  derived and/or modified CDS sequence (opt3) from neuraminidase__InfluenzaB__AGX18141
augcugcccagcaccauccagacacucacucuuuuccugacguccggcgggguguuguuaucucuguacgucucagccagucuaagcuaucuccuguacuccgacauucuucugaaguuuccuucuaccgagauaacagcuccaacuaugccguuggauugcgcaaacgccucgaauguucaagcggugaacagaucagcuaccaaaggaaugacacuccugcugcccgaaccugaguggaccuauccaaggcucagcugucccgguaguacuuuccagaaggccuuacugaucuccccucaccgguuuggcgaaacaaaaggaaauucugcaccacuuauuauccgcgagcccuucauugccugcgggccuaaggaauguaaacauuuugcuuugacccacuacgcagcccagccaggcgguuauuacaacgggacgcgaggagaccguaauaagcugagacaucuaaucagcguaaagcucggcaaaauaccgacuguggagaacuccaucuuccacauggcugccuggucaggcagugcgugccaugaugggaaggaguggaccuauauuggagucgacggucccgauaauaacgcacugcuuaaaaucaaguacggcgaagccuacacagacacuuaucacagcuacgcuaauaacauucugaggacccaggagucugccuguaauugcaucgggggaaacuguuauuugaugauaacagauggcuccgcaucaggugugagcgaaugccgguuucucaaaauucgcgaggggagaaucauuaaggagaucuucccuaccggaaggaucaagcacacggaagaguguacuugcggcuuugcuaguaauaaaacaauugaaugugccugccgggacaacucuuacaccgcgaagcgcccauucguuaaacugaauguggagacugauacagccgaaauacgauuaaugugcaccgagacguaucuggacacccccagaccugaugacggcuccaucacagggccaugugagagcaacggagauaaggguucgggcgggauuaaaggaggcuuuguccaucaaaggauggcaucuaagaucggucggugguacucccguacuaugucaaaaaccgaacgcauggggaugggccucuaugugaaguacgacggagaccccugggcugagagugaugcccuugcuuucagcggcguaaugguuuccauggaggaaccggggugguacucuuuuggauucgaaauaaaggacaaaaagugcgaugugccuuguauugguaucgagaugguccacgacggcgggaaagagacauggcauagcgccgcaacugccaucuauugccugaugggaucaggccaguugcuaugggauaccgugacaggugugaacauggcucuguga

SEQ ID NO: 157350 - RNA, 1401 nt, Artificial Sequence; identical to SEQ ID NO: 156936
  derived and/or modified CDS sequence (opt3) from neuraminidase__InfluenzaB__AGX18152

SEQ ID NO: 157351 - RNA, 1401 nt, Artificial Sequence
  derived and/or modified CDS sequence (opt3) from neuraminidase__InfluenzaB__AGX18163
augcugcccagcaccauccagacacucacucuuuuccugacguccggcgggguguuguuaucucuguacgucucagccagucuaagcuaucuccuguacuccgacauucuucugaaguuuccuucuaccgagauaacagcuccaacuaugccguuggauugcgcaaacgccucgaauguucaagcggugaacagaucagcuaccaaaggaguaacacuccugcugcccgaaccugaguggaccuauccaaggcucagcugucccgguaguacuuuccagaaggccuuacugaucuccccucaccgguuuggcgaaacaaaaggaaauucugcaccacuuauuauccgcgagcccuucauugccugcgggccuaaggaauguaaacauuuugcuuugacccacuacgcagcccagccaggcgguuauuacaacgggaagcgaggagaccguaauaagcugagacaucuaaucagcgugaaacucggcaagauaccgacggucgagaacuccaucuuccacauggcugccuggucaggcagugcgugccaugaugggaaagaguggacuuauauuggaguggacggucccgauaauaacgcacugcuuaagaucaaauacggcgaagccuacaccgacacauaucacagcuacgcuaauaacauucugaggacucaggagucugccuguaauugcaucgggggaaacuguuauuugaugauaaccgauggcuccgcaucagguguuagcgaaugccgguuucucaagauucgcgaggggagaaucauuaaggagaucuucccuacaggaaggaucaaacacaccgaagaguguacgugcggcuuugcuaguaauaagacuauugaaugugccugccgggacaacucuuacacagcgaaacgcccauucgugaagcugaaugucgagaccgauacugccgaaauacgauuaaugugcacagagaccuaucuggacacgcccagaccugaugacggcuccaucaccgggccaugugagagcaacggagauaaagguucgggcgggauuaagggaggcuuugugcaucaaaggauggcaucuaaaaucggucggugguacucccguacaaugucaaagacugaacgcauggggaugggccucuauguaaaguacgacggagaccccugggcugauagugacgcccuugcuuucagcggcguuaugguguccauggaggaaccggggugguacucuuuuggauucgagauaaaagauaagaaaugcgacgucccuuguauugguaucgaaauggugcacgauggcgggaaggagaccuggcauagcgccgcaacagccaucuauugccugaugggaucaggccaguugcuaugggacacugugaccggugucaacauggcucuguga

SEQ ID NO: 157352 - RNA, 1401 nt, Artificial Sequence; identical to SEQ ID NO: 157302
  derived and/or modified CDS sequence (opt3) from neuraminidase__InfluenzaB__AGX18174

SEQ ID NO: 157353 - RNA, 1401 nt, Artificial Sequence; identical to SEQ ID NO: 156936
  derived and/or modified CDS sequence (opt3) from neuraminidase__InfluenzaB__AGX18185

SEQ ID NO: 157354 - RNA, 1401 nt, Artificial Sequence; identical to SEQ ID NO: 156889
  derived and/or modified CDS sequence (opt3) from neuraminidase__InfluenzaB__AGX18196

SEQ ID NO: 157355 - RNA, 1401 nt, Artificial Sequence
  derived and/or modified CDS sequence (opt3) from neuraminidase__InfluenzaB__AGX18207
augcugcccagcaccauccagacacucacucuuuuccugacguccggcgggguguuguuaucucuguacgucucagccagucuaagcuaucuccuguacuccgacauucuucugaaguuuccuccaaccgagauaacagcuccgacuaugcccuuggauugcgcaaacgccucuaauguucaagcggugaacagaucggcuaccaaaggaguaacacuccugcugccugaaccagaguggaccuaucccaggcucucauguccugguagcacuuuccagaaggccuuacugaucaguccacaccgguuuggcgaaacaaaaggaaauuccgcaccccuuauuauccgcgagccuuucauugccugcgggccaaaggaauguaaacauuuugcuuugacccacuacgcagcccagccgggcgguuauuacaacgggacgcgaggagaccguaauaagcugagacaucuaaucucugugaagcucggcaaaauacccacugucgagaccagcaucuuccacauggcugccugguccggcucagcgugccaugaugggaaggaguggacauauauuggaguggacgguccugauaacaaugcacugcuuaaaaucaaguacggcgaagccuacacugacaccuaucacaguuacgcuaacaauauucugaggacacaggagagcgccuguaacugcaucgggggaaauuguuauuugaugauaaccgauggcucugcauccgguguuucagaaugccgguuucucaaaauucgcgaggggagaaucauuaaggagaucuucccaacgggaagggugaagcacacugaagaguguacaugcggcuuugcuagcaacaaaaccaucgaaugugccugccgggacaauaguuacacugcgaagcgccccuucgucaaacugaacguggagacagauaccgccgaaauucgauuaaugugcacggagaccuaucuggacacaccuagaccagaugacggcucuauaacugggcccugugaguccaauggagauaaggguagcggcgggaucaaaggaggcuuuguacaucaaaggauggcaucgaagauuggucggugguacucucguaccauguccaaaacaaagcgcauggggaugggccucuauguuaaguacgacggagacccgugggcugauucagacgcccuugcuuucaguggcgugauggucagcauggaggaaccugggugguacuccuuuggauucgaaaucaaagauaagaaaugcgacgugcccuguauagguauugagauggugcacgauggcgggaaggaaacuuggcauucugccgcaaccgccaucuauugccugaugggaagcggccaguugcuaugggacacagucaccgguguuaacauggcucuguga

SEQ ID NO: 157356 - RNA, 1401 nt, Artificial Sequence
  derived and/or modified CDS sequence (opt3) from neuraminidase__InfluenzaB__AGX18218
augcugcccagcaccauccagacacucacucuuuuccugacguccggcgggguguuguuaucucuguacgucucagccagucuaagcuaucuccuguacuccgacauucuucugaaguugucuccuaccgagauaacagcuccaacuaugccgcucgauugcgcaaacaccucgaauguucaagccgugaacagaucagcgacaaaaggaguaacccugcugcuccccgaaccugaguggacuuauccaagguuaagcugucccgguaguacauuucagaaggcucugcuuaucuccccucaccgguucggcgaaaccaaaggaaauucugccccauugauuauccgcgagcccuuuauugcaugcgggccuaacgaauguaagcauuucgcccugacgcacuacgcugcacagccaggcgguuauuacaaucgaacucguggggacagaaacaaacuaaggcaucucaucagcgugaagcugggaaagauaccgaccgucgaaaauuccaucuuucacauggccgcuuggucaggcagugccugccaugauggcaaagaguggacauauauugggguggacggacccgauaacaaugcgcuucugaagaucaaauacggugaggcauacacugacaccuaucacagcuacgccaacaauauuuugcggacacaggagucugcuuguaacugcaucggcgggaauuguuaucucaugauaaccgauggauccgccucaggcguuagcgaaugccgcuuccugaagauuagagaggguaggaucauuaaagagaucuuuccuacggggcgggugaagcacacugaagaguguacaugcggauucgcaaguaacaagaccaucgaaugugcuugccgcgacaauucuuacacugccaaacgaccauuugucaaguuaaacauggagacagauaccgcggaaauuagacugaugugcacggacaccuaucucgauacacccaggccugacgauggcuccauaacuggcccaugugagagcaacggggacaaaggaucggguggcaucaaagggggauucgugcaucaacggauggccucuaagauuggccguugguacucccgcaccaugucaaagacagagagaauggguauggggcuuuauguaaaauacgacggcgaucccugggcagacagugaugcucuggccuuuagcggaguuaugguguccaugaaggaaccgggcugguacucuuucggguuugagaucaaggacaaaaagugcgaugucccuuguauaggaauugaaauggugcacgacgguggcaaagagacuuggcauagcgcugccaccgcaaucuauugcuugauggggucaggacagcuacugugggauacagugaccggcgucgacauggcccucuga

SEQ ID NO: 157357 - RNA, 1401 nt, Artificial Sequence; identical to SEQ ID NO: 157309
  derived and/or modified CDS sequence (opt3) from neuraminidase__InfluenzaB__AGX18229

SEQ ID NO: 157358 - RNA, 1401 nt, Artificial Sequence
  derived and/or modified CDS sequence (opt3) from neuraminidase__InfluenzaB__AGX18240
augcugcccagcaccauccagacacucacucuuuuccugacguccggcgggguguuguuaucucuguacgucucagccagucuaagcuaucuccuguacuccgacauucuucugaaguuuucuccuaccgagauaacagcuccaacuaugccguuggauugcgcaaacgccucgaauguucaaaccgugaacagaucagcgacaaaaggaguaacccuccugcugcccgaaccugaguggacuuauccaaggcucagcugucccgguaguacauuccagaaggcuuuacugaucuccccucaccgguuuggcgaaaccaaaggaaauucugccccacuuauuauccgcgagcccuucauugcaugcgggccuaacgaauguaagcauuuugccuugacgcacuacgcugcacagccaggcgguuauuacaaugggacucgaggagaccguaacaaacugagacaucuaaucagcgugaagcucggcaagauaccgaccgucgaaaauuccaucuuccacauggccgcuuggucaggcagugccugccaugaugggaaagaguggacauauauuggaguggacggucccgauaacaaugcgcugcuuaagaucaaauacggcgaggcauacacugacaccuaucacagcuacgccaacaauauucugaggacacaggagucugcuuguaacugcaucgggggaaauuguuauuugaugauaaccgauggcuccgccucagguguuagcgaaugccgguuucucaagauucgcgaggggagaaucauuaaagagaucuucccuacgggaagggugaagcacacugaagaguguacaugcggcuuugcaaguaacaagaccaucgaaugugcuugccgggacaauucuuacacugccaaacgcccauucgucaagcugaacguggagauugauacagcggaaauacgauuaaugugcaccgacacguaucuggauacccccagaccugacgauggcuccaucacagggccaugugagagcaacggagacaaagguucgggcgggauuaagggaggcuuuguacaucaaaggauggccucuaaaaucggucggugguacucccguacuaugucaaagaccgagcgcauggggaugggccucuauguuaaauacgacggagaucccugggcagacagugaugcucuugccuucagcggcgugauggucuccaugaaggaaccggggugguacucuuuuggauucgagauaaaggacaaaaagugcgaugugccuuguauugguaucgaaauggugcacgacggcgggaaagagacauggcauagcgcugccacugcaaucuauugccugaugggaucaggccaguugcuaugggauaccgucacagguguugacauggcccuguga

SEQ ID NO: 157359 - RNA, 1401 nt, Artificial Sequence; identical to SEQ ID NO: 157302
  derived and/or modified CDS sequence (opt3) from neuraminidase__InfluenzaB__AGX18251

SEQ ID NO: 157360 - RNA, 1401 nt, Artificial Sequence
  derived and/or modified CDS sequence (opt3) from neuraminidase__InfluenzaB__AGX18262
augcugcccagcaccauccagacacucacucuuuuccugacguccggcgggguguuguuaucucuguacgucucagccagucuaagcuaucuccuguacuccaacauucuucugaaguuuucuccuaccgagauaacagcuccaacuaugccguuggacugcgcaaaugccucgaacguucaagcggugaauagaucagcuaccaaaggaguaacacuccugcugcccgaaccugaguggaccuauccaaggcucagcugucccgguaguacuuuccagaaggccuuacugaucuccccucaccgguuuggcgaaacaaaagggaacucugcaccacuuauuauccgcgagcccuucauugccugcggaccuaaugaauguaagcauuuugcuuugacccacuacgcagcccagccaggcgguuauuacaacgggacgcgaggagaucguaauaaacugagacaucuaaucagcgugaagcucggcaagauaccgacugucgagaacuccaucuuccacauggcugccuggucaggcagugcgugccaugacgggaaagaguggaccuauauuggaguggauggucccgacaauaacgcacugcuuaagaucaaauacggcgaagccuacacagauacuuaucacagcuacgcuaauaacauucugaggacccaggagucugccuguaauugcaucgggggaaacuguuauuugaugauaacagacggcuccgcaucagguguuagcgaaugccgguuucucaagauucgcgaggggagaaucauuaaagagaucuucccuaccggaagggugaagcacacggaagaguguacuugcggcuuugcuaguaauaagacaaucgaaugugccugccgggauaacucuuacaccgcgaaacgcccauucgucaagcugaacguggagacugacacagccgaaauucgauuaaugugcaccgauacguaucuggacacccccagaccugaugacggcuccauaacagggccaugugagagcaauggagauaaagguucgggcgggaucaagggaggcuuuguacaucaaaggauggcaucuaaaguuggucggugguacucccguacuaugucaaagaccgagcgcauggggaugggccucuaugugaaauacgacggagaccccugggcugauagugacgcccuugcuuucagcggcgucaugguguccaugaaggaaccggggugguacucuuuuggauucgagauuaaggauaaaaagugcgacgugccuuguaucgguauagaaaugguccacgauggcgggaaagagacauggcauagcgccgcaacugccauuuauugccugaugggaucaggccaguugcuaugggacaccguuacagguguggauauggcucuguga

SEQ ID NO: 157361 - RNA, 1401 nt, Artificial Sequence; identical to SEQ ID NO: 157309
  derived and/or modified CDS sequence (opt3) from neuraminidase__InfluenzaB__AGX18273

SEQ ID NO: 157362 - RNA, 1401 nt, Artificial Sequence; identical to SEQ ID NO: 157334
  derived and/or modified CDS sequence (opt3) from neuraminidase__InfluenzaB__AGX18284

SEQ ID NO: 157363 - RNA, 1401 nt, Artificial Sequence; identical to SEQ ID NO: 157309
  derived and/or modified CDS sequence (opt3) from neuraminidase__InfluenzaB__AGX18295

SEQ ID NO: 157364 - RNA, 1401 nt, Artificial Sequence; identical to SEQ ID NO: 156936
  derived and/or modified CDS sequence (opt3) from neuraminidase__InfluenzaB__AGX18306

SEQ ID NO: 157365 - RNA, 1401 nt, Artificial Sequence
  derived and/or modified CDS sequence (opt3) from neuraminidase__InfluenzaB__AGX18317
augcugcccagcaccauccagacacucacucuuuuccugacguccggcgggguguuguuaucucuguacgucucagccagucuaagcuaucuccuguacuccgacauucuucugaaguuuccuucuaccgagauaacagcuccaacuaugccguuggauugcgcaaacgccucgaauguucaagcggugaacagaucagcuaccaaaggaguaacacuccugcugcccgaaccugaguggaccuauccaaggcucagcugucccgguaguacuuuccagaaggccuuacugaucuccccucaccgguuuggcgaaacaaaaggaaauucugcaccacuuauuauccgcgagcccuucauugccugcgggccuaaggaauguaaacauuuugcuuugacccacuacgcagcccagccaggcgguuauuacaacgagacgcgaggggaccguaauaagcugagacaucuaaucagcgugaagcucggaaaaauaccgacugucgagaacuccaucuuccacauggcugccuggucaggcagugcgugccaugauggcaaggaauggaccuauauugggguggacggacccgauaauaacgcacugcuuaaaaucaaguacggugaggccuacacagacacuuaucacagcuacgcuaauaacauucugaggacccaggaaucugccuguaauugcaucggcgggaacuguuauuugaugauaacagauggauccgcaucaggcguuagcgagugccgguuucucaaaauucgcgaggguagaaucauuaaggaaaucuucccuaccgggaggaucaagcacacggaggaauguacuugcggauuugcuaguaauaaaacaauugagugugccugccgggacaacucuuacaccgcgaagcgcccauucgugaaacugaaugucgaaacugauacagccgagauacgauuaaugugcaccgagacguaucuggacacccccagaccugaugacggcuccaucacaggcccaugugaaagcaacggggauaagggaucggguggcauuaaagggggauuugugcaucaaaggauggcaucuaagaucggccggugguacucccguacuaugucaaaaaccaagcgcauggguauggggcucuauguaaaguacgacggcgaccccugggcugauagugacgcccuugcuuucagcggaguuaugguguccauggaggaaccgggcugguacucuuuuggguucgagauaaaagauaagaaaugcgacgucccuuguauuggaaucgaaauggugcacgaugguggcaaggagacauggcauagcgccgcaacugccaucuauugccugauggggucaggacaguugcuaugggacaccgugacaggcgucaacauggcucuguga

SEQ ID NO: 157366 - RNA, 1401 nt, Artificial Sequence; identical to SEQ ID NO: 157309
  derived and/or modified CDS sequence (opt3) from neuraminidase__InfluenzaB__AGX18328

SEQ ID NO: 157367 - RNA, 1401 nt, Artificial Sequence
  derived and/or modified CDS sequence (opt3) from neuraminidase__InfluenzaB__AGX18339
augcugcccagcaccauccagacacucacucuuuuccugacguccggcgggguguuguuaucucuguacgucucagccagucuaagcuaucuccuguacuccgacauucuucugaaguuuucuccuaccgagauaacagcuccaacuaugccguuggauugcgcaaacgccucgaauguucaagcggugaacagaucagcuaccaaaggaguaacacuccugcugcccgaaccugaguggaccuauccaaggcucagcugucccgguaguacuuuccagaaggccuuacugaucuccccucaccgguuuggcgaaacaaaaggaaauucugcaccacuuauuauccgcgagcccuucauugccugcgggccuaacgaauguaagcauuuugcuuugacccacuacgcagcccagccaggcgguuauuacaaugggacgcgaggagaccguaacaaacugagacaucuaaucagcgugaagcucggcaagauaccgacugucgaaaauuccaucuuccacauggcugccuggucaggcagugcgugccaugaugggaaagaguggaccuauauuggaguggacggucccgauaacaaugcacugcuuaagaucaaauacggcgaggccuacacagacacuuaucacagcuacgcuaacaauauucugaggacccaggagucugccuguaacugcaucgggggaaauuguuauuugaugauaacagauggcuccgcaucagguguuagcgaaugccgguuucucaagauucgcgaggggagaaucauuaaagagaucuucccuaccggaagggugaagcacacggaagaguguacuugcggcuuugcuaguaacaagacaaucgaaugugccugccgggacaauucuuacaccgcgaaacgcccauucgucaagcugaacguggagacugauacagccgaaauucgauuaaugugcaccgacacguaucuggauacccccagaccugacgauggcuccauaacagggccaugugagagcaacggagacaaagguucgggcgggaucaagggaggcuuuguacaucaaaggauggcaucuaaaguuggucggugguacucccguacuaugucaaagaccgagcgcauggggaugggccucuaugugaaauacgacggagaucccugggcugacagugaugcccuugcuuucggcggggucauggugagcaugaaggaaccgggaugguacuccuuugguuucgagauuaaggacaaaaagugcgaugugccuuguaucggcauagaaaugguccacgacgggggaaaagagacauggcauucugccgcaacugccauuuauugccugaugggcagcggucaguugcuaugggauaccguuacagggguggacauggcucuguga

SEQ ID NO: 157368 - RNA, 1401 nt, Artificial Sequence
  derived and/or modified CDS sequence (opt3) from neuraminidase__InfluenzaB__AGX18350
augcugcccagcaccauccagacacucacucuuuuccugacguccggcgggguguuguuaucucuguacgucucagccagucuaagcuaucuccuguacuccgacauucuucugaaguuuucuccuaccgagauaacagcuccaacuaugccguuggauugcgcaaacgccucgaauguucaagcgaugaacagaucagcuaccaaaggagugacacuccugcugcccgaaccugaguggaccuauccaaggcucagcugucccgguaguacuuuccagaaggccuuacugaucuccccucaccgguuuggcgaaacaaaaggaaauucugcaccacuuauuauccgcgagcccuucauugccugcgggccuaacgaauguaagcauuuugcuuugacccacuacgcagcccagccaggcgguuauuacaaugggacgcgaggagaccguaacaaacugagacaucuaaucagcguaaagcucggcaagauaccgacuguggaaaauuccaucuuccacauggcugccuggucaggcagugcgugccaugaugggaaagaguggaccuauauuggagucgacggucccgauaacaaugcacugcuuaagaucaaauacggcgaggccuacacagacacuuaucacagcuacgcuaacaauauucugaggacccaggagucugccuguaacugcaucgggggaaauuguuauuugaugauaacagauggcuccgcaucaggugugagcgaaugccgguuucucaagauucgcgaggggagaaucauuaaagagaucuucccuaccggaaggguuaagcacacggaagaguguacuugcggcuuugcuaguaacaagacaaucgaaugugccugccgggacaauucuuacaccgcgaaacgcccauucgugaagcugaacgucgagauugauacugccgaaauacgauuaaugugcacagacaccuaucuggauacgcccagaccugacgauggcuccaucaccgggccaugugagagcaacggagacaaagguucgggcgggauuaagggaggcuuugugcaucaaaggauggcaucuaaaaucggucggugguacucccguacaaugucaaagacugagcgcauggggaugggccucuauguaaaauacgacggagaucccugggcugacagugaugcccuugcuuucagcggcguuaugguguccaugaaggaaccggggugguacucuuuuggauucgagauaaaggacaaaaagugcgaugucccuuguauugguaucgaaauggugcacgacggcgggaaagagaccuggcauagcgccgcaacagccaucuauugccugaugggaucaggccaguugcuaugggauacugugaccggugucgacauggcucuguga

SEQ ID NO: 157369 - RNA, 1401 nt, Artificial Sequence; identical to SEQ ID NO: 157334
  derived and/or modified CDS sequence (opt3) from neuraminidase__InfluenzaB__AGX18361

SEQ ID NO: 157370 - RNA, 1401 nt, Artificial Sequence
  derived and/or modified CDS sequence (opt3) from neuraminidase__InfluenzaB__AGX18383
augcugcccagcaccauccagacacucacucuuuuccugacguccggcgggguguuguuaucucuguacgucucagccagucuaagcuaucuccuguacuccgacauucuucugaaguuuucuccuaccgagauaacagcuccaacuaugccguuggauugcgcaaacaccucgaauguucaagccgugaacagaucagcgacaaaaggaguaacccuccugcugcccgaaccugaguggacuuauccaaggcucagcugucccgguaguacauuccagaaggcuuuacugaucuccccucaccgguuuggcgaaaccaaaggaaauucugccccacuuauuauccgcgagcccuucauugcaugcgggccuaacgaauguaagcauuuugccuugacgcacuacgcugcacagccaggcgguuauuacaaugggacucgaggagaccguaacaaacugagacaucuaaucagcgugaagcucggcaagauaccgaccgucgaaaauuccaucuuccacauggccgcuuggucaggcagugccugccaugaugggaaagaguggacauauauuggaguggacggucccgauaacaaugcgcugcuuaagaucaaauacggcgaggcauacacugacaccuaucacagcuacgccaacaauauucugaggacacaggagucugcuuguaacugcaucgggggaaauuguuauuugaugauaaccgauggcuccgccucagguguuagcgaaugccgguuucucaagauucgcgaggggagaaucauuaaagagaucuucccuacgggaagggugaagcacacugaagaguguacaugcggcuuugcaaguaacaagaccaucgaaugugcuugccgggacaauucuuacacugccaaacgcccauucgucaagcugaacauggagacagauaccgcggaaauucgauuaaugugcacggacaccuaucuggauacacccagaccugacgauggcuccauaacugggccaugugagagcaacggagacaaagguucgggcgggaucaagggaggcuuugugcaucaaaggauggccucuaaaauuggucggugguacucccguaccaugucaaagacagagcgcauggggaugggccucuauguaaaauacgacggagaucccugggcagacagugaugcucuuguuuucagcggcgugauggucuccaugaaggaaccggggugguacucuuuuggauucgagaucaaggacaaaaagugcgaugugccuuguauagguauugaaauggugcacggcgggggaaaagagacuuggcauagcgccgcuaccgccaucuauugccugaugggcucaggucaguugcuaugggacacagucaccgggguugauauggcacuguga

SEQ ID NO: 157371 - RNA, 1401 nt, Artificial Sequence; identical to SEQ ID NO: 156936
  derived and/or modified CDS sequence (opt3) from neuraminidase__InfluenzaB__AGX18394

SEQ ID NO: 157372 - RNA, 1401 nt, Artificial Sequence
  derived and/or modified CDS sequence (opt3) from neuraminidase__InfluenzaB__AGX18405
augcugcccagcaccauccagacacucacucuuuuccugacguccggcgggguguuguuaucucuguacgucucagccagucuaagcuaucuccuguacuccgacauucuucugaaguuuucuccuaccgagauaacagcuccaacuaugccguuggauugcgcaaacgccucgaauguucacgcggugaacagaucagcuaccaaaggaguaacaccccuccugccugaaccagaguggaccuaucccaggcugagcuguccugguaguacuuuccaaaaggcccucuuaaucuccccacaucgguuuggcgaaacaaaaggaaauucugcaccccugauuauccgcgagccuuucauugccugcgggccaaacgaauguaagcacuuugcucuuacccauuacgcagcccagccgggcgguuauuacaaugggacgcgaggagaccguaacaaauugagacaccugaucagcgugaagcuaggcaagauacccacugucgaaaauuccaucuuccauauggcugccuggucaggcagugcgugccacgaugggaaagaguggaccuauauuggaguggacgguccugauaacaaugcacuccugaagaucaaauacggcgaggccuacacagacacuuaucacagcuacgcuaacaauauucuuaggacccaggagucugccuguaacugcaucgggggaaauuguuaucugaugauaacagauggcuccgcaucagguguuagcgaaugccgguuuuugaagauucgcgaggggagaaucauuaaagagaucuucccaaccggaagggugaagcauacggaagaguguacuugcggcuuugcuaguaacaagacaaucgaaugugucugccgggacaauucuuacaccgccaaacgccccuucgugaagcucaacguagagacugauacagcggaaauucgacugaugugcaccgacacguauuuagauaccccuagaccagacgauggcuccauaacagggcccugugagagcaacggagacaaagguucgggcgggaucaagggaggcuuuguucaccagaggauggccucuaaaauuggucggugguacucccguacuaugucaaagaccgagcgcauggggaugggccuguaugugaaauacgacggagauccgugggcagacagugaugcucucgccuucagcggcgucaugguguccaugaaggaaccugggugguacucuuuuggauucgagaucaaggacaaaaagugcgaugugcccuguauagguauugaaaugguccaugacggcgggaaagagacauggcacagcgcugccacugcaaucuauugccuuaugggaucaggccaacuguugugggauaccguuacagguguggacauggcccuauga

SEQ ID NO: 157373 - RNA, 1401 nt, Artificial Sequence
  derived and/or modified CDS sequence (opt3) from neuraminidase__InfluenzaB__AGX18416
augcugcccagcaccauccagacacucacucuuuuccugacguccggcgggguguuguuaucucuguacgucucagccagucuaagcuaucuccuguacuccgacauucuucugaaguuuucuccuaccgagauaacagcuccaacuaugccguuggauugcgcaaacgccucgaauguucaagcggugaacagaucagcuaccaaaggaguaacacuccugcugcccgaaccugaguggaccuauccaaggcucagcugucccgguaguacuuuccagaaggccuuacugaucuccccucaccgguuuggcgaaacaaaaggaaauucugcaccacuuauuauccgcgagcccuucauugccugcgggccuaacgaauguaagcauuuugcuuugacccacuacgcagcccagccaggcgguuauuacaaugggacgcgaggagaccguaacaaacugagacaucuaaucagcgugaagcucggcaagauaccgacugucgaaaauuccaucuuccacauggcugccuggucaggcagugcgugccaugaugggaaagaguggaccuauauuggaguggacggucccgauaacaaugcacugcuuaagaucaaauacggcgaggccuacacagacacuuaucacagcuacgcuaacaauauucugaggacccaggagucugccuguaacugcaucgggggaaauuguuauuugaugauaacagauggcuccgcaucagguguuagcgaaugccgguuucucaagauucgcgaggggagaaucauuaaagagaucuucccuaccggaagggugaagcacacggaagaguguacuugcggcuuugcuaguaacaagacaaucgaaugugccugccgggacaauucuuacaccgcgaaacgcccauucgucaagcugaacguggagauugauacugccgaaauacgauuaaugugcacagacaccuaucuggauacgcccagaccugacgauggcuccaucaccgggagcugugagucgaacggagacaaagguucuggcgggauuaagggaggcuuuguacaucaaaggauggcauccaaaaucggucggugguacucacguacaaugaguaagacugagcgcauggggaugggccucuauguuaaauacgacggagauccaugggcugacagcgaugcccuugcuuucuccggcgugauggucucuaugaaggaacccgggugguacagcuuuggauucgagauaaaggacaaaaagugcgaugugccguguauugguaucgaaauggugcacgacggcgggaaagagaccuggcauucagccgcaacagccaucuauugccugaugggaaguggccaguugcuaugggauacugucaccgguguugacauggcucuguga

SEQ ID NO: 157374 - RNA, 1401 nt, Artificial Sequence
  derived and/or modified CDS sequence (opt3) from neuraminidase__InfluenzaB__AGX18428
augcugcccagcaccauccagacacucacucuuuuccugacguccggcgggguguuguuaucucuguacgucucagccagucuaagcuaucuccuguacuccgacauucuucugaaguuuucuaccacagagauaacugcuccuaccaugccauuggauugcgcaaacgccucgaauguucaagcggugaacagaucagcuacaaaaggaguaacccuccugcugccggaacccgaguggacuuauccuaggcucagcuguccagguaguacauuccagaaggccuuacugaucucuccccaccgguuuggcgaaaccaaaggaaauuccgcaccucuuauuauccgcgagccauucauugccugcgggcccaaggaauguaaacauuuugcuuugacgcacuacgcagcccagccuggcgguuauuacaacgggacucgagaggaccguaauaagcugagacaucuaaucagcgugaagcucggaaaaauaccaaccgucgagaacuccaucuuccacauggcugccuggucaggcagugcgugccaugauggcaaggaauggacauauauugggguggacggaccggauagcaaugcacugcuuaaaaucaaguacggugaggccuacacugacaccuaucacucuuacgcuaacaauauucugaggacacaggaauccgccuguaacugcaucggcgggaauuguuauuugaugauaaccgauggaucagcaagcggcauuagugagugccgguuucucaaaauccgcgaggguagaauuaucaaggaaaucuuccccacggggaggguuaagcacacugaggaauguacaugcggauuugcuucuaacaaaaccauugagugugccugccgggacaauuccuacacugcgaagcgcccuuucgugaaacugaacgucgaaacagauaccgccgagauacgauuaaugugcacggagaccuaucuggacacaccaagacccgaugacggcagcaucacuggcccuugugaaucgaaugggaacaagggaucugguggcauuaaagggggauuugugcaucaaaggauggcauccaagaucggccggugguacucacguaccaugaguaaaacaaagcgcauggguauggggcucuauguaaaguacgauggcgacccauggauagacagcgaugcucuugcccuguccggaguuauggugucuauggaggaacccggcugguacagcuucggguuugagauuaaagacaagaaaugcgaugucccguguaucggaaucgaaauggugcacgacgguggcaaggagacuuggcauucagcugccaccgcaauuuauugcuugauggggaguggacagcuacugugggauacagugaccggcgucgacauggcccucuga

SEQ ID NO: 157375 - RNA, 1401 nt, Artificial Sequence
  derived and/or modified CDS sequence (opt3) from neuraminidase__InfluenzaB__AGX18439
augcugcccagcaccauccagacacucacucuuuuccugacguccggcgggguguuguuaucucuguacgucucagccagucuaagcuaucuccuguacuccgacauucuucugaaguuuucuccuaccgagauaacagcuccaacuaugccguuggauugcgcaaacgccucgaauguucaagcggugaacagaucagcuaccaaaggaguaacacuccugcugcccgaaccugaguggaccuauccaaggcucagcugucccgguaguacuuuccagaaggccuuacugaucuccccucaccgguuuggcgaaacaaaaggaaauucugcaccacuuauuauccgcgagcccuucauugccugcgggccuaacgaauguaagcauuuugcuuugacccacuacgcagcccagccaggcgguuauuacaaugggacgcgaggagaccguaacaaacugagacaucuaaucagcgugaagcucggcaagauaccgacugucgaaaauuccaucuuccacauggcugccuggucaggcagugcgugccaugaugggaaagaguggaccuauauuggaguggacggucccgauaacaaugcacugcuuaagaucaaauacggcgaggccuacacagacacuuaucacagcuacgcuaacaauauucugaggacccaggagucugccuguaacugcaucgggggaaauuguuauuugaugauaacagauggcuccgcaucagguguuagcgaaugccgguuucucaagauucgcgaggggagaaucauuaaagagaucuucccuaccggaagggugaagcacacggaagaguguacuugcggcuuugcuaguaacaagacaaucgaaugugccugccgggacaauucuuacaccgcgaaacgcccauucgucaagcugaacguggagauugauacugccgaaauacgauuaaugugcacagacaccuaucuggauacgcccagaccugacgauggcuccaucaccgggccaugugagagcaacggagacaaagguucgggcgggauuaagggaggcuuuguacaucaaaggauggcaucuaaaaucggucggugguacucccguacaaugucaaagacugagcgcauggggaugggccucuauguuaaauacgacggagaucccugggcugacagugaugcccuugcuuucagcggccugaugguguccaugaaggaaccggggugguacucuuuuggauucgagauaaaggacaaaaagugcgaugucccuuguauugguaucgaaauggugcacgacggcgggaaagagaccuggcauagcgccgcaacagccaucuauugcuugaugggaucaggccagcuacugugggauacugugaccggugucgacauggcucucuga

SEQ ID NO: 157376 - RNA, 1401 nt, Artificial Sequence
  derived and/or modified CDS sequence (opt3) from neuraminidase__InfluenzaB__AGX18450
augcugcccagcaccauccagacacucacucuuuuccugacguccggcgggguguuguuaucucuguacgucucagccagucuaagcuaucuccuguacuccgacauucuucugaaguuuucuccuaccgagauaacagcuucgacuaugccauuggauugcgcaaacgccucaaauguucaagcggugaacagaagcgcuaccaaaggaguaacacuccugcugccggaacccgaguggaccuauccuaggcucaguuguccagguuccacuuuccagaaggccuuacugaucucuccccaccgguuuggcgaaacaaaagggaauagcgcaccucuuauuauccgcgagccauucauugccugcggacccaacgaauguaagcauuuugcuuugacccacuacgcagcccagccuggcgguuauuacaaugggacgcgaggagaccguaacaaacugagacaucuaaucuccgugaagcucggcaagauaccaacugucgaaaauucaaucuuccacauggcugccuggaguggcagcgcgugccaugaugggaaagaguggaccuauauuggaguggacgguccggauaacaaugcacugcuuaagaucaaauacggcgaggccuacacagacacuuaucacucuuacgcuaacaauauucugaggacccaggaguccgccuguaacugcaucgggggaaauuguuauuugaugauaacagauggcucagcaagcgguguuagugaaugccgguuucucaagauucgcgaggggagaaucauuaaagagaucuuccccaccggaagggugaagcacacggaagaguguacuugcggcuuugcuucuaacaagacaaucgaaugugccugccgggacaauuccuacaccgcgaaacgcccuuucgucaagcugaacguggagauugauacugccgaaauacgauuaaugugcacagacaccuaucuggauacgccaagacccgacgauggcagcaucaccgggccuugugagucgaacggagacaaagguucuggcgggauuaagggaggcuuuguacaucaaaggauggcauccaaaaucggucggugguacucacguacaaugaguaagacugagcgcauggggaugggccucuauguuaaauacgacggagauccaugggcugacagcgaugcccuugcuuucuccggcgugauggucucuaugaaggaacccgggugguacagcuuuggauucgagauaaaggacaaaaagugcgaugugccguguauugguaucgaaauggugcacgacggcgggaaagagaccuggcauucagccgcaacagccaucuauugccugaugggaaguggccaguugcuaugggauacugucaccgguguugacauggcucuguga

SEQ ID NO: 157377 - RNA, 1401 nt, Artificial Sequence; identical to SEQ ID NO: 156936
  derived and/or modified CDS sequence (opt3) from neuraminidase__InfluenzaB__AGX18461

SEQ ID NO: 157378 - RNA, 1401 nt, Artificial Sequence
  derived and/or modified CDS sequence (opt3) from neuraminidase__InfluenzaB__AGX18472
augcugcccagcaccauccagacacucacucuuuuccugacguccggcgggguguuguuaucucuguacgucucagccagucuaagcuaucuccuguacuccgacauucuucugaaguuuucuccuaccgagauaacagcuccaacuaugccguuggauugcgcaaacgccucgaauguucacgcggugaaccauucagcuaccaaaggaguaacaccccuccugccugaaccagaguggaccuaucccagacugagcuguccugguaguacuuuccaaaaggcccucuuaaucuccccacacagguuuggcgaaacaaaaggaaauucugcaccccugauuauccgggagccuuucauugccugcgggccaaacgaauguaagcauuuugcucuuacccacuacgcagcccagccgggcgguuauuacaaugggacgcgcggagaccgaaacaaauugcgucaucugaucagcgugaagcuaggcaagauacccacugucgaaaauuccaucuuccacauggcugccuggucaggcagugcgugccacgaugggaaagaguggaccuauauuggaguggacgguccugauaacaaugcacuccugaagaucaaauacggcgaggccuacacagacacuuaucauagcuacgcuaacaauauucuuagaacccaggagucugccuguaacugcaucgggggaaauuguuaucugaugauaacagauggcuccgcaucagguguuagcgaaugcagguuuuugaagauucgggaggggcgcaucauuaaagagaucuucccaaccggaagagugaagcacacggaagaguguacuugcggcuuugcuaguaacaagacaaucgaaugugccugcagggacaauucuuacaccgcgaaacggcccuucgucaagcucaacguggagacugauacagccgaaauucgccugaugugcaccgacacguauuuagauaccccucgaccagacgauggcuccauaacagggcccugugagagcaacggagacaaagguucgggcgggaucaagggaggcuuuguacaucagagaauggcaucuaaaauugguaggugguacucccggacuaugucaaagaccgagcguauggggaugggccuguauguuaaauacgacggagauccgugggcugacagugaugcccucgcuuucagcggcgugauggucuccaugaaggaaccugggugguacucuuuuggauucgagaucaaggacaaaaagugcgaugugcccuguauagguauugaaauggugcacgacggcgggaaagagacauggcacagcgccgcaacugccaucuauugccuuaugggaucaggccaacuguugugggauaccgucacagguguugacauggcucuauga

SEQ ID NO: 157379 - RNA, 1401 nt, Artificial Sequence; identical to SEQ ID NO: 156936
  derived and/or modified CDS sequence (opt3) from neuraminidase__InfluenzaB__AGX18483

SEQ ID NO: 157380 - RNA, 1401 nt, Artificial Sequence; identical to SEQ ID NO: 156683
  derived and/or modified CDS sequence (opt3) from neuraminidase__InfluenzaB__AGX18494

SEQ ID NO: 157381 - RNA, 1401 nt, Artificial Sequence
  derived and/or modified CDS sequence (opt3) from neuraminidase__InfluenzaB__AGX18505
augcugcccagcaccauccagacacucacucuuuuccugacguccggcgggguguuguuaucucuguacgucucagccagucuaagcuaucuccuguacuccgacauucuucugaaguuuucuccuaccgagauaacagcuccaacuaugccguuggauugcgcaaacgccucgaauguucaagcggugaacagaucagcuaccaaaggaguaacacuccugcugcccgaaccugaguggaccuauccaaggcucagcugucccgguaguacuuuccagaaggccuuacugaucuccccucaccgguuuggcgaaacaaaaggaaauucugcaccacuuauuauccgcgagcccuucauugccugcgggccuaacgaauguaagcauuuugcuuugacccacuacgcagcccagccaggcgguuauuacaaugggacgcgaggagaccguaacaaacugagacaucuaaucagcgugaagcucggcaagauaccgacugucgaaaauuccaucuuccacauggcugccuggucaggcagugcgugccaugaugggaaagaguggaccuauauuggaguggacggucccgauaacaaugcacugcuuaagaucaaauacggcgaggccuacacagacacuuaucacagcuacgcuaacaagauucugaggacccaggagucugccuguaauugcaucgggggaaacuguuauuugaugauaacagauggcuccgcaucagguguuagcgaaugccgguuucucaaaauucgcgaggggagaaucauuaaggagaucuucccuaccggaagggugaagcacacggaagaguguacuugcggcuuugcuaguaauaaaacaaucgaaugugccugccgggacaacucuuacaccgcgaagcgcccauucgucaaacugaauguggagacugauacagccgaaauucgauuaaugugcaccgacacguaucuggauacccccagaccugacgauggcuccauaacagggccaugugagagcaacggagacaaggguucgggcgggaucaaaggaggcuuuguacaucaaaggauggcaucuaagauuggucggugguacucccguacuaucucaaaaaccgagcgcauggggaugggccucuauguuaaguacgacggagaucccugggcugacagugaugcccuugcuuucagcggcgugauggucuccaugaaggaaccggggugguacucuuuuggauucgagauaaaagacaagaaaugcgaugugccuuguauugguaucgaaauggugcacgacggcgggaaggagacauggcauagcgccgcaacugccaucuauugccugaugggaucaggccaguugcuaugggauaccgucacagguguugacauggcucuguga

SEQ ID NO: 157382 - RNA, 1401 nt, Artificial Sequence
  derived and/or modified CDS sequence (opt3) from neuraminidase__InfluenzaB__AGX18516
augcugcccagcaccauccagacacucacucuuuuccugacguccggcgggguguuguuaucucuguacgucucagccagucuaagcuaucuccuguacuccgacauucuucugaaguuuucuccuaccgagauaacagcuccaacuaugccguuggauugcgcaaacgccucgaauguucaagcggugaacagaucagcuaccaaaggaguaacacuccugcugcccgaaccugaguggaccuauccaaggcucagcugucccgguaguacuuuccagaaggccuuacugaucuccccucaccgguuuggcgaaacaaaaggaaauucugcaccacuuauuauccgcgagcccuucauugccugcgggccuaacgaauguaagcauuuugcuuugacccacuacgcagcccagccaggcgguuauuacaaugggacgcgaggagaccguaacaaacugagacaucuaaucagcgugaagcucggcaagauaccgacugucgaaaauuccaucuuccacauggcugccuggucaggcagugcgugccaugaugggaaagaguggaccuauauuggaguggacggucccgauaacaaugcacugcuuaagaucaaauacggcgaggccuacacagacacuuaucacagcuacgcuaacaagauucugaggacccaggagucugccuguaauugcaucgggggaaacuguuauuugaugauaacagauggcuccgcaucagguguuagcgaaugccgguuucucaaaauucgcgaggggagaaucauuaaggagaucuucccuaccggaagggugaagcacacggaagaguguacuugcggcuuugcuaguaauaaaacaaucgaaugugccugccgggacaacucuuacaccgcgaagcgcccauucgucaaacugaauguggagacugauacagccgaaauucgauuaaugugcaccgacacguaucuggauacccccagaccugacgauggcuccauaacagggccaugugagagcaacggagacaaggguucgggcgggaucaaaggaggcuuuguacaucaaaggauggcaucuaagauuggucggugguacucccguacuaucucaaaaaccgagcgcauggggaugggccucuauguuaaguacgacggagaucccugggcugacagugaugcccuugcuuucagcggcgugauggucuccaugaaggaaccggggugguacucuuuuggauucgagauaaaagacaagaaaugcgaugugccuuguauugguaucgaaauggugcacggcgggggaaaggagacauggcauagcgccgcaacugccaucuauugccugaugggcucaggucaguugcuaugggacaccgucacagggguugauauggcucuguga

SEQ ID NO: 157383 - RNA, 1401 nt, Artificial Sequence; identical to SEQ ID NO: 156683
  derived and/or modified CDS sequence (opt3) from neuraminidase__InfluenzaB__AGX18527

SEQ ID NO: 157384 - RNA, 1401 nt, Artificial Sequence; identical to SEQ ID NO: 156683
  derived and/or modified CDS sequence (opt3) from neuraminidase__InfluenzaB__AGX18538

SEQ ID NO: 157385 - RNA, 1401 nt, Artificial Sequence; identical to SEQ ID NO: 156683
  derived and/or modified CDS sequence (opt3) from neuraminidase__InfluenzaB__AGX18549

SEQ ID NO: 157386 - RNA, 1401 nt, Artificial Sequence; identical to SEQ ID NO: 156683
  derived and/or modified CDS sequence (opt3) from neuraminidase__InfluenzaB__AGX18560

SEQ ID NO: 157387 - RNA, 1401 nt, Artificial Sequence; identical to SEQ ID NO: 156683
  derived and/or modified CDS sequence (opt3) from neuraminidase__InfluenzaB__AGX18571

SEQ ID NO: 157388 - RNA, 1401 nt, Artificial Sequence
  derived and/or modified CDS sequence (opt3) from neuraminidase__InfluenzaB__AGX18582
augcugcccagcaccauccagacacucacucuuuuccugacguccggcgggguguuguuaucucuguacguccuagccucacucaguuaucugcuuuacagcgacauucuguugaaguuuuccccuaccgagauaacagcuccaacuaugccgcucgauugcgcaaacgccucuaauguucacgcggugaacagaucggcuaccaaaggaguaacacugcugcuccccgaaccugagugggccuauccaagguuaucaugucccgguagcaccuuccaaaaggcacugcuuaucaguccucaucgguuuggcgaaacuaaaggaaauuccgccccauugauuauccgcgagcccuucauugcuugcgggccuaacgaauguaagcacuuugcacugacacauuacgccgcucagccaggcgguuauuacaaugggacccgaggagaccguaacaaacuaagacaccucaucucugugaagcugggcaagauaccgacggucgagaauagcaucuuccauauggccgcgugguccggcucagcaugccacgaugggaaagaguggacuuauauuggaguggacggucccgauaacaaugcccuucugaagaucaaauacggcgaggcuuacaccgacacauaucacaguuacgccaacaauauuuugaggacucaggaaagcgcauguaacugcaucgggggaaauuguuaucucaugauaaccgauggcucugcuuccgguguuucagaaugccgguuucugaagauucgcgaggggagaaucauuaaagagaucuucccuacaggaagggugaagcauaccgaagaguguacgugcggcuuugccagcaacaagacuaucgaaugugcgugccgggacaauaguuacacagccaaacgcccauucgucaaguuaaacguggagaccgauacugcagaaauucgacugaugugcacagacaccuaucucgauacgcccagaccugacgauggcucuauaaccgggccaugugaguccaacggagacaaagguagcggcgggaucaagggaggcuuuguacaccagaggauggcuucgaaaauuggucggugguacucucguacaauguccaagacugagcgcauggggaugggccuuuauguuaaauacgacggagaucccugggccgacucagaugcucuggccuucaguggcgugauggucagcaugaaggaaccggggugguacuccuuuggauucgagaucaaggacaaaaagugcgaugugccuuguauagguauugaaauggugcaugacggcgggaaagagaccuggcacucugcagccacagcuaucuauugcuugaugggaagcggccaacuacugugggauacugucaccgguguugacauggcgcucuga

SEQ ID NO: 157389 - RNA, 1401 nt, Artificial Sequence; identical to SEQ ID NO: 156683
  derived and/or modified CDS sequence (opt3) from neuraminidase__InfluenzaB__AGX18593

SEQ ID NO: 157390 - RNA, 1401 nt, Artificial Sequence; identical to SEQ ID NO: 156683
  derived and/or modified CDS sequence (opt3) from neuraminidase__InfluenzaB__AGX18604

SEQ ID NO: 157391 - RNA, 1401 nt, Artificial Sequence
  derived and/or modified CDS sequence (opt3) from neuraminidase__InfluenzaB__AGX18615
augcugcccagcaccauccagacacucacucuuuuccugacguccggcgggguguuguuaucucuguacgucucagccagucuaagcuaucuccuguacuccgacauucuucugaaguuuucuccuaccgagauaacagcuccaacuaugccguuggauugcgcaaacgccucgaauguucaagcggugaacagaucagcuaccaaaggaguaacacuccugcugcccgaaccugaguggaccuauccaaggcucagcugucccgguaguacuuuccagaaggccuuacugaucuccccucaccgguuuggcgaaacaaaaggaaauucugcaccacuuauuauccgcgagcccuucauugccugcgggccuaacgaauguaagcauuuugcuuugacccacuacgcagcccagccaggcgguuauuacaaugggacgcgaggagaccguaacaaacugagacaucuaaucagcgugaagcucggcaagauaccgacugucgaaaauuccaucuuccacauggcugccuggucaggcagugcgugccaugaugggaaagaguggaccuauauuggaguggacggucccgauaacaaugcacugcuuaagaucaaauacggcgaggccuacacagacacuuaucacagcuacgcuaacaagauucugaggacccaggagucugccuguaauugcaucgggggaaacuguuauuugaugauaacagauggcuccgcaucagguguuagcgaaugccgguuucucaaaauucgcgaggggagaaucauuaaggagaucuucccuaccggaagggugaagcacacggaagaguguacuugcggcuuugcuaguaauaaaacaaucgaaugugccugccgggacaacucuuacaccgcgaagcgcccauucgucaaacugaauguggagacugauacagccgaaauucgauuaaugugcaccgacacguaucuggauacccccagaccugacgauggcuccauaacagggccaugugagagcaacggaaacaaggguucgggcgggaucaaaggaggcuuuguacaucaaaggauggcaucuaagauuggucggugguacucccguacuaugucaaaaaccgagcgcauggggaugggccucuauguuaaguacgacggagaccccugggcugauagugacgcccuugcuuucagcggcgugauggucuccaugaaggaaccggggugguacucuuuuggauucgagaucaaagauaagaaaugcgacgugccuuguauagguauugaaauggugcacgauggcgggaaggagacauggcauagcgccgcaacugccaucuauugccugaugggaucaggccaguugcuaugggacaccgucacagguguugauauggcucuguga

SEQ ID NO: 157392 - RNA, 1401 nt, Artificial Sequence
  derived and/or modified CDS sequence (opt3) from neuraminidase__InfluenzaB__AGX18626
augcugcccagcaccauccagacacucacucuuuuccugacguccggcgggguguuguuaucucuguacgucucagccagucuaagcuaucuccuguacuccgacauucuucugaaguuuucuccuaccgagauaacagcuccaacuaugccguuggauugcgcaaacgccucgaauguucaagcggugaacagaucagcuaccaaaggaguaacacuccugcugcccgaaccugaguggaccuauccaaggcucagcugucccgguaguacuuuccagaaggccuuacugaucuccccucaccgguuuggcgaaacaaaaggaaauucugcaccacuuauuuugcgcgagcccuucaucgccugcgggccuaacgaauguaagcauuuugcucugacccacuacgcagcccagccaggcgguuauuacaaugggacgcgaggagaccguaacaaacuaagacaucucauuagcgugaagcugggcaagaucccgacugucgaaaauuccauauuccacauggcugccuggucaggcagugcgugccaugaugggaaagaguggaccuauaucggaguggacggucccgauaacaaugcacuucugaagauuaaauacggcgaggccuacacagacacuuaucacagcuacgcuaacaagaucuugaggacccaggagucugccuguaauugcauugggggaaacuguuaucucaugaucacagauggcuccgcaucagguguuagcgaaugccgguuucugaaaauacgcgaggggagaauuaucaaggagauuuucccuaccggaagggugaagcacacggaagaguguacuugcggcuuugcuaguaauaaaacaaucgaaugugccugccgggacaacucuuacaccgcgaagcgcccauucgucaaauuaaauguggagacugauacagccgaaauccgacugaugugcaccgacacguaucucgauacccccagaccugacgauggcuccauuacagggccaugugagagcaacggagacaaggguucgggcgggauaaaaggaggcuuuguacaucaaaggauggcaucuaagaucggucggugguacucccguacuaugucaaaaaccgagcgcauggggaugggccuuuauguuaaguacgacggagaucccugggcugacagugaugcccuggcuuucagcggcgugauggucuccaugaaggaaccggggugguacucuuuuggauucgagauuaaagacaagaaaugcgaugugccuuguaucgguauagaaauggugcacgacggcgggaaggagacauggcauagcgccgcaacugccauuuauugcuugaugggaucaggccagcuacugugggauaccgucacagguguugacauggcucucuga

SEQ ID NO: 157393 - RNA, 1401 nt, Artificial Sequence; identical to SEQ ID NO: 156683
  derived and/or modified CDS sequence (opt3) from neuraminidase__InfluenzaB__AGX18637

SEQ ID NO: 157394 - RNA, 1401 nt, Artificial Sequence; identical to SEQ ID NO: 156683
  derived and/or modified CDS sequence (opt3) from neuraminidase__InfluenzaB__AGX18648

SEQ ID NO: 157395 - RNA, 1401 nt, Artificial Sequence; identical to SEQ ID NO: 156683
  derived and/or modified CDS sequence (opt3) from neuraminidase__InfluenzaB__AGX18659

SEQ ID NO: 157396 - RNA, 1401 nt, Artificial Sequence; identical to SEQ ID NO: 156683
  derived and/or modified CDS sequence (opt3) from neuraminidase__InfluenzaB__AGX18670

SEQ ID NO: 157397 - RNA, 1401 nt, Artificial Sequence
  derived and/or modified CDS sequence (opt3) from neuraminidase__InfluenzaB__AGX18681
augcugcccagcaccauccagacacucacucuuuuccugacguccggcgggguguuguuaucucuguacgucucagccagucuaagcuaucuccuguacuccgacauucuucugaaguuuucuccuaccgagauaacagcuccaacuaugccguuggauugcgcaaacgccucgaauguucaagcggugaacagaucagcuaccaaaggaguaacacuccugcugcccgaaccugaguggaccuauccaaggcucagcugucccgguaguacuuuccagaaggccuuacugaucuccccucaccgguuuggcgaaacaaaaggaaauucugcaccacuuauugugcgcgagcccuucaucgccugcgggccuaacgaauguaagcauuuugcuuugacccacuacgcagcccagccaggcgguuauuacaaugggacgcgaggagaccguaacaaacugagacaucuaauuagcgucaagcucggcaagaucccgacuguggaaaauuccauauuccacauggcugccuggucaggcagugcgugccaugaugggaaagaguggaccuauaucggaguugacggucccgauaacaaugcacugcuuaagauuaaauacggcgaggccuacacagacacuuaucacagcuacgcuaacaagauccugaggacccaggagucugccuguaauugcauugggggaaacuguuauuugaugaucacagauggcuccgcaucaggugugagcgaaugccgguuucucaaaauacgcgaggggagaauuaucaaggagauuuucccuaccggaagggucaagcacacggaagaguguacuugcggcuuugcuaguaauaaaacaaucgaaugugccugccgggacaacucuuacaccgcgaagcgcccauucgugaaacugaauguagagacugauacagccgaaauccgauuaaugugcaccgacacguaucuggauacccccagaccugacgauggcuccauuacagggccaugugagagcaacggagacaaggguucgggcgggauaaaaggaggcuuuguucaucaaaggauggcaucuaagaucggucggugguacucccguacuaugucaaaaaccgagcgcauggggaugggccucuaugugaaguacgacggagaucccugggcugacagugaugcccuugcuuucagcggcgucaugguguccaugaaggaaccggggugguacucuuuuggauucgagauuaaagacaagaaaugcgaugugccuuguaucgguauagaaaugguccacgacggcgggaaggagacauggcauagcgccgcaacugccauuuauugccugaugggaucaggccaguugcuaugggauaccguuacagguguggacauggcucuguga

SEQ ID NO: 157398 - RNA, 1401 nt, Artificial Sequence; identical to SEQ ID NO: 156683
  derived and/or modified CDS sequence (opt3) from neuraminidase__InfluenzaB__AGX18692

SEQ ID NO: 157399 - RNA, 1401 nt, Artificial Sequence
  derived and/or modified CDS sequence (opt3) from neuraminidase__InfluenzaB__AGX18703
augcugcccagcaccauccagacacucacucuuuuccugacguccggcgggguguuguuaucucuguacgucucagccagucuaagcuaucuccuguacuccgacauucuucugaaguuuccuucuaccgagauaacagcuccaacuaugccguuggauugcgcaaacgccucgaauguucaagcggugaaccucucagcuaccaaaggaguaacacugcugcuccccgaaccugaguggaccuauccaagauuaagcugucccgguaguacuuuccagaaggcccugcuuaucuccccucacagguuuggcgaaacaaaaggaaauucugcaccauugauuauccgggagcccuucauugccugcgggccuaaggaauguaaacauuuugcucugacccacuacgcagcccagccaggcgguuauuacaacgggacgcgcggagaccgaaauaagcuacgucaucucaucagcgugaagcugggcaaaauaccgacugucgagaacuccaucuuccacauggcugccuggucaggcagugcgugccaugaugggaaggaguggaccuauauuggaguggacggucccgauaauaacgcacuucugaaaaucaaguacggcgaagccuacacagacacuuaucacagcuacgcuaauaacauuuugagaacccaggagucugccuguaauugcaucgggggaaacuguuaucucaugauaacagauggcuccgcaucagguguuagcgaaugcagguuucugaaaauucgggaggggcgcaucauuaaggagaucuucccuaccggaagaaucaagcacacggaagaguguacuugcggcuuugcuaguaauaaaacaauugaaugugccugcagggacaacucuuacaccgcgaagcggccauucgugaaauuaaaugucgagacugauacagccgaaauacgccugaugugcaccgagacguaucucgacacaccccgaccugaugacggcuccaucaccgggccaugugagagcaacggagauaaggguucgggcgggauuaaaggaggcuuugugcaucaaagaauggcaucuaagaucgguaggugguacucccggacuaugucaaaaaccgaacguauggggaugggccuuuauguaaaguacgacggagaccccugggcugauagugacgcccuggcuuucagcggcguuaugguguccauggaggaaccggggugguacucuuuuggauucgagauaaaggauaaaaagugcgacgucccuuguauugguaucgaaauggugcacgauggcgggaaagagacauggcauagcgccgcaacugccaucuauugcuugaugggaucaggccagcuacugugggacaccgugacaggugucaacauggcucucuga

SEQ ID NO: 157400 - RNA, 1401 nt, Artificial Sequence; identical to SEQ ID NO: 156683
  derived and/or modified CDS sequence (opt3) from neuraminidase__InfluenzaB__AGX18714

SEQ ID NO: 157401 - RNA, 1401 nt, Artificial Sequence; identical to SEQ ID NO: 156683
  derived and/or modified CDS sequence (opt3) from neuraminidase__InfluenzaB__AGX18725

SEQ ID NO: 157402 - RNA, 1401 nt, Artificial Sequence
  derived and/or modified CDS sequence (opt3) from neuraminidase__InfluenzaB__AGX18736
augcugcccagcaccauccagacacucacucuuuuccugacguccggcgggguguuguuaucucuguacgucucagccagucuaagcuaucuccuguacuccgacauucuucugaaguuuucuccuaccgagauaacagcuccaacuaugccguuggauugcgcaaacgccucgaauguucaagcggugaacagaucagcuaccaaaggaguaacacuccugcugcccgaaccugaguggaccuauccaaggcucagcugucccgguaguacuuuccagaaggccuuacugaucuccccucaccgguuuggcgaaacaaaaggaaauucugcaccacuuauuauccgcgagcccuucauugccugcgggccuaacgaauguaagcauuuugcuuugacccacuacgcagcccagccaggcgguuauuacaaugggacgggaggcgaccgaaacaaacugcgucaucuaaucagcgugaagcucggcaagauaccgacugucgaaaauuccaucuuccacauggcugccuggucagggagugcgugccaugauggaaaagaguggaccuauauugguguggacggccccgauaacaaugcacugcuuaagaucaaauacggggaggccuacacagacacuuaucacagcuacgcuaacaagauucugagaacccaggagucugccuguaauugcaucggaggcaacuguuauuugaugauaacagaugguuccgcaucagggguuagcgaaugcagguuucucaaaauucgggagggacgcaucauuaaggagaucuucccuaccggcagagugaagcacacggaagaguguacuugcggcuuugcuaguaauaaaacaaucgaaugugccugcagggacaacucuuacaccgcgaagcggccauucgucaaacugaauguggagacugauacagccgaaauucgcuuaaugugcaccgacacguaucuggauacaccccgaccugacgauggguccauaaccggaccaugugagagcaacggugacaagggcucugggggaaucaaaggcgguuuuguacaucaaagaauggcaucgaagauugggaggugguacucccggacuaugucaaaaaccgagcguaugggcaugggacucuauguuaaguacgacggcgaucccugggcugacagugaugcccuugcuuucagcggggugauggucuccaugaaggaaccgggaugguacucuuuugguuucgagaucaaagacaagaaaugcgaugugccuuguauaggcauugaaauggugcacgacgggggaaaggagacauggcauagcgccgcaacugccaucuauugccugaugggcucaggucaguugcuaugggauaccgucacagggguugacauggcucuguga

SEQ ID NO: 157403 - RNA, 1401 nt, Artificial Sequence; identical to SEQ ID NO: 156683
  derived and/or modified CDS sequence (opt3) from neuraminidase__InfluenzaB__AGX18758

SEQ ID NO: 157404 - RNA, 1401 nt, Artificial Sequence; identical to SEQ ID NO: 156683
  derived and/or modified CDS sequence (opt3) from neuraminidase__InfluenzaB__AGX18769

SEQ ID NO: 157405 - RNA, 1401 nt, Artificial Sequence; identical to SEQ ID NO: 157142
  derived and/or modified CDS sequence (opt3) from neuraminidase__InfluenzaB__AGX18780

SEQ ID NO: 157406 - RNA, 1401 nt, Artificial Sequence; identical to SEQ ID NO: 156683
  derived and/or modified CDS sequence (opt3) from neuraminidase__InfluenzaB__AGX18791

SEQ ID NO: 157407 - RNA, 1401 nt, Artificial Sequence; identical to SEQ ID NO: 156683
  derived and/or modified CDS sequence (opt3) from neuraminidase__InfluenzaB__AGX18802

SEQ ID NO: 157408 - RNA, 1401 nt, Artificial Sequence
  derived and/or modified CDS sequence (opt3) from neuraminidase__InfluenzaB__AGX18813
augcugcccagcaccauccagacacucacucuuuuccugacguccggcgggguguuguuaucucuguacgucucagccagucuaagcuaucuccuguacuccgacauucuucugaaguuuccuucuaccgagauaacagcuccaacuaugccguuggauugcgcaaacgccucgaauguucaagcggugaacagaucagcuaccaaaggaguaacacuccugcugcccgaaccugaguggaccuauccaaggcucagcugucccgguaguacuuuccagaaggccuuacugaucuccccucaccgguuuggcgaaacaaaaggaaauucugcaccacuuauuauccgcgagcccuucauugccugcgggccuaaggaauguaaacauuuugcuuugacccacuacgcagcccagccaggcgguuauuacaacgggacgcgaggagaccguaauaagcugagacaucuaaucagcgugaagcucggcaaaauaccgacugucgagaacuccaucuuccacauggcugccuggucaggcagugcgugccaugaugggaaggaguggaccuauauuggaguggacggucccgauaauaacgcacugcuuaaaaucaaguacggcgaagccuacacagacacuuaucacagcuacgcuaauaacauucugaggacccaggagucugccuguaauugcaucgggggaaacuguuauuugaugauaacagauggcuccgcaucagguguuagcgaaugccgguuucucaaaauucgcgaggggagaaucauuaaggagaucuucccuaccggaaggaucaagcacacggaagaguguacuugcggcuuugcuaguaauaaaacaauugaaugugccugccgggacaacucuuacaccgcgaagcgcccauucgugaaacugaaugucgagacugauacagccgaaauacgauuaaugugcaccgagacguaucuggacacccccagaccugaugacggcuccaucacagggccaugugagagcaacggagauaaggguucgggcgggauuaaaggaggcuuugugcaucaaaggauggcaucuaagaucggucggugguacucccguacuaugucaaaaaccgaacgcauggggaugggccucuauguaaaguacgacggagaccccugggcugauagugacgcccuuguuuucagcggcgugauggucuccauggaggaaccggggugguacucuuuuggauucgagauaaaggauaaaaagugcgacgugccuuguauugguaucgaaauggugcacgauggcgggaaagagacauggcauagcgcugccacugcaaucuauugccugaugggaucaggccaguugcuaugggacaccgucacagguguuaacauggcccuguga

SEQ ID NO: 157409 - RNA, 1401 nt, Artificial Sequence; identical to SEQ ID NO: 157142
  derived and/or modified CDS sequence (opt3) from neuraminidase__InfluenzaB__AGX18824

SEQ ID NO: 157410 - RNA, 1401 nt, Artificial Sequence
  derived and/or modified CDS sequence (opt3) from neuraminidase__InfluenzaB__AGX18846
augcugcccagcaccauccagacacucacucuuuuccugacguccggcgggguguuguuaucucuguacgucucagccagucuaagcuaucuccuguacuccgacauucuucugaaguuuucuccuaccgagauaacagcuccaacuaugccguuggauugcgcaaacgccucgaauguucaagcggugaacagaucagcuaccaaaggaguaacacuccugcugagcgaacccgaguggaccuauccuaggcucaguuguccagguuccacuuuccagaaggccuuacugaucucuccccaccgguuuggcgaaacaaaagggaauagcgcaccucuuauuauccgcgagccauucauugccugcggacccaacgaauguaagcauuuugcuuugacccacuacgcagcccagccuggcgguuauuacaaugggacgcgaggagaccguaacaaacugagacaucuaaucuccgugaagcucggcaagauaccaacugucgaaaauucaaucuuccacauggcugccuggaguggcagcgcgugccaugaugggaaagaguggaccuauauuggaguggacgguccggauaacaaugcacugcuuaagaucaaauacggcgaggccuacacagacacuuaucacucuuacgcuaacaagauucugaggacccaggaguccgccuguaauugcaucgggggaaacuguuauuugaugauaacagauggcucagcaagcgguguuagugaaugccgguuucucaaaauucgcgaggggagaaucauuaaggagaucuuccccaccggaagggugaagcacacggaagaguguacuugcggcuuugcuucuaauaaaacaaucgaaugugccugccgggacaacuccuacaccgcgaagcgcccuuucgucaaacugaauguggagacugauacagccgaaauucgauuaaugugcaccgacacguaucuggauaccccaagacccgacgauggcagcauaacagggccuugugagucgaacggagacaaggguucuggcgggaucaaaggaggcuuuguacaucaaaggauggcauccaagauuggucggugguacucacguacuaugaguaaaaccgagcgcauggggaugggccucuauguuaaguacgacggagauccaugggcugacagcgaugcccuugcuuucuccggcgugauggucucuaugaaggaacccgggugguacagcuuuggauucgagaucaaagacaagaaaugcgaugugccguguauagguauugaaauggugcacgacggcgggaaggagacauggcauucagccgcaacugccaucuauugccugaugggaaguggccaguugcuaugggauaccgucacagguguugacauggcucuguga

SEQ ID NO: 157411 - RNA, 1401 nt, Artificial Sequence; identical to SEQ ID NO: 156683
  derived and/or modified CDS sequence (opt3) from neuraminidase__InfluenzaB__AGX18857

SEQ ID NO: 157412 - RNA, 1401 nt, Artificial Sequence; identical to SEQ ID NO: 157410
  derived and/or modified CDS sequence (opt3) from neuraminidase__InfluenzaB__AGX18868

SEQ ID NO: 157413 - RNA, 1401 nt, Artificial Sequence; identical to SEQ ID NO: 157410
  derived and/or modified CDS sequence (opt3) from neuraminidase__InfluenzaB__AGX18879

SEQ ID NO: 157414 - RNA, 1401 nt, Artificial Sequence
  derived and/or modified CDS sequence (opt3) from neuraminidase__InfluenzaB__AGX18890
augcugcccagcaccauccagacacucacucuuuuccugacguccggcgggguguuguuaucucuguacgucucagccagucuaagcuaucuccuguacuccgacauucuucugaaguuuccuucuaccgagauaacagcuccaacuaugccguuggauugcgcaaacgccucgaauguucaagcggugaacagaucagcuaccaaaggaguaacacuccugcugcccgaaccugaguggaccuauccaaggcucagcugucccgguaguacuuuccagaaggccuuacugaucuccccucaccgguuuggcgaaacaaaaggaaauucugcaccacuuauuauccgcgagcccuucauugccugcgggccuaaggaauguaaacauuuugcuuugacccacuacgcagcccagccaggcgguuauuacaacgggacgcgaggagaccguaauaagcugagacaucuaaucagcgugaagcucggcaaaauaccgacugucgagaacuccaucuuccacauggcugccuggucaggcagugcgugccaugaugggaaggaguggaccuauauuggaguggacggucccgauaauaacgcacugcuuaaaaucaaguacggcgaagccuacacagacacuuaucacagcuacgcuaauaacauucugaggacccaggagucugccuguaauugcaucgggggaaacuguuauuugaugauaacagauggcuccgcaucagguguuagcgaaugccgguuucucaaaauucgcgaggggagaaucauuaaggagaucuucccuaccggaaggaucaagcacacggaagaguguacuugcggcuuugcuaguaauaaaacaauugaaugugccugccgggacaacucuuacaccgcgaagcgcccauucgugaaacugaaugucgagacugauacagccgaaauacgauuaaugugcaccgagacguaucuggacacccccagaccugaugacggcuccaucacagggccaugugagagcaacggagauaaggguucgggcgggauuaaaggaggcuuugugcaucaaaggauggcaucuaagaucggucggugguacucccguacuaugucaaaaaccgaacgcauggggaugggccucuauguaaaguacgacggagaccccugggcugauagugacgcccuugcuuucagcggcguuaugguguccauggaggaaccggggugguacucuuuuggauucgagauaaaggauaaaaagugcgacgucccuuguauugguaucgaaauggugcacgauggcgggaaagagacauggcauagcgccgcaacuaccaucuauugccugaugggaucaggccaguugcuaugggacacagugaccggugucaacauggcccuguga

SEQ ID NO: 157415 - RNA, 1401 nt, Artificial Sequence; identical to SEQ ID NO: 156683
  derived and/or modified CDS sequence (opt3) from neuraminidase__InfluenzaB__AGX18912

SEQ ID NO: 157416 - RNA, 1401 nt, Artificial Sequence
  derived and/or modified CDS sequence (opt3) from neuraminidase__InfluenzaB__AGX18923
augcugcccagcaccauccagacacucacucuuuuccugacguccggcgggguguuguuaucucuguacgucucagccagucuaagcuaucuccuguacuccgacauucuucugaaguuuucuccuaccgagauaacagcuccaacuaugccguuggauugcgcaaacgccucgaauguucaagcggugaacagaucagcuaccaaaggaguaacacuccugcugcccgaaccugaguggaccuauccaaggcucagcugucccgguaguacuuuccagaaggccuuacugaucuccccucaccgguuuggcgaaacaaaaggaaauucugcaccacuuauuauccgcgagcccuucauugccugcgggccuaacgaauguaagcauuuugcuuugacccacuacgcagcccagccaggcgguuauuacaaucgaacgcguggggacagaaacaaacugaggcaucuaaucagcgugaagcucggaaagauaccgacugucgaaaauuccaucuuccacauggcugccuggucaggcagugcgugccaugauggcaaagaguggauuuauaucgggguggacggacccgauaacaaugcacugcuuaagauuaaauacggugaggccuacaccgacacauaucacagcuacgcuaacaagauccugcggacucaggagucugccuguaauugcauaggcgggaacuguuauuugaugauuaccgauggauccgcaucaggcguuagcgaaugccgcuuucucaaaaucagagaggguaggauuaucaaggagaucuucccuacagggcgggugaagcacaccgaagaguguacgugcggauuugcuaguaauaaaacuauugaaugugccugccgcgacaacucuuacacagcgaagcgaccauucgucaaacugaauguggagaccgauacugccgaaauaagauuaaugugcacagacaccuaucuggauacgcccaggccugacgauggcuccaucaccggcccaugugagagcaacggggacaagggaucggguggcauuaaagggggauuuguacaucaacggauggcaucuaagaucggccguugguacucccgcacaaugucaaaaacugagagaauggguauggggcucuauguuaaguacgacggcgaucccugggcugacagugaugcccuugcuuucagcggagugauggucuccaugaaggaaccgggcugguacucuuuuggguucgagauaaaagacaagaaaugcgaugugccuuguauuggaaucgaaauggugcacgacgguggcaaggagaccuggcauagcgccgcaacagccaucuauugccugauggggucaggacaguugcuaugggauacugucaccggcguugacauggcucuguga

SEQ ID NO: 157417 - RNA, 1401 nt, Artificial Sequence; identical to SEQ ID NO: 156683
  derived and/or modified CDS sequence (opt3) from neuraminidase__InfluenzaB__AGX18934

SEQ ID NO: 157418 - RNA, 1401 nt, Artificial Sequence
  derived and/or modified CDS sequence (opt3) from neuraminidase__InfluenzaB__AGX18956
augcugcccagcaccauccagacacucacucuuuuccugacguccggcgggguguuguuaucucuguacgucucagccagucuaagcuaucuccuguacuccgacauucuucugaaguuuucuccuaccgagauaacagcuccaacuaugccguuggauugcgcaaacgccucgaauguucaagcggugaacagaucagcuaccaaaggaguaacacuccugcugcccgaaccugaguggaccuauccaaggcucagcugucccgguaguacuuuccagaaggccuuacugaucuccccucaccgguuuggcgaaacaaaaggaaauucugcaccacuuauuauccgcgagcccuucauugccugcgggccuaacgaauguaagcauuuugcuuugacccacuacgcagcccagccaggcgguuauuacaaugggacgcgaggagaccguaacaaacugagacaucuaaucagcgugaagcucggcaagauaccgacugucgaaaauuccaucuuccacguggcugccuggucaggcagugcgugccaugaugggaaagaguggaccuauauuggaguugacggucccgauaacaaugcacugcuuaagaucaaauacggcgaggccuacacagacacuuaucacagcuacgcuaacaagauucugaggacccaggagucugccuguaauugcaucgggggaaacuguuauuugaugauaacagauggcuccgcaucaggugugagcgaaugccgguuucucaaaauucgcgaggggagaaucauuaaggagaucuucccuaccggaagggucaagcacacggaagaguguacuugcggcuuugcuaguaauaaaacaaucgaaugugccugccgggacaacucuuacaccgcgaagcgcccauucgugaaacugaauguagagacugauacagccgaaauucgauuaaugugcaccgacacguaucuggauacccccagaccugacgauggcuccauaacagggccaugugagagcaacggagacaaggguucgggcgggaucaaaggaggcuuuguucaucaaaggauggcaucuaagauuggucggugguacucccguacuaugucaaaaaccgagcgcauggggaugggccucuaugugaaguacgacggagaucccugggcugacagugaugcccuugcuuucagcggcgucaugguguccaugaaggaaccggggugguacucuuuuggauucgagaucaaagacaagaaaugcgaugugccuuguauagguauugaaaugguccacgacggcgggaaggagacauggcauagcgccgcaacugccaucuauugccugaugggaucaggccaguugcuaugggauaccguuacagguguggacauggcucuguga

SEQ ID NO: 157419 - RNA, 1401 nt, Artificial Sequence
  derived and/or modified CDS sequence (opt3) from neuraminidase__InfluenzaB__AGX18967
augcugcccagcaccauccagacacucacucuuuuccugacguccggcgggguguuguuaucucuguacgucucagccagucuaagcuaucuccuguacuccgacauucuucugaaguuuucuccuaccgagauaacagcuccaacuaugccguuggauugcgcaaacgccucgaauguucaagcggugaacagaucagcuaccaaaggaguaacaccccuccugccugaaccagaguggaccuaucccaggcugagcuguccugguaguacuuuccagaaggcccucuuaaucuccccacaccgguuuggcgaaacaaaaggaaauucugcaccccugauuauccgcgagccuuucauugccugcgggccaaacgaauguaagcauuuugcucuuacccacuacgcagcccagccgggcgguuauuacaaugggacgcgaggagaccguaacaaauugagacaucugaucagcgugaagcuaggcaagauacccacugucgaaaauuccaucuuccacauggcugccuggucaggcagugcgugccaugaugggaaagaguggaccuauauuggaguggacgguccugauaacaaugcacuccugaagaucaaauacggcgaggccuacacagacacuuaucacagcuacgcuaacaagauucuuaggacccaggagucugccuguaauugcaucgggggaaacuguuaucugaugauaacagauggcuccgcaucagguguuagcgaaugccgguuuuugaaaauucgcgaggggagaaucauuaaggagaucuucccaaccggaagggugaagcacacggaagaguguacuugcggcuuugcuaguaauaaaacaaucgaaugugccugccgggacaacucuuacaccgcgaagcgccccuucgucaaacucaauguggagacugauacagccgaaauucgacugaugugcaccgacacguauuuagauaccccuagaccagacgauggcuccauaacagggcccugugagagcaacggagacaaggguucgggcgggaucaaaggaggcuuuguacaucaaaggauggcaucuaagauuggucggugguacucccguacuaugucaaaaaccgagcgcauggggaugggccuguauguuaaguacgacggagauccgugggcugacagugaugcccucgcuuucagcggcgugauggucuccaugaaggaaccugggugguacucuuuuggauucgagaucaaagacaagaaaugcgaugugcccuguauagguauugaaauggugcacgacggcgggaaggagacauggcauagcgccgcaacugccaucuauugccuuaugggaucaggccagcuguugugggauaccgucacagguguugacauggcucuauga

SEQ ID NO: 157420 - RNA, 1401 nt, Artificial Sequence; identical to SEQ ID NO: 157142
  derived and/or modified CDS sequence (opt3) from neuraminidase__InfluenzaB__AGX18978

SEQ ID NO: 157421 - RNA, 1401 nt, Artificial Sequence
  derived and/or modified CDS sequence (opt3) from neuraminidase__InfluenzaB__AGX18989
augcugcccagcaccauccagacacucacucuuuuccugacguccggcgggguguuguuaucucuguacgucucagccagucuaagcuaucuccuguacuccgacauucuucugaaguuuucuccuaccgagauaacagcuccaacuaugccguuggauuaugcaaacgccucgaauguucaagcggugaacagaucagcuaccaaaggaguaacacuccugcugcccgaaccugaguggaccuacccaaggcucagcugccccgguaguacuuuccagaaggccuuacugaucuccccucaccgguuuggcgaaacaaaaggaaauucugcaccacuuauuauccgcgagcccuucauugccugugggccuaacgaaugcaagcauuuugcuuugacccacuaugcagcccagccaggcgguuacuauaaugggacgcgaggagaccguaacaaacugagacaucuaaucagcgugaagcucggcaagauaccgacugucgaaaauuccaucuuccacauggcugccuggucaggcagugcgugucaugaugggaaagaguggaccuacauuggaguggacggucccgauaacaaugcacugcuuaagaucaaauacggcgaggccuauacagacacuuaccacagcuaugcuaacaagauucugaggacccaggagucugccugcaauuguaucgggggaaacugcuacuugaugauaacagauggcuccgcaucagguguuagcgaaugucgguuucucaaaauucgcgaggggagaaucaccaaggagauuuucccuacgggaagggugaagcacacugaagagugcacauguggcuuugcuaguaauaaaaccaucgaaugcgccugucgggacaacucuuauacugcgaagcgcccauucgucaaacugaauguggagacagauaccgccgaaauccgauuaaugugcacggacaccuaccuggauacacccagaccugacgauggcuccauuacugggccaugcgagagcaacggagacaaggguucgggcgggauaaaaggaggcuuuguacaucaaaggauggcaucuaagaucggucggugguauucccguaccaugucaaaaacagagcgcauggggaugggccucuacguuaaguacgacggagaucccugggcugacagugaugcccuugcuuucagcggcgugauggucuccaugaaggaaccggggugguauucuuuuggauucgagauuaaagacaagaaaugugaugugccuugcaucgguauagaaauggugcacgacggcgggaaggagacuuggcauagcgccgcaaccgccauuuacugucugaugggaucaggccaguugcuaugggauacagucaccgguguugacauggcucuguga

SEQ ID NO: 157422 - RNA, 1401 nt, Artificial Sequence
  derived and/or modified CDS sequence (opt3) from neuraminidase__InfluenzaB__AGX19000
augcugcccagcaccauccagacacucacucuuuuccugacguccggcgggguguuguuaucucuguacgucucagccagucuaagcuaucuccuguacuccgacauucuucugaaguuuucuccuaccgagauaacagcuccaacuaugccguuggauugcgcaaacgccucgaauguucacgcggugaacagaucagcuaccaaaggaguaacacuccugcugcccgaaccugaguggaccuauccaaggcucagcugucccgguaguacuuuccaaaaggccuuacugaucuccccucaucgguuuggcgaaacaaaaggaaauucugcaccacuuauuauccgcgagcccuucauugccugcgggccuaacgaauguaagcacuuugcuuugaccuacuaugcagcccagccaggcgguuacuauaaugggacgcgaggagaccguaacaaacugagacaucuaaucagcgugaagcucggcaagauaccgacugucgaaaauuccaucuuccacauggcugccuggucaggcagugcgugccaugaugggaaagaguggaccuacauuggaguggacggucccgauaacaaugcacugcuuaagaucaaauacggcgaggccuauacagacacuuaccacagcuaugcuaacaauauucugaggacccaggagucugccuguaacugcaucgggggaaauuguuacuugaugauaacagauggcuccgcaucagguguuagcgaaugccgguuucucaagauucgcgaggggagaaucauuaaagagaucuucccuaccggaagggugaagcacacggaagaguguacuugcggcuuugcuaguaacaagacaaucgaaugugccugccgggacaauucuuauaccgcgaaacgcccauucgucaagcugaacguggagacugauacagccgaaauucgauuaaugugcaccgacacguaccuggauacccccagaccugacgauggcuccauaacagggccaugugagagcaacggagacaaagguucgggcgggaucaagggaggcuuuguacaucagaggauggcaucuaaaauuggucggugguauucccguacuaugucaaagaccgagcgcauggggaugggccucuacguuaaauacgacggagaucccugggcugacagugaugcccuugcuuucagcggcgugauggucuccaugaaggaaccggggugguauucuuuuggauucgagaucaaggacaaaaagugcgaugugccuuguauagguauugaaauggugcacgacggcgggaaagagacauggcauagcgccgcaacugccaucuacugccugaugggaucaggccaauugcuaugggauaccgucacagguguugacauggcucuguga

SEQ ID NO: 157423 - RNA, 1401 nt, Artificial Sequence; identical to SEQ ID NO: 156683
  derived and/or modified CDS sequence (opt3) from neuraminidase__InfluenzaB__AGX19011

SEQ ID NO: 157424 - RNA, 1401 nt, Artificial Sequence; identical to SEQ ID NO: 156683
  derived and/or modified CDS sequence (opt3) from neuraminidase__InfluenzaB__AGX19022

SEQ ID NO: 157425 - RNA, 1401 nt, Artificial Sequence
  derived and/or modified CDS sequence (opt3) from neuraminidase__InfluenzaB__AGX19033
augcugcccagcaccauccagacacucacucuuuuccugacguccggcgggguguuguuaucucuguacgucucagccagucuaagcuaucuccuguacuccgacauucuucugaaguuuccuucuaccgagauaacagcuccaacuaugccguugaacugcgcaaaugccucgaacguucaagcggugaauagaucagcuaccaaaggaguaacacuccugcugcccgaaccugaguggaccuauccaaggcucagcugucccgguaguacuuuccagaaggccuuacugaucuccccucaccgguuuggcgaaacaaaagggaacucugcaccacuuauuauccgcgagcccuucauugccugcggaccuaaggaauguaaacauuuugcuuugacccacuacgcagcccagccaggcgguuauuacaaugggacgcgaggagaucguaacaagcugagacaucuaaucagcgugaagcucggcaaaauaccgacugucgaaaauuccaucuuccacauggcugccuggucaggcagugcgugccaugacgggaaggaguggaccuauauuggaguggauggucccgacaacaaugcacugcuuaaaaucaaguacggcgaagccuacacagauacuuaucacagcuacgcuaacaauauucugaggacccaggagucugccuguaacugcaucgggggaaauuguuauuugaugauaacagacggcuccgcaucagguguuagcgaaugccgguuucucaaaauucgcgaggggagaaucauuaaggagaucuucccuaccggaaggaucaagcacacggaagaguguacuugcggcuuugcuaguaacaaaacaauugaaugugccugccgggauaauucuuacaccgcgaagcgcccauucgugaaacugaacgucgagacugacacagccgaaauacgauuaaugugcaccgagacguaucuggauacccccagaccugacgauggcuccaucacagggccaugugagagcaacggagacaaggguucggaaggcauuaaagggggauuugugcaucaaaggauggcaucuaagaucggccggugguacucccguacuaugucaaaaaccgagcgcauggguauggggcucuauguaaaguacgauggcgaccccugggcugacagugaugcccuugcuuucagcggaguuaugguguccauggaggagccgggcugguacucuuuuggguucgaaauaaaggacaaaaagugcgaugucccuuguauuggaaucgagauggugcacgacgguggcaaagagacauggcauagcgccgcaacugccaucuauugccugauggggucaggacaguugcuaugggauaccgugacaggcgucaauauggcucuguga

SEQ ID NO: 157426 - RNA, 1401 nt, Artificial Sequence; identical to SEQ ID NO: 156683
  derived and/or modified CDS sequence (opt3) from neuraminidase__InfluenzaB__AGX19044

SEQ ID NO: 157427 - RNA, 1401 nt, Artificial Sequence; identical to SEQ ID NO: 156683
  derived and/or modified CDS sequence (opt3) from neuraminidase__InfluenzaB__AGX19055

SEQ ID NO: 157428 - RNA, 1401 nt, Artificial Sequence
  derived and/or modified CDS sequence (opt3) from neuraminidase__InfluenzaB__AGX19066
augcugcccagcaccauccagacacucacucuuuuccugacguccggcgggguguuguuaucucuguacgucucagccagucuaagcuaucuccuguacuccgacauucuucugaaguuuucuccuaccgagauaacagcuccaacuaugccguuggauugcgcaaacgccucgaauguucaagcggugaacagaucagcuaccaaaggaguaacacuccugcugcccgaaccugaguggaccuauccaaggcucagcugucccgguaguacuuuccagaaggccuuacugaucuccccucaccgguuuggcgaaacaaaaggaaauucugcaccacuuauuauccgcgagcccuucauugccugcgggccuaacgaauguaagcauuuugcuuugacccacuacgcagcccagccaggcgguuauuacaaugggacgcgaggagaccguaacaaacugagacaucuaaucagcgugaagcucggcaagauaccgacugucgaaaauuccaucuuccacauggcugccuggucaggcagugcgugccaugaugggaaagaguggauuuauaucggaguggacggucccgauaacaaugcacugcuuaagauuaaauacggcgaggccuacaccgacacauaucacagcuacgcuaacaagauccugaggacucaggagucugccuguaauugcauagggggaaacuguuauuugaugauuaccgauggcuccgcaucagguguuagcgaaugccgguuucucaaaauccgcgaggggagaauuaucaaggagaucuucccuacaggaagggugaagcacaccgaagaguguacgugcggcuuugcuaguaauaaaacuauugaaugugccugccgggacaacucuuacacagcgaagcgcccauucgucaaacugaauguggagaccgauacugccgaaauacgauuaaugugcacagacaccuaucuggauacgcccagaccugacgauggcuccaucaccgggccaugugagagcaacggagacaaggguucgggcgggauuaaaggaggcuuuguacaucaaaggauggcaucuaagaucggucggugguacucccguacaaugucaaaaacugagcgcauggggaugggccucuauguuaaguacgacggagaucccugggcugacagugaugcccuugcuuucagcggcgugauggucuccaugaaggaaccggggugguacucuuuuggauucgagauaaaagacaagaaaugcgaugugccuuguauugguaucgaaauggugcacgacggcgggaaggagaccuggcauagcgccgcaacagccaucuauugccugaugggaucaggccaguugcuaugggauacugucaccgguguugacauggcucuguga

SEQ ID NO: 157429 - RNA, 1401 nt, Artificial Sequence
  derived and/or modified CDS sequence (opt3) from neuraminidase__InfluenzaB__AGX19077
augcugcccagcaccauccagacacucacucuuuuccugacguccggcgggguguuguuaucucuguacgucucagccagucuaagcuaucuccuguacuccgacauucuucugaaguuuaccccuacagagauaacugcuccaaccaugccguuggauugcgcaaacgccucuaauguucaagcggugaacagaucggcuacaaaaggaguaacuccccuccugccugaaccagaguggaccuaucccaggcugucauguccugguagcacauuccagaaggcccucuuaaucaguccacaccgguuuggcgaaaccaaaggaaauuccgcaccccugauuauccgcgagccuuucauugccugcgggccaaacgaauguaagcauuuugcucuuacgcacuacgcagcccagccgggcgguuauuacaaugggacucgaggagaccguaacaaauugagacaucugaucucugugaagcuaggcaagauacccaccgucgagaauagcaucuuccacauggcugccugguccggcucagcgugccaugaugggaaagaguggacauauauuggaguggacgguccugauaacaaugcacuccugaagaucaaauacggcgaagccuacacugacaccuaucacaguuacgcuaacaagauucuuaggacacaggagagcgccuguaauugcaucgggggaaacuguuaucugaugauaaccgauggcucugcauccgguguuucagaaugccgguuuuugaaaauucgcgaggggagaaucauuaaggagaucuucccaacgggaagggugaagcacacugaagaguguacaugcggcuuugcuagcaauaaaaccaucgaaugugccugccgggacaacaguuacacugcgaagcgccccuucgucaaacucaauguggagacagauaccgccgaaauucgacugaugugcacggacaccuauuuagauacaccuagaccagacgauggcucuauaacugggcccugugaguccaacggagacaaggguagcggcgggaucaaaggaggcuuuguacaucaaaggauggcaucgaagauuggucggugguacucucguaccauguccaaaacagagcgcauggggaugggccuguauguuaaguacgacggagauccgugggcugacucagaugcccucgcuuucaguggcgugauggucagcaugaaggaaccugggugguacuccuuuggauucgagaucaaagacaagaaaugcgaugugcccuguauagguauugaaauggugcacgacggcgggaaggagacuuggcauucugccgcaaccgccaucuauugccuuaugggaagcggccagcuguugugggauacagucaccgguguugacauggcucuauga

SEQ ID NO: 157430 - RNA, 1401 nt, Artificial Sequence
  derived and/or modified CDS sequence (opt3) from neuraminidase__InfluenzaB__AGX19088
augcugcccagcaccauccagacacucacucuuuuccugacguccggcgggguguuguuaucucuguacgucucagccagucuaagcuaucuccuguacuccgacauucuucugaaguuuucuccuaccgagauaacagcuccaacuaugccguuggauugcgcaaacgccucgaauguucaagcggugaacagaucagcuaccaaaggaguaacacuccugcugcccgaaccugaguggaccuauccaaggcucagcugucccgguaguacuuuccagaaggccuuacugaucuccccucaccgguuuggcgaaacaaaaggaaauucugcaccacuuauuauccgcgagcccuucauugccugcgggccuaacgaauguaagcauuuugcuuugacccacuacgcagcccagccaggcgguuauuacaaugggacgcgaggagaccguaacaaacugagacaucuaaucagcgugaagcucggcaagauaccgacugucgaaaauuccaucuuccacauggcugccuggucaggcagugcgugccaugaugggaaagaguggaccuauauuggaguggacggucccgauaacaaugcacugcuuaagaucaaauacggcgaggccuacacagacacuuaucacagcuacgcuaacaagauucugaggacccaggagucugccuguaauugcaucgggggaaacuguuauuugaugauaacagauggcuccgcaucagguguuagcgaaugccgguuucucaaaauucgcgaggggagaaucgugaaggagauuuucccuaccggaagggucaagcacacggaagaguguacuugcggcuuugcuaguaauaaaacaaucgaaugugccugccgggacaacucuuacaccgcgaagcgcccauucgugaaacugaauguagagacugauacagccgaaauccgauuaaugugcaccgacacguaucuggauacccccagaccugacgauggcuccauuacagggccaugugagagcaacggagacaaggguucgggcgggauaaaaggaggcuuuguucaucaaaggauggcaucuaagaucggucggugguacucccguacuaugucaaaaaccgagcgcauggggaugggccucuaugugaaguacgacggagaucccugggcugacagugaugcccuugcuuucagcggcgucaugguguccaugaaggaaccggggugguacucuuuuggauucgagauuaaagacaagaaaugcgaugugccuuguaucgguauagaaaugguccacgacggcgggaaggagacauggcauagcgccgcaacugccauuuauugccugaugggaucaggccaguugcuaugggauaccguuacagguguggacauggcucuguga

SEQ ID NO: 157431 - RNA, 1401 nt, Artificial Sequence; identical to SEQ ID NO: 156683
  derived and/or modified CDS sequence (opt3) from neuraminidase__InfluenzaB__AGX19099

SEQ ID NO: 157432 - RNA, 1401 nt, Artificial Sequence
  derived and/or modified CDS sequence (opt3) from neuraminidase__InfluenzaB__AGX19110
augcugcccagcaccauccagacacucacucuuuuccugacguccggcgggguguuguuaucucuguacgucucagccagucuaagcuaucuccuguacuccgacauucuucugaaguuuccuucuaccgagauaacagcuccaacuaugccguuggauugcgcaaacgccucgaauguucaagcggugaacagaucagcuaccaaaggaguaacacuccugcugcccgaaccugaguggaccuauccaaggcucagcugucccgguaguacuuuccagaaggccuuacugaucuccccucaccgguuuggcgaaacaaaaggaaauucugcaccacuuauuauccgcgagcccuucauugccugcgggccuaaggaauguaaacauuuugcuuugacccacuacgcagcccagccaggcgguuauuacaacgggacgcgaggagaccguaauaagcugagacaucuaaucagcgugaagcucggcaaaauaccgacugucgagaacuccaucuuccacauggcugccuggucaggcagugcgugccaugaugggaaggaguggaccuauauuggaguggacggucccgauaauaacgcacugcuuaaaaucaaguacggcgaagccuacacagacacuuaucacagcuacgcuaauaacauucugaggacccaggagucugccuguaauugcaucgggggaaacuguuauuugaugauaacagauggcuccgcaucagguguuagcgaaugccgguuucucaaaauucgcgaggggagaaucauuaaggagaucuucccuaccggaaggaucaagcacacggaagaguguacuugcggcuuugcuaguaauaaaacaauugaaugugccugccgggacaacucuuacaccgcgaagcgcccauucauaaaacugaauguggagacugauacagccgaaauccgauuaaugugcaccgagacguaucuggacacccccagaccugaugacggcuccauuacagggccaugugagagcaacggagauaaggguucgggcgggaucaaaggaggcuuuguccaucaaaggauggcaucuaagauaggucggugguacucccguacuaugucaaaaaccgaacgcauggggaugggccucuaugugaaguacgacggagaccccugggcugauagugacgcccuuguauucagcggcguuaugguguccauggaggaaccggggugguacucuuuuggauucgagauuaaggauaaaaagugcgacgucccuuguaucgguaucgaaauggugcacgauggcgggaaagagacauggcauagcgcugccacugcaauuuauugccugaugggaucaggccaguugcuaugggacaccgugacaggugucaacauggcccuguga

SEQ ID NO: 157433 - RNA, 1401 nt, Artificial Sequence
  derived and/or modified CDS sequence (opt3) from neuraminidase__InfluenzaB__AGX19121
augcugcccagcaccacacagacucucacgcuuuuccugaccuccggcgggguguuguuaucucuguacgucucagccagucuaagcuaucuccuguacuccgacauccuucugaaguuuucuccuacagagauuacugcuccaaccaugccguuggauugcgcaaacgccucgaauguucaagcggugaacagaucagcuacaaaaggaguaacccuccugcugcccgaaccugaguggacuuauccaaggcucagcugucccgguaguacauuccagaaggccuuacugauauccccucaccgguuuggcgaaaccaaaggaaauucugcaccacuuaucauucgcgagcccuucaucgccugcgggccuaacgaauguaagcauuuugcuuugacgcacuacgcagcccagccaggcgguuauuacaaugggacucgaggagaccguaacaaacugagacaucuaauuagcgugaagcucggcaagaucccgaccgucgaaaauuccauauuccacauggcugccuggucaggcagugcgugccaugaugggaaagaguggacauauaucggaguggacggucccgauaacaaugcacugcuuaagauuaaauacggcgaggccuacacugacaccuaucacagcuacgcuaacaagauccugaggacacaggagucugccuguaauugcauugggggaaacuguuauuugaugaucaccgauggcuccgcaucagguguuagcgaaugccgguuucucaaaauacgcgaggggagaauuaucaaggagauuuucccuacgggaagggugaagcacacugaagaguguacaugcggcuuugcuaguaauaaaaccaucgaaugugccugccgggacaacucuuacacugcgaagcgcccauucgucaaacugaauguggagacagauaccgccgaaauccgauuaaugugcacggacaccuaucuggauacacccagaccugacgauggcuccauuacugggccaugugagagcaacggagacaaggguucgggcgggauaaaaggaggcuuuguacaucaaaggauggcaucuaagaucggucggugguacucccguaccaugucaaaaacagagcgcauggggaugggccucuauguuaaguacgacggagaucccugggcugacagugaugcccuugcuuucagaggcgugauggucagcaugaaggaaccggggugguacuccuuuggauucgagauuaaagacaagaaaugcgaugugccuuguaucgguauagaaauggugcacgacggcgggaaggagacuuggcauucugccgcaaccgccauuuauugccugaugggaagcggccaguugcuaugggauacagucaccgguguugacauggcucuguga

SEQ ID NO: 157434 - RNA, 1401 nt, Artificial Sequence; identical to SEQ ID NO: 157317
  derived and/or modified CDS sequence (opt3) from neuraminidase__InfluenzaB__AGX19132

SEQ ID NO: 157435 - RNA, 1401 nt, Artificial Sequence; identical to SEQ ID NO: 157421
  derived and/or modified CDS sequence (opt3) from neuraminidase__InfluenzaB__AGX19143

SEQ ID NO: 157436 - RNA, 1401 nt, Artificial Sequence
  derived and/or modified CDS sequence (opt3) from neuraminidase__InfluenzaB__AGX19154
augcugcccagcaccauccagacacucacucuuuuccugacguccggcgggguguuguuaucucuguacgucucagccagucuaagcuaucuccuguacuccaacauucuucugaaguuuucuccuaccgagauaacagcuccaacuaugccguuggacugcgcaaaugccucgaacguucacgcggugaauagaucagcuaccaaaggaguaacacuccugcugcccgaaccugaguggaccuauccaaggcucagcugucccgguaguacuuuccaaaaggccuuacugaucuccccucaucgguuuggcgaaacaaaagggaacucugcaccacuuauuauccgcgagcccuucauugccugcggaccuaaugaauguaagcacuuugcuuugacccauuacgcagcccagccaggcgguuauuacaacgggacgcgaggagaucguaauaaacugagacaccuaaucagcgugaagcucggcaagauaccgacugucgagaacuccaucuuccauauggcugccuggucaggcagugcgugccacgacgggaaagaguggaccuauauuggaguggauggucccgacaauaacgcacugcuuaagaucaaauacggcgaagccuacacagauacuuaucacagcuacgcuaauaacauucugaggacccaggagucugccuguaauugcaucgggggaaacuguuauuugaugauaacagacggcuccgcaucagguguuagcgaaugccgguuucucaagauucgcgaggggagaaucauuaaagagaucuucccuaccggaagggugaagcauacggaagaguguacuugcggcuuugcuaguaauaagacaaucgaaugugccugccgggauaacucuuacaccgcgaaacgcccauucgucaagcugaacguggagacugacacagccgaaauucgauuaaugugcaccgauacguaucuggacacccccagaccugaugacggcuccauaacagggccaugugagagcaauggagauaaagguucgggcgggaucaagggaggcuuuguacaccagaggauggcaucuaaaauuggucggugguacucccguacuaugucaaagaccgagcgcauggggaugggccucuauguuaaauacgacggagaccccugggcugauagugacgcccuugcuuucagcggcgugauggucuccaugaaggaaccggggugguacucuuuuggauucgagaucaaggauaaaaagugcgacgugccuuguauagguauugaaauggugcaugauggcgggaaagagacauggcacagcgccgcaacugccaucuauugccugaugggaucaggccaauugcuaugggacaccgucacagguguugauauggcucuguga

SEQ ID NO: 157437 - RNA, 1401 nt, Artificial Sequence; identical to SEQ ID NO: 156683
  derived and/or modified CDS sequence (opt3) from neuraminidase__InfluenzaB__AGX19165

SEQ ID NO: 157438 - RNA, 1401 nt, Artificial Sequence
  derived and/or modified CDS sequence (opt3) from neuraminidase__InfluenzaB__AGX19176
augcugcccagcaccauccagacacucacucuuuuccugacguccggcgggguguuguuaucucuguacgucucagccagucuaagcuaucuccuguacuccgacauucuucugaaguuuucuccuaccgagauaacagcuccaacuaugccguuggauugcgcaaacgccucgaauguucacgcggugaacagaucagcuaccaaaggaguaacacuccugcugcccgaaccugaguggaccuauccaaggcucagcugucccgguaguacuuuccaaaaggccuuacugaucuccccucaucgguuuggcgaaacaaaaggaaauucugcaccacuuauuauccgcgagcccuucauugccugcgggccuaacgaauguaagcacuuugcuuugacccauuacgcagcccagccaggcgguuauuacaaucgaacgcguggggacagaaacaaacugaggcaccuaaucagcgugaagcucggaaagauaccgacugucgaaaauuccaucuuccauauggcugccuggucaggcagugcgugccacgauggcaaagaguggaccuauauugggguggacggacccgauaacaaugcacugcuuaagaucaaauacggugaggccuacacagacacuuaucacagcuacgcuaacaauauucugcggacccaggagucugccuguaacugcaucggcgggaauuguuauuugaugauaacagauggauccgcaucaggcguuagcgaaugccgcuuucucaagauuagagaggguaggaucauuaaagagaucuucccuaccgggcgggugaagcauacggaagaguguacuugcggauuugcuaguaacaagacaaucgaaugugccugccgcgacaauucuuacaccgcgaaacgaccauucgucaagcugaacguggagacugauacagccgaaauuagauuaaugugcaccgacacguaucuggauacccccaggccugacgauggcuccauaacaggcccaugugagagcaacggggacaaaggaucggguggcaucaaagggggauuuguacaccagcggauggcaucuaagauuggccguugguacucccgcacuaugucaaagaccgagagaauggguauggggcucuauguuaaauacgacggcgaucccugggcugacagugaugcccuugcuuucagcggagugauggucuccaugaaggaaccgggcugguacucuuuuggguucgagaucaaggacaaaaagugcgaugugccuuguauaggaauugaaauggugcaugacgguggcaaagagacauggcacagcgccgcaacugccaucuauugccugauggggucaggacaauugcuaugggauaccgucacaggcguugacauggcucuguga

SEQ ID NO: 157439 - RNA, 1401 nt, Artificial Sequence
  derived and/or modified CDS sequence (opt3) from neuraminidase__InfluenzaB__AGX19187
augcugcccagcaccauccagacacucacucuuuuccugacguccggcgggguguuguuaucucuguacgucucagccagucuaagcuaucuccuguacuccgacauucuucugaaguuuucuccuaccgagauaacagcuccaacuaugccguuggauugcgcaaacgccucgaauguucaagcggugaacagaucagcuaccaaaggaguaacacuccugcugcccgaaccugaguggaccuauccaaggcucagcuguagugguuccacuuuccagaaggccuuacugaucucuccccaccgguuuggcgaaacaaaagggaauagcgcaccucuuauuauccgcgagccauucauugccugcggacccaacgaauguaagcauuuugcuuugacccacuacgcagcccagccuggcgguuauuacaaugggacgcgaggagaccguaacaaacugagacaucuaaucuccgugaagcucggcaagauaccaacugucgaaaauucaaucuuccacauggcugccuggaguggcagcgcgugccaugaugggaaagaguggaccuauauuggaguggacgguccggauaacaaugcacugcuuaagaucaaauacggcgaggccuacacagacacuuaucacucuuacgcuaacaagauucugaggacccaggaguccgccuguaauugcaucgggggaaacuguuauuugaugauaacagauggcucagcaagcgguguuagugaaugccgguuucucaaaauucgcgaggggagaaucauuaaggagaucuuccccaccggaagggugaagcacacggaagaguguacuugcggcuuugcuucuaauaaaacaaucgaaugugccugccgggacaacuccuacaccgcgaagcgcccuuucgucaaacugaauguggagacugauacagccgaaauucgauuaaugugcaccgacacguaucuggauaccccaagacccgacgauggcagcauaacagggccuugugagucgaacggagacaaggguucuggcgggaucaaaggaggcuuuguacaucaaaggauggcauccaagauuggucggugguacucacguacuaugaguaaaaccgagcgcauggggaugggccucuauguuaaguacgacggagauccaugggcugacagcgaugcccuugcuuucuccggcgugauggucucuaugaaggaacccgggugguacagcuuuggauucgagaucaaagacaagaaaugcgaugugccguguauagguauugaaauggugcacgacggcgggaaggagacauggcauucagccgcaacugccaucuauugccugaugggaaguggccaguugcuaugggauaccgucacagguguugacauggcucuguga

SEQ ID NO: 157440 - RNA, 1401 nt, Artificial Sequence
  derived and/or modified CDS sequence (opt3) from neuraminidase__InfluenzaB__AGX19198
augcugcccagcaccauccagacacucacucuuuuccugacguccggcgggguguuguuaucucuguacgucucagccagucuaagcuaucuccuguacuccgacauucuucugaaguuuucuccuaccgagauaacagcuccaacuaugccguuggauuaugcaaacgccucgaauguucaagcggugaacagaucagcuaccaaaggaguaacacuccugcugcccgaaccugaguggaccuacccaaggcucagcugccccgguaguacuuuccagaaggccuuacugaucuccccucaccgguuuggcgaaacaaaaggaaauucugcaccacuuauuauccgcgagcccuucauugccugugggccuaacgaaugcaagcauuuugcuuugacccacuaugcagcccagccaggcgguuacuauaaugggacgcgaggagaccguaacaaacugagacaucuaaucagcgugaagcucggcaagauaccgacugucgaaaauuccaucuuccacauggcugccuggucaggcagugcgugucaugaugggaaagaguggaccuacauuggaguggacggucccgauaacaaugcacugcuuaagaucaaauacggcgaggccuauacagacacuuaccacagcuaugcuaacaagauucugaggacccaggagucugccugcaauuguaucgggggaaacugcuacuugaugauaacagauggcuccgcaucagguguuagcgaaugucgguuucucaaaauucgcgaggggagaaucauuaaggagaucuucccuaccggaagggugaagcacacggaagagugcacuuguggcuuugcuaguaauaaaacaaucgaaugcgccugucgggacaacucuuauaccgcgaagcgcccauucgucaaacugaauguggagacugauacagccgaaauucgauuaaugugcaccgacacguaccuggauacccccagaccugacgauggcuccauaacagggccaugcgagagcaacggagacaaggguucgggcgggaucaaaggaggcuuuguacaucaaaggauggcaucuaagauuggucggugguauucccguacuaugucaaaaaccgagcgcauggggaugggccucuacguuaaguacgacggagaucccugggcugacagugaugcccuugcuuucagcggcgugauggucuccaugaaggaaccggggugguauucuuuuggauucgagaucaaagacaagaaaugugaugugccuugcauagguauugaaauggugcacgacggcgggaaggagacauggcauagcgccgcaacugccaucuacugucugaugggaucaggccaguugcuaugggauaccgucacagguguugacauggcucuguga

SEQ ID NO: 157441 - RNA, 1401 nt, Artificial Sequence; identical to SEQ ID NO: 157421
  derived and/or modified CDS sequence (opt3) from neuraminidase__InfluenzaB__AGX19209

SEQ ID NO: 157442 - RNA, 1401 nt, Artificial Sequence
  derived and/or modified CDS sequence (opt3) from neuraminidase__InfluenzaB__AGX19220
augcugcccagcaccauccagacacucacucuuuuccugacguccggcgggguguuguuaucucuguacgucucagccagucuaagcuaucuccuguacuccgacauucuucugaaguuuucuccuaccgagauaacagcuccaacuaugucguuggauugcgcaaacgccucaaauguucaagcggugaacagaagcgcuaccaaaggaguaacacuccugcugccggaacccgaguggaccuauccuaggcucaguuguccagguuccacuuuccagaaggccuuacugaucucuccccaccgguuuggcgaaacaaaagggaauagcgcaccucuuauuauccgcgagccauucauugccugcggacccaacgaauguaagcauuuugcuuugacccacuacgcagcccagccuggcgguuauuacaaugggacgcgaggagaccguaacaaacugagacaucuaaucuccgugaagcucggcaagauaccaacugucgaaaauucaaucuuccacauggcugccuggaguggcagcgcgugccaugaugggaaagaguggaccuauauuggaguggacgguccggauaacaaugcacugcuuaagaucaaauacggcgaggccuacacagacacuuaucacucuuacgcuaacaagauucugaggacccaggaguccgccuguaauugcaucgggggaaacuguuauuugaugauaacagauggcucagcaagcgguguuagugaaugccgguuucucaaaauucgcgaggggagaaucauuaaggagaucuuccccaccggaagggugaagcacacggaagaguguacuugcggcuuugcuucuaauaaaacaaucgaaugugccugccgggacaacuccuacaccgcgaagcgcccuuucgucaaacugaauguggagacugauacagccgaaauucgauuaaugugcaccgacacguaucuggauaccccaagacccgacgauggcagcauaacagggccuugugagucgaacggagacagggguucuggcgggaucaagggaggcuuuguacaucaacggauggcauccaaaauuggucguugguacucacgcacuaugaguaagaccgagagaauggggaugggccucuauguuaaauacgacggagauccaugggcugacagcgaugcccuugcuuucuccggcgugauggucucuaugaaggaacccgggugguacagcuuuggauucgagaucaaggacaaaaagugcgaugugccguguauagguauugaaauggugcacgacggcgggaaagagacauggcauucagccgcaacugccaucuauugccugaugggaaguggccaguugcuaugggauaccgucacagguguugacauggcucuguga

SEQ ID NO: 157443 - RNA, 1401 nt, Artificial Sequence; identical to SEQ ID NO: 156889
  derived and/or modified CDS sequence (opt3) from neuraminidase__InfluenzaB__AGX19231

SEQ ID NO: 157444 - RNA, 1401 nt, Artificial Sequence
  derived and/or modified CDS sequence (opt3) from neuraminidase__InfluenzaB__AGX19253
augcugcccagcaccauccagacacucacucuuuuccugacguccggcgggguguuguuaucucuguacgucucagccagucuaagcuaucuccuguacuccgacauucuucugaaguuuucuccuaccgagauaacagcuccaacuaugccguuggauugcgcaaacgccucgaauguucaagcggugaaccacucagcuaccaaaggaguaacacuccugcugcccgaaccugaguggaccuauccaagacucagcugucccgguaguacuuuccagaaggccuuacugaucuccccucauagguuuggcgaaacaaaaggaaauucugcaccacuuauuauccgggagcccuucauugccugcgggccuaacgaauguaagcacuuugcuuugacccauuacgcagcccagccaggcgguuauuacaaugggacgcgcggagaccgaaacaaacugcgucaccuaaucagcgugaagcucggcaagauaccgacugucgaaaauuccaucuuccauauggcugccuggucaggcagugcgugccacgaugggaaagaguggaccuauauuggaguggacggucccgauaacaaugcacugcuuaagaucaaauacggcgaggccuacacagacacuuaucacagcuacgcuaacaagauucugagaacccaggagucugccuguaauugcaucgggggaaacuguuauuugaugauaacagauggcuccgcaucagguguuagcgaaugcagguuucucaaaauucgggaggggcgcaucauuaaggagaucuucccuaccggaagagugaagcauacggaagaguguacuugcggcuuugcuaguaauaaaacaaucgaaugugccugcagggacaacucuuacaccgcgaagcggccauucgucaaacugaauguggagacugauacagccgaaauucgcuuaaugugcaccgacacguaucuggauacaccccgaccugacgauggcuccauaaccgggccaugugagagcaacggagacaaggguucgggcgggaucaaaggaggcuuuguacaccaaagaauggcaucuaagauugguaggugguacucccggacuaugucaaaaaccgagcguauggggaugggccucuauguuaaguacgacggagaucccugggcugacagugauagccuugccuucuccggcgugauggucucuaugaaggaaccggggugguacagcuuuggauucgagaucaaagacaagaaaugcgaugugccuuguauagguauugaaauggugcaugacggcgggaaggagacauggcacucagcugccacugcaaucuauugccugaugggaaguggccaguugcuaugggauaccgucacagguguugacauggcccuguga

SEQ ID NO: 157445 - RNA, 1401 nt, Artificial Sequence; identical to SEQ ID NO: 157419
  derived and/or modified CDS sequence (opt3) from neuraminidase__InfluenzaB__AGX19264

SEQ ID NO: 157446 - RNA, 1401 nt, Artificial Sequence; identical to SEQ ID NO: 156683
  derived and/or modified CDS sequence (opt3) from neuraminidase__InfluenzaB__AGX19275

SEQ ID NO: 157447 - RNA, 1401 nt, Artificial Sequence
  derived and/or modified CDS sequence (opt3) from neuraminidase__InfluenzaB__AGX19286
augauccccagcaccauucagacacugacucucuuccuuacguccggcggggugcuguugucuuuauacgucucagccagucugagcuaucuacucuacuccgacauacugcuuaaguuuucuccuaccgagaucauugcuccaacaaugccgcuggauugcgcaaacgccucgaauguucacgcggugaacagaucagcuacuaaaggaguaaccuugcuccugcccgaaccugaguggacauauccaaggcugagcugucccgguaguaccuuccaaaaggcccucuuaaucuccccucaucgguuuggcgaaacuaaaggaaauucugcaccacugauuauccgcgagcccuucauagccugcgggccuaacgaauguaagcacuuugcucuuacacauuacgcagcccagccaggcgguuauuacaaugggacccgaggagaccguaacaaauugagacaccugaucagcgugaagcuaggcaagauuccgacggucgaaaauuccaucuuccauauggcugccuggucaggcagugcgugccacgaugggaaagaguggacuuauauuggaguggacggucccgauaacaaugcacuccugaagaucaaauacggcgaggccuacaccgacacauaucacagcuacgcuaacaauauacuuaggacucaggagucugccuguaacugcauugggggaaauuguuaucugaugaucaccgauggcuccgcaucagguguuagcgaaugccgguuuuugaagauucgcgaggggagaaucaucaaagagauuuucccuacaggaagggugaagcauaccgaagaguguacgugcggcuuugcuaguaacaagacuauagaaugugccugccgggacaauucuuacacagcgaaacgcccauucgucaagcucaacguggagaccgauacugccgaaauccgacugaugugcacagacaccuauuuagauacgcccagaccugacgauggcuccauuaccgggccaugugagagcaacggagacaaagguucgggcgggaucaagggaggcuuuguacaccagaggauggcaucuaaaauaggucggugguacucccguacaaugucaaagacugagcgcauggggaugggccuguauguuaaauacgacggagaucccugggcugacagugaugcccucgcuuucagcggcgugauggucuccaugaaggaaccggggugguacucuuuuggauucgagauuaaggacaaaaagugcgaugugccuuguaucgguaucgaaauggugcaugacggcgggaaagagaccuggcacagcgccgcaacagccauuuauugccuuaugggaucaggccaacuguugugggauacugucaccgguguugacauggcucuauga

SEQ ID NO: 157448 - RNA, 1401 nt, Artificial Sequence
  derived and/or modified CDS sequence (opt3) from neuraminidase__InfluenzaB__AGX19297
augcugcccagcaccauccagacacucacucuuuuccugacguccggcgggguguuguuaucucuguacgucucagccagucuaagcuaucuccuguacuccgacauucuucugaaguuuucuccuaccgagauaaucgcuccaacaaugccguuggauugcgcaaacgccucgaauguucacgcggugaacagaucagcuacuaaaggaguaacccuccugcugcccgaaccugaguggacauauccaaggcucagcugucccgguaguaccuuccaaaaggccuuacugauuuccccucaucgguuuggcgaaacuaaaggaaauucugcaccacuuaucauucgcgagcccuucaucgccugcgggccuaacgaauguaagcacuuugcuuugacacauuacgcagcccagccaggcgguuauuacaaugggacccgaggagaccguaacaaacugagacaccuaauaagcgugaagcucggcaagaucccgacggucgaaaauuccauuuuccauauggcugccuggucaggcagugcgugccacgaugggaaagaguggacuuauaucggaguggacggucccgauaacaaugcacugcuuaagauuaaauacggcgaggccuacaccgacacauaucacagcuacgcuaacaauauccugaggacucaggagucugccuguaacugcauagggggaaauuguuauuugaugauuaccgauggcuccgcaucagguguuagcgaaugccgguuucucaagauccgcgaggggagaauuaucaaagagaucuucccuacaggaagggugaagcauaccgaagaguguacgugcggcuuugcuaguaacaagacuauugaaugugccugccgggacaauucuuacacagcgaaacgcccauucgucaagcugaacguggagaccgauacugccgaaauacgauuaaugugcacagacaccuaucuggauacgcccagaccugacgauggcuccaucaccgggccaugugagagcaacggagacaaagguucgggcgggauuaagggaggcuuuguacaccagaggauggcaucuaaaaucggucggugguacucccguacaaugucaaagacugagcgcauggggaugggccucuauguuaaauacgacggagaucccugggcugacagugaugcccuugcuuucagcggcgugauggucuccaugaaggaaccggggugguacucuuuuggauucgagauaaaggacaaaaagugcgaugugccuuguauugguaucgaaauggugcaugacggcgggaaagagaccuggcacagcgccgcaacagccaucuauugccugaugggaucaggccaauugcuaugggauacugucaccgguguugacauggcucuguga

SEQ ID NO: 157449 - RNA, 1401 nt, Artificial Sequence; identical to SEQ ID NO: 157448
  derived and/or modified CDS sequence (opt3) from neuraminidase__InfluenzaB__AGX19308

SEQ ID NO: 157450 - RNA, 1401 nt, Artificial Sequence; identical to SEQ ID NO: 157448
  derived and/or modified CDS sequence (opt3) from neuraminidase__InfluenzaB__AGX19319

SEQ ID NO: 157451 - RNA, 1401 nt, Artificial Sequence
  derived and/or modified CDS sequence (opt3) from neuraminidase__InfluenzaB__AGX19330
augcugcccagcaccauccagacacucacucuuuuccugacguccggcgggguguuguuaucucuguacgucucagccagucuaagcuaucuccuguacuccgacauucuucugaaguuuucuccuaccgagauaaucgcuccaacaaugccguuggauugcgcaaacgccucgaauguucacgcggugaacagaucagcuacuaaaggaguaacccuccugcugcccgaaccugaguggacauauccaaggcucagcugucccgguaguaccuuccaaaaggccuuacugauuuccccucaucgguuuggcgaaacuaaaggaaauucugcaccacuuaucauucgcgagcccuucaucgccugcgggccuaacgaauguaagcacuuugcuuugacacauuacgcagcccagccaggcgguuauuacaaugggacccgaggaaaccguaauaaacugagacaccuaauaagcgugaagcucggcaagaucccgacggucgagaacuccauuuuccauauggcugccuggucaggcagugcgugccacgacgggaaagaguggacuuauaucggaguggauggucccgacaauaacgcacugcuuaagauuaaauacggcgaagccuacaccgauacauaucacagcuacgcuaauaacauccugaggacucaggagucugccuguaauugcauagggggaaacuguuauuugaugauuaccgacggcuccgcaucagguguuagcgaaugccgguuucucaagauccgcgaggggagaauuaucaaagagaucuucccuacaggaagggugaagcauaccgaagaguguacgugcggcuuugcuaguaauaagacuauugaaugugccugccgggauaacucuuacacagcgaaacgcccauucgucaagcugaacguggagaccgacacugccgaaauacgauuaaugugcacagauaccuaucuggacacgcccagaccugaugacggcuccaucaccgggccaugugagagcaauggagauaaagguucgggcgggauuaagggaggcuuuguacaccagaggauggcaucuaaaaucggucggugguacucccguacaaugucaaagacugagcgcauggggaugggccucuauguuaaauacgacggagaccccugggcugauagugacgcccuugcuuucagcggcgugauggucuccaugaaggaaccggggugguacucuuuuggauucgagauaaaggauaaaaagugcgacgugccuuguauugguaucgaaauggugcaugauggcgggaaagagaccuggcacagcgccgcaacagccaucuauugccugaugggaucaggccaauugcuaugggacacugucaccgguguugauauggcucuguga

SEQ ID NO: 157452 - RNA, 1401 nt, Artificial Sequence; identical to SEQ ID NO: 157448
  derived and/or modified CDS sequence (opt3) from neuraminidase__InfluenzaB__AGX19341

SEQ ID NO: 157453 - RNA, 1401 nt, Artificial Sequence; identical to SEQ ID NO: 157448
  derived and/or modified CDS sequence (opt3) from neuraminidase__InfluenzaB__AGX19352

SEQ ID NO: 157454 - RNA, 1401 nt, Artificial Sequence
  derived and/or modified CDS sequence (opt3) from neuraminidase__InfluenzaB__AGX19363
augcugcccagcaccauccagacacucacucuuuuccugacguccggcgggguguuguuaucucuguacgucucagccagucuaagcuaucuccuguacuccgacauucuucugaaguuuucuccuaccgagauaaucgcuccaacaaugccguuggauugcgcaaacgccucgaauguucacgcggugaacagaucagcuacuaaaggaguaacccuccugcugcccgaaccugaguggacauauccaaggcucagcugucccgguaguaccuuccaaaaggccuuacugauuuccccucaucgguuuggcgaaacuaaaggaaauucugcaccacuuaucauucgcgagcccuucaucgccugcgggccuaacgaauguaagcacuuugcuuugacauacuaugcagcccagccaggcgguuacuauaaugggacccgaggagaccguaacaaacugagacaucuaauaagcgugaagcucggcaagaucccgacggucgaaaauuccauuuuccacauggcugccuggucaggcagugcgugccaugaugggaaagaguggacuuacaucggaguggacggucccgauaacaaugcacugcuuaagauuaaauacggcgaggccuauaccgacacauaccacagcuaugcuaacaauauccugaggacucaggagucugccuguaacugcauagggggaaauuguuacuugaugauuaccgauggcuccgcaucagguguuagcgaaugccgguuucucaagauccgcgaggggagaauuaucaaagagaucuucccuacaggaagggugaagcacaccgaagaguguacgugcggcuuugcuaguaacaagacuauugaaugugccugccgggacaauucuuauacagcgaaacgcccauucgucaagcugaacguggagaccgauacugccgaaauacgauuaaugugcacagacaccuaccuggauacgcccagaccugacgauggcuccaucaccgggccaugugagagcaacggagacaaagguucgggcgggauuaagggaggcuuuguacaucagaggauggcaucuaaaaucggucggugguauucccguacaaugucaaagacugagcgcauggggaugggccucuacguuaaauacgacggagaucccugggcugacagugaugcccuugcuuucagcggcgugauggucuccaugaaggaaccggggugguauucuuuuggauucgagauaaaggacaaaaagugcgaugugccuuguauugguaucgaaauggugcacgacggcgggaaagagaccuggcauagcgccgcaacagccaucuacugccugaugggaucaggccaauugcuaugggauacugucaccgguguugacauggcucuguga

SEQ ID NO: 157455 - RNA, 1401 nt, Artificial Sequence
  derived and/or modified CDS sequence (opt3) from neuraminidase__InfluenzaB__AGX19374
augcugcccagcaccauccagacacucacucuuuuccugacguccggcgggguguuguuaucucuguacgucucagccagucuaagcuaucuccuguacuccgacauucuucugaaguuuucucaaaccgagauaacagcuccuaucaugccauuggauugcgcaaacgccucgaauguucaggcggugaacagaucagcugccaaaggaguaacucuccugcugagcgaaccggaguggaccuaucccaggcucaguuguccugguuccacauuccagaaggcauuacugauuucuccacaccgguuuggcgaaaccaaagggaauagcgcuccccuuaucauucgcgagccuuucaucgccugcggaccaacugaauguaagcauuuugcauugacacacuacgccgcucagcccggcgguuauuacaacgggacccgagaggaccguaauaaacugagacaucuaauauccgugaagcucggaaagaucccuacggucgagaacucaauuuuccacauggccgcguggaguggcagcgcaugccaugauggcaaagaauggacuuauaucgggguggacggaccagauucuaaugcccugcuuaagauuaaauacggugaggcuuacaccgacacauaucacuccuacgccaagaacauccugaggacucaagaaucagcauguaauugcauaggcggggauuguuauuugaugauuaccgacggaccggcuagcggcguuagugagugccgguuucucaaaauccgcgaggguagaauuaucaaggaaaucuuccccacagggagggugaagcacaccgaggaauguacgugcggauuugccucuaacaaaacuauugagugugcgugccgggauaauuccuacacagccaagcgcccuuucgucaaacugaacguggaaaccgacacugcagagauacgauuaaugugcacagagaccuaucuggauacgccaagacccaaugacggcagcaucaccggcccuugugaaucggauggggacaagggaucugguggcauuaaagggggauuuguacaucagaggauggcuuccaagaucggccggugguacucacguacaaugaguaaaacuaagcgcauggguauggggcucuauguuaaguacgacggcgauccauggaccgacagcgaggcccuugcucuguccggagugauggucucuauggaggaacccggcugguacagcuucggguuugaaauaaaagauaagaaaugcgacgugccguguauuggaaucgagauggugcacgaugguggcaagacaacuuggcauucagccgcaaccgccaucuauugcuugauggggaguggacagcuacugugggacacagucaccggcguugauauggcucucuga

SEQ ID NO: 157456 - RNA, 1401 nt, Artificial Sequence; identical to SEQ ID NO: 157448
  derived and/or modified CDS sequence (opt3) from neuraminidase__InfluenzaB__AGX19385

SEQ ID NO: 157457 - RNA, 1401 nt, Artificial Sequence
  derived and/or modified CDS sequence (opt3) from neuraminidase__InfluenzaB__AGX19396
augcugcccagcaccauccagacacucacucuuuuccugacguccggcgggguguuguuaucucuguacgucucagccagucuaagcuaucuccuguacuccgacauucuucugaaguuuucuccuaccgagauaaucgcuccaacaaugccguuggauugcgcaaacgccucgaauguucacgcggugaacagaucagcuacuaaaggaguaacccuccugcugcccgaaccugaguggacauauccaaggcucagcugucccgguaguaccuuccaaaaggccuuacugauuuccccucaucgguuuggcgaaacuaaaggaaauucugcaccacuuaucauucgcgagcccuucaucgccugcgggccuaacgaauguaagcacuuugcuuugacacauuacgcagcccagccaggcgguuauuacaaugggccgcgaggagaccguaacaaacugagacaccuaauaagcgugaagcucggcaagauccccaccgucgaaaauuccauuuuccauauggcugccuggucaggcagugcgugccacgaugggaaagaguggacguauaucggaguggacgguccugauaacaaugcacugcuuaagauuaaauacggcgaggccuacacugacaccuaucacagcuacgcuaacaauauccugaggacacaggagucugccuguaacugcauagggggaaauuguuauuugaugauuacugauggcuccgcaucagguguuagcgaaugccgguuucucaagauccgcgaggggagaauuaucaaagagaucuucccaaccggaagggugaagcauacagaagaguguaccugcggcuuugcuaguaacaagacgauugaaugugccugccgggacaauucuuacacugcgaaacgccccuucgucaagcugaacguggagacagauaccgccgaaauacgauuaaugugcacugacacauaucuggauaccccuagaccagacgauggcuccaucacggggcccugugagagcaacggagacaaagguucgggcgggauuaagggaggcuuuguacaccagaggauggcaucuaaaaucggucggugguacucccguaccaugucaaagacagagcgcauggggaugggccucuauguuaaauacgacggagauccgugggcugacagugaugcccuugcuuucagcggcgugauggucuccaugaaggaaccugggugguacucuuuuggauucgagauaaaggacaaaaagugcgaugugcccuguauugguaucgaaauggugcaugacggcgggaaagagacuuggcacagcgccgcaaccgccaucuauugccugaugggaucaggccaauugcuaugggauacagucacugguguugacauggcucuguga

SEQ ID NO: 157458 - RNA, 1401 nt, Artificial Sequence; identical to SEQ ID NO: 157448
  derived and/or modified CDS sequence (opt3) from neuraminidase__InfluenzaB__AGX19407

SEQ ID NO: 157459 - RNA, 1401 nt, Artificial Sequence; identical to SEQ ID NO: 157009
  derived and/or modified CDS sequence (opt3) from neuraminidase__InfluenzaB__AGX19418

SEQ ID NO: 157460 - RNA, 1401 nt, Artificial Sequence
  derived and/or modified CDS sequence (opt3) from neuraminidase__InfluenzaB__AGX19429
augcugcccagcaccauccagacacucacucuuuuccugacguccggcgggguguuguuaucucuguacgucucagccagucuaagcuaucuccuguacuccgacauucuucugaaguuuucucaaaccgagauaacagcuccuaucaugccauuggauugcgcaaacgccucgaauguucaggcggugaacagaucagcugccaaaggaguaacucuccugcugccggaacccgaguggaccuauccuaggcucagcuguccagguaguacauuccagaaggcauuacugauuucuccccaccgguuuggcgaaaccaaaggaaauuccgccccucuuaucauucgcgagccauucaucgcuugcgggcccacugaauguaagcauuuugcauugacacacuacgccgcucagccuggcgguuauuacaacgggacccgagaggaccguaauaaacugagacaucuaauaagcgugaagcucggaaagaucccaacggucgagaacuccauuuuccacauggccgcguggucaggcagugcaugccaugauggcaaagaauggacuuauaucgggguggacggaccggauagcaaugcccugcuuaagauuaaauacggugaggcuuacaccgacacauaucacucuuacgccaagaacauccugaggacucaagaauccgcauguaauugcauaggcggggauuguuauuugaugauuaccgacggacccgcuucaggcaucagcgagugccgguuucucaaaauucgcgaggguagaaucaucaaggaaauuuucccuacagggaggguuaagcacaccgaggaauguacgugcggauuugccaguaacaaaacuauagagugugcgugccgggauaauucuuacacagccaagcgcccauucgugaaacugaacgucgaaaccgacacugcagagauccgauuaaugugcacagagaccuaucuggauacgcccagaccuaaugacggcuccauuaccggcccaugugaaagcgauggggacaagggaucggguggcaucaaagggggauuugugcaucagaggauggcuucuaagauaggccggugguacucccguacaaugucaaaaacucgcagaauggguauggggcucuauguaaaguacgacggcgaucccuggaccgacagugaggcccuugcucugagcggaguuaugguguccauggaggaaccgggcugguacucuuucggguuugaaauuaaggauaaaaagugcgacgucccuuguaucggaaucgagauggugcacgaugguggcaaaacaacuuggcauagcgccgcaaccgccauuuauugcuugauggggucaggacagcuacugugggacacagugaccggcgucgauauggcucucuga

SEQ ID NO: 157461 - RNA, 1401 nt, Artificial Sequence
  derived and/or modified CDS sequence (opt3) from neuraminidase__InfluenzaB__AGX19451
augcugcccagcaccauccagacacucacucuuuuccugacguccggcgggguguuguuaucucuguacgucucagccagucuaagcuaucuccuguacuccgacauucuucugaaguuuucuccuaccgagauaacagcuccaacuaugccguuggauugcgcaaacgccucgaauguucacgcggugaaccauucagcuaccaaaggaguaacacuccugcugcccgaaccugaguggaccuauccaagacucagcugucccgguaguacuuuccaaaaggccuuacugaucuccccucacagguuuggcgaaacaaaaggaaauucugcaccacuuauuauccgggagcccuucauugccugcgggccuaacgaauguaagcauuuugcuuugacccacuacgcagcccagccaggcgguuauuacaaugggacgcgcggagaccgaaacaaacugcgucaucuaaucagcgugaagcucggcaagauaccgacugucgaaaauuccaucuuccacauggcugccuggucaggcagugcgugccacgaugggaaagaguggaccuauauuggaguggacggucccgauaacaaugcacugcuuaagaucaaauacggcgaggccuacacagacacuuaucauagcuacgcuaacaauauucugagaacccaggagucugccuguaacugcaucgggggaaauuguuauuugaugguuacagauggcuccgcaucaggugugagcgaaugcagguuucucaagauacgggaggggcgcauuaucaaagagauuuucccuaccggaagagucaagcacacggaagaguguacuugcggcuuugcuaguaacaagacaaucgaaugugccugcagggacaauucuuacaccgcgaaacggccauucgugaagcugaacguagagacugauacagccgaaauccgcuuaaugugcaccgacacguaucuggauacaccccgaccugacgauggcuccauuaccgggccaugugagagcaacggagacaaagguucgggcgggauaaagggaggcuuuguucaucagagaauggcaucuaaaaucgguaggugguacucccggacuaugucaaagaccgagcguauggggaugggccucuaugugaaauacgacggagaucccugggcugacagugaugcccuugcuuucagcggcgucaugguguccaugaaggaaccggggugguacucuuuuggauucgagauuaaggacaaaaagugcgaugugccuuguaucgguauagaaaugguccacgacggcgggaaagagacauggcacagcgccgcaacugccauuuauugccugaugggaucaggccaauugcuaugggauaccguuacagguguggacauggcucuguga

SEQ ID NO: 157462 - RNA, 1401 nt, Artificial Sequence; identical to SEQ ID NO: 157460
  derived and/or modified CDS sequence (opt3) from neuraminidase__InfluenzaB__AGX19462

SEQ ID NO: 157463 - RNA, 1401 nt, Artificial Sequence; identical to SEQ ID NO: 157460
  derived and/or modified CDS sequence (opt3) from neuraminidase__InfluenzaB__AGX19473

SEQ ID NO: 157464 - RNA, 1401 nt, Artificial Sequence; identical to SEQ ID NO: 157009
  derived and/or modified CDS sequence (opt3) from neuraminidase__InfluenzaB__AGX19484

SEQ ID NO: 157465 - RNA, 1401 nt, Artificial Sequence; identical to SEQ ID NO: 157461
  derived and/or modified CDS sequence (opt3) from neuraminidase__InfluenzaB__AGX19495

SEQ ID NO: 157466 - RNA, 1401 nt, Artificial Sequence; identical to SEQ ID NO: 157009
  derived and/or modified CDS sequence (opt3) from neuraminidase__InfluenzaB__AGX19506

SEQ ID NO: 157467 - RNA, 1401 nt, Artificial Sequence; identical to SEQ ID NO: 157009
  derived and/or modified CDS sequence (opt3) from neuraminidase__InfluenzaB__AGX19517

SEQ ID NO: 157468 - RNA, 1401 nt, Artificial Sequence; identical to SEQ ID NO: 157009
  derived and/or modified CDS sequence (opt3) from neuraminidase__InfluenzaB__AGX19528

SEQ ID NO: 157469 - RNA, 1401 nt, Artificial Sequence; identical to SEQ ID NO: 157461
  derived and/or modified CDS sequence (opt3) from neuraminidase__InfluenzaB__AGX19539

SEQ ID NO: 157470 - RNA, 1401 nt, Artificial Sequence
  derived and/or modified CDS sequence (opt3) from neuraminidase__InfluenzaB__AGX19550
augcugcccagcaccauccagacacucacucuuuuccugacguccggcgggguguuguuaucucuguacgucucagccagucuaagcuaucuccuguacuccgacauucuucugaaguuuucuccuaccgagauaacagcuccaacuaugccguuggauugcgcaaacgccucgaauguucacgcggugaaccauucagcuaccaaaggaguaacacuccugcugcccgaaccugaguggaccuauccaagacucagcugucccgguaguacuuuccaaaaggccuuacugaucuccccucacagguuuggcgaaacaaaaggaaauucugcaccacuuauuauccgggagcccuucauugccugcgggccuaacgaauguaagcauuuugcuuugacccacuacgcagcccagccaggcgguuauuacaaugggacgcgcggagaccgaaacaaacugcgucaucuaaucagcgugaagcucggcaagauaccgacugucgaaaauuccaucuuccacauggcugccuggucaggcagugcgugccacgaugggaaagaguggaccuauauuggaguggacggucccgauaacaaugcacugcuuaagaucaaauacggcgaggccuacacagacacuuaucauagcuacgcuaacaauauucugagaacccaggagucugccuguaacugcaucgggggaaauuguuauuugaugguuacagauggcuccgcaucaggugugagcgaaugcagguuucucaagauacgggaggggcgcauuaucaaagagauuuucccuaccggaagagucaagcacacggaagaguguacuugcggcuuugcuaguaacaagacaaucgaaugugccugcagggacaauucuuacaccgcgaaacggccauucgugaagcugaacguagagacugauacagccgaaauccgcuuaaugugcaccgacacguaucuggauacaccccgaccugacgauggcuccauuaccgggccaugugagagcaacggagacaaagguucgggcgggauaaagggaggcuuuguucaucagagaauggcaucuaaaaucgguaggugguacucccggacuaugucaaagaccgagcguauggggaugggccucuaugugaaauacgacggagaucccugggcugacagugaugcccuugcuuucagcggcgucaugguguccaugaaugaaccggggugguacucuuuuggauucgagauuaaggacaagaaaugcgaugugccuuguaucgguauagaaaugguccacgacggcgggaaggagacauggcacagcgccgcaacugccauuuauugccugaugggaucaggccaauugcuaugggauaccguuacagguguggacauggcucuguga

SEQ ID NO: 157471 - RNA, 1401 nt, Artificial Sequence
  derived and/or modified CDS sequence (opt3) from neuraminidase__InfluenzaB__AGX19561
augcugcccagcaccauccagacacucacucuuuuccugacguccggcgggguguuguuaucucuguacgucucagccagucuaagcuaucuccuguacuccgacauucuucugaaguuuucuccuaccgagauaacagcuccaacuaugccguuggauugcgcaaacgccucgaauguucacgcggugaaccauucagcuaccaaaggaguaacacuccugcugcccgaaccugaguggaccuauccaagacucagcugucccgguaguacuuuccaaaaggccuuacugaucuccccucacagguuuggcgaaacaaaaggaaauucugcaccacuuauuauccgggagcccuucauugccugcgggccuaacgaauguaagcauuuugcuuugacccacuacgcagcccagccacgcggcuauuacaaugguacgcgaggggaccguaacaaacugagacaucuaaucagcgugaagcucggaaagauaccgacugucgaaaauuccaucuuccacauggcugccuggucaggcagugcgugccacgauggcaaagaguggaccuauauugggguggacggacccgauaacaaugcacugcuuaagaucaaauacggugaggccuacacagacacuuaucauagcuacgcuaacaauauucugaggacccaggagucugccuguaacugcaucggcgggaauuguuauuugaugguuacagauggauccgcaucaggcgugagcgaaugccgguuucucaagauacgcgaggguagaauuaucaaagagauuuucccuaccgggagggucaagcacacggaagaguguacuugcggauuugcuaguaacaagacaaucgaaugugccugccgggacaauucuuacaccgcgaaacgcccauucgugaagcugaacguagagacugauacagccgaaauccgauuaaugugcaccgacacguaucuggauacccccagaccugacgauggcuccauuacaggcccaugugagagcaacggggacaaaggaucggguggcauaaaagggggauuuguucaucagaggauggcaucuaagaucggccggugguacucccguacuaugucaaagaccgagcgcauggguauggggcucuaugugaaauacgacggcgaucccugggcugacagugaugcccuugcuuucagcggagucaugguguccaugaaggaaccgggcugguacucuuuuggguucgagauuaaggacaaaaagugcgaugugccuuguaucggaauagaaaugguccacgacgguggcaaagagacauggcacagcgccgcaacugccauuuauugccugauggggucaggacaauugcuaugggauaccguuacaggcguggacauggcucuguga

SEQ ID NO: 157472 - RNA, 1401 nt, Artificial Sequence
  derived and/or modified CDS sequence (opt3) from neuraminidase__InfluenzaB__AGX19572
augcugcccagcaccauccagacacucacucuuuuccugacguccggcgggguguuguuaucucuguacgucucagccagucuaagcuaucuccuguacuccgacauucuucugaaguuuucuccuaccgagauaacagcuccaacuaugccguuggauugcgcaaacgccucgaauguucaagcggugaacagaucagcuaccaaaggaguaacacuccugcugcccgaaccugaguggaccuauccaaggcucagcugucccgguaguacuuuccagaaggccuuacugaucuccccucaccgguuuggcgaaacaaaaggaaauucugcaccacuuauuauccgcgagcccuucauugccugcgggccuaacgaauguaagcauuuugcuuugacccacuacgcagcccagccaggcgguuauuacaaugggacgcgaggagaccguaacaaacugagacaucuaaucagcgugaagcucggcaagauaccgacugucgaaaauuccaucuuccacauggcugccuggucaggcagugcgugccaugaugggaaagaguggaccuauauuggaguggacggucccgauaacaaugcacugcuuaagguuaaauacggcgaggccuacacagacacuuaucacagcuacgcuaacaagauccugaggacccaggagucugccuguaauugcauugggggaaacuguuauuugaugaucacagauggcuccgcaucaggugugagcgaaugccgguuucucaaaauacgcgaggggagaauuaucaaggagauuuucccuaccggaagggucaagcacacggaagaguguacuugcggcuuugcuaguaauaaaacaaucgaaugugccugccgggacaacucuuacaccgcgaagcgcccauucgugaaacugaauguagagacugauacagccgaaauccgauuaaugugcaccgacacguaucuggauacccccagaccuaacgacggcuccauuacagggccaugugagagcaacggagauaaggguucgggcgggauaaaaggaggcuuuguucaucaaaggauggagucuaagaucggucggugguacucccguacuaugucaaaaaccgaacgcauggggaugggccucuaugugaaguacgacggagaccccugggcagauagugacgcucuugccuucagcggcgucaugguguccaugaaggagccggggugguacucuuuuggauucgaaauuaaagauaagaaaugcgacgugccuuguaucgguauagagaugguccacgauggcgggaaggaaacauggcauagcgcugccacugcaauuuauugccugaugggaucaggccaguugcuaugggacaccguuacaggugugaauauggcccuguga

SEQ ID NO: 157473 - RNA, 1401 nt, Artificial Sequence; identical to SEQ ID NO: 157009
  derived and/or modified CDS sequence (opt3) from neuraminidase__InfluenzaB__AGX19583

SEQ ID NO: 157474 - RNA, 1401 nt, Artificial Sequence; identical to SEQ ID NO: 157009
  derived and/or modified CDS sequence (opt3) from neuraminidase__InfluenzaB__AGX19594

SEQ ID NO: 157475 - RNA, 1401 nt, Artificial Sequence; identical to SEQ ID NO: 157009
  derived and/or modified CDS sequence (opt3) from neuraminidase__InfluenzaB__AGX19605

SEQ ID NO: 157476 - RNA, 1401 nt, Artificial Sequence; identical to SEQ ID NO: 157009
  derived and/or modified CDS sequence (opt3) from neuraminidase__InfluenzaB__AGX19616

SEQ ID NO: 157477 - RNA, 1401 nt, Artificial Sequence; identical to SEQ ID NO: 157461
  derived and/or modified CDS sequence (opt3) from neuraminidase__InfluenzaB__AGX19627

SEQ ID NO: 157478 - RNA, 1401 nt, Artificial Sequence; identical to SEQ ID NO: 157009
  derived and/or modified CDS sequence (opt3) from neuraminidase__InfluenzaB__AGX19638

SEQ ID NO: 157479 - RNA, 1401 nt, Artificial Sequence; identical to SEQ ID NO: 157461
  derived and/or modified CDS sequence (opt3) from neuraminidase__InfluenzaB__AGX19649

SEQ ID NO: 157480 - RNA, 1401 nt, Artificial Sequence; identical to SEQ ID NO: 157461
  derived and/or modified CDS sequence (opt3) from neuraminidase__InfluenzaB__AGX19660

SEQ ID NO: 157481 - RNA, 1401 nt, Artificial Sequence; identical to SEQ ID NO: 157009
  derived and/or modified CDS sequence (opt3) from neuraminidase__InfluenzaB__AGX19671

SEQ ID NO: 157482 - RNA, 1401 nt, Artificial Sequence; identical to SEQ ID NO: 157009
  derived and/or modified CDS sequence (opt3) from neuraminidase__InfluenzaB__AGX19682

SEQ ID NO: 157483 - RNA, 1401 nt, Artificial Sequence; identical to SEQ ID NO: 157461
  derived and/or modified CDS sequence (opt3) from neuraminidase__InfluenzaB__AGX19704

SEQ ID NO: 157484 - RNA, 1401 nt, Artificial Sequence
  derived and/or modified CDS sequence (opt3) from neuraminidase__InfluenzaB__AGX19715
augcugcccagcaccauccagacacucacucuuuuccugacguccggcgggguguuguuaucucuguacgucucagccagucuaagcuaucuccuguacuccgacauucuucugaaguuuucuccuaccgagauaacagcuccaacuaugccguuggauugcgcaaacgccucgaauguucacgcggugaacagaucaaccacaaaaggaguaacccuccugcugcccgaaccugaguggacuuauccaaggcucagcugucccgguaguacauuccaaaaggcuuuacugaucuccccucaucgguuuggcgaaaccaaaggaaauucugccccacuuauuauccgcgagcccuucauugcaugcgggccuaacgaauguaagcacuuugccuugacgcauuacgcugcacagccaggcgguuauuacaaugggacucgaggagaccguaacaaacugagacaccuaaucagcgugaagcucggcaagauaccgaccgucgaaaauuccaucuuccauauggccgcuuggucaggcagugccugccacgaugggaaagaguggacauauauuggaguggacggucccgauaacaaugcgcugcuuaagaucaaauacggcgaggcauacacugacaccuaucacagcuacgccaacaauauucugaggacacaggagucugcuuguaacugcaucgggggaaauuguuauuugaugauaaccgauggcuccgccucagguguuagcgaaugccgguuucucaagauucgcgaggggagaaucauuaaagagaucuucccuacgggaagggugaagcauacugaagaguguacaugcggcuuugcaaguaacaagaccaucgaaugugcuugccgggacaauucuuacacugccaaacgcccauucgucaagcugaacguggagacagauaccgcggaaauucgauuaaugugcacggacaccuaucuggauacacccagaccugacgauggcuccauaacugggccaugugagagcaacggagacaaagguucgggcgggaucaagggaggcuuuguacaccagaggauggccucuaaaauuggucggugguacucccguaccaugucaaagacagagcgcauggggaugggccucuauguuaaauacgacggagaucccugggcagacagugaugcucuugccuucagcggcgugauggucuccaugaaggaaccggggugguacucuuuuggauucgagaucaaggacaaaaagugcgaugugccuuguauagguauugaaauggugcaugacggcgggaaagagacuuggcacagcgcugccaccgcaaucuauugccugaugggaucaggccaauugcuaugggauacagucaccgguguugacauggcccuguga

SEQ ID NO: 157485 - RNA, 1401 nt, Artificial Sequence; identical to SEQ ID NO: 157009
  derived and/or modified CDS sequence (opt3) from neuraminidase__InfluenzaB__AGX19726

SEQ ID NO: 157486 - RNA, 1401 nt, Artificial Sequence; identical to SEQ ID NO: 157009
  derived and/or modified CDS sequence (opt3) from neuraminidase__InfluenzaB__AGX19737

SEQ ID NO: 157487 - RNA, 1401 nt, Artificial Sequence; identical to SEQ ID NO: 157009
  derived and/or modified CDS sequence (opt3) from neuraminidase__InfluenzaB__AGX19748

SEQ ID NO: 157488 - RNA, 1401 nt, Artificial Sequence; identical to SEQ ID NO: 157461
  derived and/or modified CDS sequence (opt3) from neuraminidase__InfluenzaB__AGX19759

SEQ ID NO: 157489 - RNA, 1401 nt, Artificial Sequence; identical to SEQ ID NO: 157009
  derived and/or modified CDS sequence (opt3) from neuraminidase__InfluenzaB__AGX19770

SEQ ID NO: 157490 - RNA, 1401 nt, Artificial Sequence; identical to SEQ ID NO: 157009
  derived and/or modified CDS sequence (opt3) from neuraminidase__InfluenzaB__AGX19781

SEQ ID NO: 157491 - RNA, 1401 nt, Artificial Sequence; identical to SEQ ID NO: 157009
  derived and/or modified CDS sequence (opt3) from neuraminidase__InfluenzaB__AGX19792

SEQ ID NO: 157492 - RNA, 1401 nt, Artificial Sequence; identical to SEQ ID NO: 157009
  derived and/or modified CDS sequence (opt3) from neuraminidase__InfluenzaB__AGX19803

SEQ ID NO: 157493 - RNA, 1401 nt, Artificial Sequence; identical to SEQ ID NO: 157009
  derived and/or modified CDS sequence (opt3) from neuraminidase__InfluenzaB__AGX19814

SEQ ID NO: 157494 - RNA, 1401 nt, Artificial Sequence
  derived and/or modified CDS sequence (opt3) from neuraminidase__InfluenzaB__AGX19825
augcugcccagcaccauccagacacucacucuuuuccugacguccggcgggguguuguuaucucuguacgucucagccagucuaagcuaucuccuguacuccgacauucuucugaaguuuucuccuaccgagauaacagcuccaacuaugccguuggauugcgcaaacgccucgaauguucacgcggugaaccauucagcuaccaaaggaguaacacuccugcugcccgaaccugaguggaccuauccaagacucagcugucccgguaguacuuuccaaaaggccuuacugaucuccccucacagguuuggcgaaacaaaaggaaauucugcaccacuuauuauccgggagcccuucauugccugcgggccuaacgaauguaagcauuuugcuuugacccacuacgcagcccagccaggcgguuauuacaaugggacgcgcggagaccgaaacaaacugcgucaucuaaucagcgugaagcucggcaagauaccgacugucgaaaauuccaucuuccacauggcugccuggucaggcagugcgugccacgaugggaaagaguggaccuauauuggaguggacggucccgauaacaaugcacugcuuaagaucaaauacggcgaggccuacacagacacuuaucauagcuacgcuaacaauauucugagaacccaggagucugccuguaacugcaucgggggaaauuguuauuugaugguuacagauggcuccgcaucaggugugagcgaaugcagguuucucaagauacgggaggggcgcauuaucaaagagauuuucccuaccggaagagucaagcacacggaagaguguacuugcggcuuugcuaacaauaagacaaucgaaugugccugcagggacaacaguuacaccgcgaaacggccauucgugaagcugaacguagagacugauacagccgaaauccgcuuaaugugcaccgacacguaucuggauacaccccgaccugacgauggcucuauuaccgggccaugugaguccaauggagacaaagguagcggcgggauaaagggaggcuuuguucaucagagaauggcaucgaaaaucgguaggugguacucucggacuauguccaagaccgagcguauggggaugggccucuaugugaaauacgacggagaucccugggcugacucagaugcccuugcuuucaguggcgucauggugagcaugaaggaaccggggugguacuccuuuggauucgagauuaaggacaaaaagugcgaugugccuuguaucgguauagaaaugguccacgacggcgggaaagagacauggcacucugccgcaacugccauuuauugccugaugggaagcggccaauugcuaugggauaccguuacagguguggacauggcucuguga

SEQ ID NO: 157495 - RNA, 1401 nt, Artificial Sequence; identical to SEQ ID NO: 157009
  derived and/or modified CDS sequence (opt3) from neuraminidase__InfluenzaB__AGX19836

SEQ ID NO: 157496 - RNA, 1401 nt, Artificial Sequence; identical to SEQ ID NO: 157009
  derived and/or modified CDS sequence (opt3) from neuraminidase__InfluenzaB__AGX19847

SEQ ID NO: 157497 - RNA, 1401 nt, Artificial Sequence; identical to SEQ ID NO: 157009
  derived and/or modified CDS sequence (opt3) from neuraminidase__InfluenzaB__AGX19858

SEQ ID NO: 157498 - RNA, 1401 nt, Artificial Sequence; identical to SEQ ID NO: 157009
  derived and/or modified CDS sequence (opt3) from neuraminidase__InfluenzaB__AGX19869

SEQ ID NO: 157499 - RNA, 1401 nt, Artificial Sequence; identical to SEQ ID NO: 157009
  derived and/or modified CDS sequence (opt3) from neuraminidase__InfluenzaB__AGX19880

SEQ ID NO: 157500 - RNA, 1401 nt, Artificial Sequence; identical to SEQ ID NO: 157009
  derived and/or modified CDS sequence (opt3) from neuraminidase__InfluenzaB__AGX19891

SEQ ID NO: 157501 - RNA, 1401 nt, Artificial Sequence; identical to SEQ ID NO: 157009
  derived and/or modified CDS sequence (opt3) from neuraminidase__InfluenzaB__AGX19902

SEQ ID NO: 157502 - RNA, 1401 nt, Artificial Sequence
  derived and/or modified CDS sequence (opt3) from neuraminidase__InfluenzaB__AGX19913
augcugcccagcaccauccagacacucacucuuuuccugacguccggcgggguguuguuaucucuguacgucucagccagucuaagcuaucuccuguacuccgacauucuucugaaguuuucuccuaccgagauaacagcuccaacuaugccguuggauugcgcaaacgccucgaauguucacgcgaugaaccauucagcuaccaaaggagugacacuccugcugcccgaaccugaguggaccuauccaagacucagcugucccgguaguacuuuccaaaaggccuuacugaucuccccucacagguuuggcgaaacaaaaggaaauucugcaccacuuauuauccgggagcccuucauugccugcgggccuaacgaauguaagcauuuugcuuugacccacuacgcagcccagccaggcgguuauuacaaugggacgcgcggagaccgaaacaaacugcgucaucuaaucagcguaaagcucggcaagauaccgacuguggaaaauuccaucuuccacauggcugccuggucaggcagugcgugccacgaugggaaagaguggaccuauauuggagucgacggucccgauaacaaugcacugcuuaagaucaaauacggcgaggccuacacagacacuuaucauagcuacgcuaacaauauucugagaacccaggagucugccuguaacugcaucgggggaaauuguuauuugauggugacagauggcuccgcaucagguguuagcgaaugcagguuucucaagauacgggaggggcgcauuaucaaagagauuuucccuaccggaagagugaagcacacggaagaguguacuugcggcuuugcuaguaacaagacaaucgaaugugccugcagggacaauucuuacaccgcgaaacggccauucgucaagcugaacguggagacugauacagccgaaauccgcuuaaugugcaccgacacguaucuggauacaccccgaccugacgauggcuccauuaccgggccaugugagagcaacggagacaaagguucgggcgggauaaagggaggcuuuguacaucagagaauggcaucuaaaaucgguaggugguacucccggacuaugucaaagaccgagcguauggggaugggccucuauguuaaauacgacggagaucccugggcugacagugaugcccuugcuuucagcggcgugauggucuccaugaaggaaccggggugguacucuuuuggauucgagauuaaggacaaaaagugcgaugugccuuguaucgguauagaaauggugcacgacggcgggaaagagacauggcacagcgccgcaacugccauuuauugccugaugggaucaggccaauugcuaugggauaccgucacagguguugacauggcucuguga

SEQ ID NO: 157503 - RNA, 1401 nt, Artificial Sequence; identical to SEQ ID NO: 157009
  derived and/or modified CDS sequence (opt3) from neuraminidase__InfluenzaB__AGX19924

SEQ ID NO: 157504 - RNA, 1401 nt, Artificial Sequence; identical to SEQ ID NO: 157009
  derived and/or modified CDS sequence (opt3) from neuraminidase__InfluenzaB__AGX19935

SEQ ID NO: 157505 - RNA, 1401 nt, Artificial Sequence; identical to SEQ ID NO: 157009
  derived and/or modified CDS sequence (opt3) from neuraminidase__InfluenzaB__AGX19946

SEQ ID NO: 157506 - RNA, 1401 nt, Artificial Sequence; identical to SEQ ID NO: 157009
  derived and/or modified CDS sequence (opt3) from neuraminidase__InfluenzaB__AGX19957

SEQ ID NO: 157507 - RNA, 1401 nt, Artificial Sequence
  derived and/or modified CDS sequence (opt3) from neuraminidase__InfluenzaB__AGX19968
augcugcccagcaccauccagacacucacucuuuuccugacguccggcgggguguuguuaucucuguacgucucagccagucuaagcuaucuccuguacuccgacauucuucugaaguuuucuccuaccgagauaacagcuccaacuaugccguuggauugcgcaaacgccucgaauguucaagcggugaacagaucagcuaccaaaggaguaacacuccugcugcccgaaccugaguggaccuauccaaggcucagcugucccgguaguacuuuccagaaggccuuacugaucuccccucaccgguuuggcgaaacaaaaggaaauucugcaccacuuauuauccgcgagcccuucauugccugcgggccuaacgaauguaagcauuuugcuuugacccacuacgcagcccagccaggcgguuauuacaaugggacgcgaggagaccguaacaaacugagacaucuaaucagcgugaagcucggcaagauaccgacugucgaaaauuccaucuuccacauggcugccuggucaggcagugcgugccaugaugggaaagaguggaccuauauuggaguggacggucccgauaacgacgcacugcuuaagguuaaauacggcgaggccuacacagauacuuaucacagcuacgcuaauaagauccugaggacccaggagucugccuguaacugcauugggggaaauuguuauuugaugaucacagacggcuccgcaucaggugugagcgaaugccgguuucucaaaauacgcgaggggagaauuaucaaggagauuuucccuaccggaagggucaagcacacggaagaguguacuugcggcuuugcuaguaacaaaacaaucgaaugugccugccgggauaauucuuacaccgcgaagcgcccauucgugaaacugaacguagagacugacacagccgaaauccgauuaaugugcaccgauacguaucuggacacccccagaccuaaugauggcuccauuacagggccaugugagagcaacggagacaaggguucgggcgggauaaaaggaggcuuuguucaucaaaggauggagucuaagaucggucggugguacucccguacuaugucaaaaaccgaacgcauggggaugggccucuaugugaaguacgacggagaucccugggcagacagugaugcucuugccuucagcggcgucaugguguccaugaaggagccggggugguacucuuuuggauucgaaauuaaagacaagaaaugcgaugugccuuguaucgguauagagaugguccacgacggcgggaaggaaacauggcauagcgcugccacugcaauuuauugccugaugggaucaggccaguugcuaugggauaccguuacaggugugaacauggcccuguga

SEQ ID NO: 157508 - RNA, 1401 nt, Artificial Sequence; identical to SEQ ID NO: 157461
  derived and/or modified CDS sequence (opt3) from neuraminidase__InfluenzaB__AGX19979

SEQ ID NO: 157509 - RNA, 1401 nt, Artificial Sequence; identical to SEQ ID NO: 157461
  derived and/or modified CDS sequence (opt3) from neuraminidase__InfluenzaB__AGX19990

SEQ ID NO: 157510 - RNA, 1401 nt, Artificial Sequence; identical to SEQ ID NO: 157009
  derived and/or modified CDS sequence (opt3) from neuraminidase__InfluenzaB__AGX20001

SEQ ID NO: 157511 - RNA, 1401 nt, Artificial Sequence; identical to SEQ ID NO: 157009
  derived and/or modified CDS sequence (opt3) from neuraminidase__InfluenzaB__AGX20012

SEQ ID NO: 157512 - RNA, 1401 nt, Artificial Sequence; identical to SEQ ID NO: 157009
  derived and/or modified CDS sequence (opt3) from neuraminidase__InfluenzaB__AGX20023

SEQ ID NO: 157513 - RNA, 1401 nt, Artificial Sequence; identical to SEQ ID NO: 157009
  derived and/or modified CDS sequence (opt3) from neuraminidase__InfluenzaB__AGX20034

SEQ ID NO: 157514 - RNA, 1401 nt, Artificial Sequence; identical to SEQ ID NO: 157009
  derived and/or modified CDS sequence (opt3) from neuraminidase__InfluenzaB__AGX20045

SEQ ID NO: 157515 - RNA, 1401 nt, Artificial Sequence
  derived and/or modified CDS sequence (opt3) from neuraminidase__InfluenzaB__AGX20056
augcugcccagcaccauccagacacucacucuuuuccugacguccggcgggguguuguuaucucuguacgucucagccagucuaagcuaucuccuguacuccgacauucuucugaaguuuucuccuaccgagauaacagcuccaacuaugccguuggauugcgcaaacgccucgaauguucaagcggugaacagaucagcuaccaaaggaguaacacuccugcugcccgaaccugaguggaccuauccaaggcucagcugucccgguaguacuuuccagaaggccuuacugaucuccccucaccgguuuggcgaaacaaaaggaaauucugcaccacuuaugauucgcgagcccuucaucgccugcgggccuaacgaauguaagcauuuugcuuugacccacuacgcagcccagccaggcgguuauuacaaugggacgcgaggagaccguaacaaacugagacaucuaauuagcgugaagcucggcaagaucccgacugucgaaaauuccauauuccacauggcugccuggucaggcagugcgugccaugaugggaaagaguggaccuauaucggaguggacggucccgauaacaaugcacugcuuaagguuaaauacggcgaggccuacacagacacuuaucacagcuacgcuaacaagauucugaggacccaggagucugccuguaauugcaucgggggaaacuguuauuugauggugacagauggcuccgcaucaggugucagcgaaugccgguuucucaaaauucgcgaggggagaaucauaaaggagauuuucccuaccggaagggugaagcacacggaagaguguacuugcggcuuugcuaguaauaaaacaaucgaaugugccugccgggacaacucuuacaccgcgaagcgcccauucguaaaacugaauguugagacugauacagccgaaauucgauuaaugugcaccgacacguaucuggauacccccagaccuaacgacggcuccaucacagggccaugugagagcaacggagauaaggguucgggcgggaucaaaggaggcuuugugcaucaaaggauggagucuaagauuggucggugguacucccguacuaugucaaaaaccgaacgcauggggaugggccucuaugucaaguacgacggagaccccugggcagauagugacgcucuugccuucagcggcgugaugguguccaugaaggagccggggugguacucuuuuggauucgaaauaaaagauaagaaaugcgacgucccuuguaucgguauugagaugguucacgauggcgggaaggaaacauggcauagcgcugccacugcaaucuauugccugaugggaucaggccaguugcuaugggacaccgugacagguguagauauggcccuguga

SEQ ID NO: 157516 - RNA, 1401 nt, Artificial Sequence
  derived and/or modified CDS sequence (opt3) from neuraminidase__InfluenzaB__AGX20067
augcugcccagcaccauccagacacucacucuuuuccugacguccggcgggguguuguuaucucuguacgucucagccagucuaagcuaucuccuguacuccgacauucuucugaaguuuucuccuaccgagauaacagcuccaacuaugccguuggauugcgcaaacgccucgaauguucaagcggugaacagaucagcuaccaaaggaguaacacuccugcugcccgaaccugaguggaccuauccaaggcucagcugucccgguaguacuuuccagaaggccuuacugaucuccccucaccgguuuggcgaaacaaaaggaaauucugcaccacuuauuauccgcgagcccuucauugccugcgggccuaacgaauguaagcauuuugcuuugacccacuacgcagcccagccaggcgguuauuacaaugggacgcgaggagaccguaacaaacugagacaucuaaucagcgugaagcucggcaagauaccgacugucgaaaauuccaucuuccacauggcugccuggucaggcagugcgugccaugaugggaaagaguggaccuauauuggaguggacggucccgauaacaaugcacugcuuaagguuaaauacggcgaggccuacacagacacuuaucacagcuacgcuaacaagauccugaggacccaggagucugccuguaauugcauugggggaaacuguuauuugauggugacagauggcuccgcaucaggugucagcgaaugccgguuucucaaaauccgcgaggggagaauaauuaaggagaucuucccuaccggaagggugaagcacacggaagaguguacuugcggcuuugcuaguaauaaaacaauugaaugugccugccgggacaacucuuacaccgcgaagcgcccauucguaaaacugaauguugagacugauacagccgaaauccgauuaaugugcaccgacacguaucuggauacccccagaccuaacgacggcuccaucacagggccaugugagagcaacggagauaaggguucgggcgggauuaaaggaggcuuugugcaucaaaggauggagucuaagauaggucggugguacucccguacuaugucaaaaaccgaacgcauggggaugggccucuaugucaaguacgacggagaccccugggcagauagugacgcucuugccuucagcggcgugaugguguccaugaaggagccggggugguacucuuuuggauucgaaaucaaagauaagaaaugcgacgucccuuguauugguaucgagaugguucacgauggcgggaaggaaacauggcauagcgcugccacugcaauauauugccugaugggaucaggccaguugcuaugggacaccgugacagguguagauauggcccuguga

SEQ ID NO: 157517 - RNA, 1401 nt, Artificial Sequence; identical to SEQ ID NO: 157009
  derived and/or modified CDS sequence (opt3) from neuraminidase__InfluenzaB__AGX20078

SEQ ID NO: 157518 - RNA, 1401 nt, Artificial Sequence; identical to SEQ ID NO: 157009
  derived and/or modified CDS sequence (opt3) from neuraminidase__InfluenzaB__AGX20089

SEQ ID NO: 157519 - RNA, 1401 nt, Artificial Sequence
  derived and/or modified CDS sequence (opt3) from neuraminidase__InfluenzaB__AGX20100
augcugcccagcaccauccagacacucacucuuuuccugacguccggcgggguguuguuaucucuguacgucucagccagucuaagcuaucuccuguacuccgacauucuucugaaguuuccuucuaccgagauaacagcuccaacuaugccguuggauugcgcaaacgccucgaauguucaagcggugaacagaucagcuaccaaaggaguaacacuccugcugcccgaaccugaguggaccuauccaaggcucagcugucccgguaguacuuuccagaaggccuuacugaucuccccucaccgguuuggcgaaacaaaaggaaauucugcaccacuuauuauccgcgagcccuucauugccugcgggccuaaggaauguaaacauuuugcuuugacccacuacgcagcccagccaggcgguuauuacaacgggacgcgaggagaccguaauaagcugagacaucuaaucagcgugaagcucggcaaaauaccgacugucgagaacuccaucuuccacauggcugccuggucaggcagugcgugccaugaugggaaggaguggaccuauauuggaguggacggucccgauaauaacgcaguucugaaaaucaaguacggcgaagccuacacagacacuuaucacagcuacgcuaauaacauucuuaggacccaggagucugccuguaauugcaucgggggaaacuguuaucugaugauaacagauggcuccgcaucaggugugagcgaaugccgguuuuugaaaauucgcgaggggagaaucauuaaggagaucuucccuaccggaaggauccaacacacggaagaguguacuugcggcuuugcuaguaauaagacaauugaaugugccugccgggacaacucuuacaccgcgaaacgcccauucgucaagcucaauguggagacugauacagccgaaauacgacugaugugcaccaaaacguauuuagacacccccagaccugaugacggcuccaucacagggccaugugagagcaacggagguaagggcucugggggaauuaaaggcgguuuuguacaucagaggauggcaucgaagaucgggcggugguacucccguacuaugucaaaaaccgagcgcaagggcaugggacuguauguuaaguacgauggcgaccccugggcugacagugaugcccucgcuuucagcggggugauggucuccauggaggaaccgggaugguacucuuuugguuucgaaauaaaagacaagaaaugcgaugugccuuguauuggcaucgagauggugcacgacgggggaaaggaaacauggcauagcgccgcaacugccaucuauugccuuaugggcucaggucagcuguugugggauaccgucacagggguuaacauggcucuauga

SEQ ID NO: 157520 - RNA, 1401 nt, Artificial Sequence
  derived and/or modified CDS sequence (opt3) from neuraminidase__InfluenzaB__AGX20111
augcugcccagcaccauccagacacucacucuuuuccugacguccggcgggguguuguuaucucuguacgucucagccagucuaagcuaucuccuguacuccgacauucuucugaaguuuucuccuaccgagauaacagcuccaacuaugccguuggauugcgcaaacgccucgaauguucaagcggugaacagaucagcuaccaaaggaguaacacuccugcugcccgaaccugaguggaccuauccaaggcucagcugucccgguaguacuuuccagaaggccuuacugaucuccccucaccgguuuggcgaaacaaaaggaaauucugcaccacuuauuauccgcgagcccuucauugccugcgggccuaacgaauguaagcauuuugcuuugacccacuacgcagcccagccaggcgguuauuacaaugggacgcgaggagaccguaacaaacugagacaucuaaucagcgugaagcucggcaagauaccgacugucgaaaauuccaucuuccacauggcugccuggucaggcagugcgugccaugaugggaaagaguggaccuauauuggaguggacggucccgauaacaaugcacugcuuaagguuaaauacggcgaggccuacacagacacuuaucacagcuacgcuaacaagauccugaggacccaggagucugccuguaauugcauugggggaaacuguuauuugaugaucacagauggcuccgcaucaggugugagcgaaugccgguuucucaaaauacgcgaggggagaauuaucaaggagauuuucccuaccggaagggucaagcacacggaagaguguacuugcggcuuugcuaguaauaaaacaaucgaaugugccugccgggacaacucuuacaccgcgaagcgcccauucgugaaacugaauguagagacugauacagccgaaauccgauuaaugugcaccgacacguaucuggauacccccagaccugacgauggcuccauuacagggccaugugagagcaacggagacaaggguucgggcgggauaaaaggaggcuuuguucaucaaaggauggagucuaagaucggucggugguacucccguacuaugucaaaaaccgaacgcauggggaugggccucuaugugaaguacgacggagaucccugggcagacagugaugcucuuacauucagcggcgucaugguguccaugaaggagccggggugguacucuuuuggauucgaaauuaaagacaagaaaugcgaugugccuuguaucgguauagagaugguccacgacggcgggaaggaaacuuggcauagcgccgcuaccgccauuuauugccugaugggaucaggccaguugcuaugggauacaguuaccgguguggacauggcacuguga

SEQ ID NO: 157521 - RNA, 1401 nt, Artificial Sequence
  derived and/or modified CDS sequence (opt3) from neuraminidase__InfluenzaB__AGX20122
augcugcccagcaccauccagacacucacucuuuuccugacguccggcgggguguuguuaucucuguacgucucagcccuacucaguuaucugcuuuacagcgacauucuguugaaguuuuccccuaccgagauaacagcuccaacuaugucucucgauugcgcaaacgccucgaauguucaagcggugaacagaucagcuaccaaaggaguaacauuccugcugccggaacccgaguggaccuauccuaggcucagcuguccagguaguacuuuucagcgggccuuacugaucucuccccaccgcuucggcgaaacaaagggaaauuccgcaccucuuauuauccgagagccauuuauugccugcgggcccaacgaauguaaacauuucgcuuugacccacuacgcagcccagccuggcgguuauuacaaugggacgcguggagacagaaacaagcugaggcaucuaaucagcgugaaacucggcaagauaccaacugucgaaaauuccaucuuucacauggcugccuggucaggcagugcgugccaugaugggaaggaguggaccuauauuggaguggacgguccggauaacgacgcacugcuuaaaguuaaguacggcgaggccuacacagauacuuaucacagcuacgcuaauaaaauccugcggacccaggagucugccuguaacugcauugggggaaauuguuauuugaugaucacagacggcuccgcaucaggugugagcgaaugccgcuuccucaagauaagagaggggaggauuaucaaagagauuuuucccaccggacgggucaagcacacggaagaguguacuugcggcuucgcuaguaacaagacaaucgaaugugccugccgcgauaauucuuacaccgcgaaacgaccuuuugugaagcugaacguagagacugacacagccgaaaucagauuaaugugcaccgauacguaucuggacaccccaaggcccgaugacggcuccauuacagggccuugugagagcaauggagacaaagguucgggcgggauaaagggaggcuucguucaucaacggauggagucuaaaaucggucguugguacucccgcacuaugucaaagaccgaaagaauggggaugggccucuaugugaaauacgauggagacccaugggcagauagugacgcucuugccuuuagcggcgucaugguguccaugaaggagcccgggugguacucuuucggauucgaaauuaaggauaaaaagugcgacgugccguguaucgguauagagaugguccacgauggcgggaaagaaacauggcauagcgcugccacugcaauuuauugccugaugggaucaggccaguugcuaugggacaccguuacagguguggauauggcccuguga

SEQ ID NO: 157522 - RNA, 1401 nt, Artificial Sequence
  derived and/or modified CDS sequence (opt3) from neuraminidase__InfluenzaB__AGX20133
augcugcccagcaccauccagacacucacucuuuuccugacguccggcgggguguuguuaucucuguacgucucagcccuacucaguuaucugcuuuacagcgacguucuguugaaguuuuccccuaccgagauuacagcuccaacuaugucucucgauugcgcaaacgccucgaaugugcaagcgguaaacagaucagcuaccaaaggagugacauuccugcugccggaacccgaguggaccuauccuaggcucagcuguccagguaguacuuuucagaaggccuuacugauaucuccccaccgguucggcgaaacaaaaggaaauuccgcaccucuuaucauucgcgagccauuuaucgccugcgggcccaacgaauguaagcauuucgcuuugacccacuacgcagcccagccuggcgguuauuacaaugggacgcgaggagaccguaacaaacugagacaucuaauuagcgucaagcucggcaagaucccaacuguggaaaauuccauauuucacauggcugccuggucaggcagugcgugccaugaugggaaagaguggaccuauaucggaguugacgguccggauaacgacgcacugcuuaaggugaaauacggcgaggccuacacagauacuuaucacagcuacgcuaauaagauucugaggacccaggagucugccuguaacugcaucgggggaaauuguuauuugaugauuacagacggcuccgcaucaggugucagcgaaugccgguuccucaaaauccgcgaggggagaauaauuaaggagaucuuucccaccggaagggugaagcacacggaagaguguacuugcggcuucgcuaguaacaaaacaauugaaugugccugccgggauaauucuuacaccgcgaagcgcccuuuuguaaaacugaacguugagacugacacagccgaaauccgauuaaugugcaccgauacguaucuggacaccccaagacccgaugacggcuccaucacagggccuugugagagcaauggagacaaggguucgggcgggauuaaaggaggcuucgugcaucaaaggauggagucuaagauaggucggugguacucccguacuaugucaaaaaccgaacgcauggggaugggccucuaugucaaguacgauggagacccaugggcagauagugacgcucuugccuuuagcggcgugaugguguccaugaaggagcccgggugguacucuuucggauucgaaaucaaagauaagaaaugcgacgucccguguauugguaucgagaugguucacgauggcgggaaggaaacauggcauagcgcugccacugcaauauauugccugaugggaucaggccaguugcuaugggacaccgugacagguguagauauggcccuguga

SEQ ID NO: 157523 - RNA, 1401 nt, Artificial Sequence
  derived and/or modified CDS sequence (opt3) from neuraminidase__InfluenzaB__AGX20144
augcugcccagcaccauccagacacucacucuuuuccugacguccggcgggguguuguuaucucuguacgucucagcccuacucaguuaucugcuuuacagcgacauucuguugaaguuuuccccuaccgagauaacagcuccaacuaugucucucgauugcgcaaacgccucgaauguucaagcggugaacagaucagcuaccaaaggaguaacauuccugcugccggaacccgaguggaccuauccuaggcucagcuguccagguaguacuuuucagaaggccuuacugaucucuccccaccgguucggcgaaacaaaaggaaauuccgcaccucuuauuauccgcgagccauuuauugccugcgggcccaacgaauguaagcauuucgcuuugacccacuacgcagcccagccuggcgguuauuacaaugggacgcgaggagaccguaacaaacugagacaucuaaucagcgugaagcucggcaagauaccaacugucgaaaauuccaucuuucacauggcugccuggucaggcagugcgugccaugaugggaaagaguggaccuauauuggaguggacgguccggauaacgacgcacugcuuaagguuaaauacggcgaggccuacacagauacuuaucacagcuacgcuaauaagauccugaggacccaggagucugccuguaacugcauugggggaaauuguuauuugaugaucacagacggcuccgcaucagguauaagcgaaugccgguuccucaaaauucgcgaggggagaaucauuaaggagaucuuucccaccggaagggugaagcacacggaagaguguacuugcggcuucgcuaguaacaaaacaaucgaaugugccugccgggauaauucuuacaccgcgaagcgcccuuuugucaaacugaacguggagacugacacagccgaaauucgauuaaugugcaccgauacguaucuggacaccccaagacccgaugacggcuccauaacagggccuugugagagcaauggagacaaggguucgggcgggaucaaaggaggcuucguacaucaaaggauggagucuaagauuggucggugguacucccguacuaugucaaaaaccgaacgcauggggaugggccucuauguuaaguacgauggagacccaugggcagauagugacgcucuugccuuuagcggcgugauggucuccaugaaggagcccgggugguacucuuucggauucgaaaucaaagauaagaaaugcgacgugccguguauagguauugagauggugcacgauggcgggaaggaaacauggcauagcgcugccacugcaaucuauugccugaugggaucaggccaguugcuaugggacaccgucacagguguugauauggcccuguga

SEQ ID NO: 157524 - RNA, 1401 nt, Artificial Sequence; identical to SEQ ID NO: 157523
  derived and/or modified CDS sequence (opt3) from neuraminidase__InfluenzaB__AGX20155

SEQ ID NO: 157525 - RNA, 1401 nt, Artificial Sequence; identical to SEQ ID NO: 157523
  derived and/or modified CDS sequence (opt3) from neuraminidase__InfluenzaB__AGX20166

SEQ ID NO: 157526 - RNA, 1401 nt, Artificial Sequence; identical to SEQ ID NO: 156943
  derived and/or modified CDS sequence (opt3) from neuraminidase__InfluenzaB__AGX20177

SEQ ID NO: 157527 - RNA, 1401 nt, Artificial Sequence; identical to SEQ ID NO: 156943
  derived and/or modified CDS sequence (opt3) from neuraminidase__InfluenzaB__AGX20188

SEQ ID NO: 157528 - RNA, 1401 nt, Artificial Sequence; identical to SEQ ID NO: 156920
  derived and/or modified CDS sequence (opt3) from neuraminidase__InfluenzaB__AGX20199

SEQ ID NO: 157529 - RNA, 1401 nt, Artificial Sequence; identical to SEQ ID NO: 156943
  derived and/or modified CDS sequence (opt3) from neuraminidase__InfluenzaB__AGX20210

SEQ ID NO: 157530 - RNA, 1401 nt, Artificial Sequence; identical to SEQ ID NO: 157523
  derived and/or modified CDS sequence (opt3) from neuraminidase__InfluenzaB__AGX20221

SEQ ID NO: 157531 - RNA, 1401 nt, Artificial Sequence
  derived and/or modified CDS sequence (opt3) from neuraminidase__InfluenzaB__AGX20232
augcugcccagcaccauccagacacucacucuuuuccugacguccggcgggguguuguuaucucuguacgucucagccagucuaagcuaucuccuguacuccgguauucuucugaaguuuucuccuaccgagauaacagcuccaacuaugccguuggacugcgcaaacgccucgaauguucaagcggugaacagaucagcuaccaaaggaguaacauuccuccugcccgaaccugaguggaccuauccaaggcugagcugucccggcaguacuuuucagaaggcccucuuaaucuccccucaccgguucggggaaacaaaaggaaauucugcaccacugauuauccgcgagcccuuuauugccugcggcccuaacgaauguaagcauuucgcucuuacccacuacgcagcccagccagguggguauuacaauggaacgcgaggcgaucguaacaaauugagacaucugaucagcgugaagcuaggcaagauaccgacugucgaaaauuccaucuuucacauggcugccuggucagggagugcgugccaugacggaaaagaguggaccuauauugguguggauggccccgacaacaaugcacuccugaagguuaaauacggggaggccuacacagauacuuaucacagcuacgcuaacaagauccuuaggacccaggagucugccuguaauugcauuggaggcaacuguuaucugaugaucacagacgguuccgcaucaggggugagcgaaugccgguucuugaaaauacgcgagggaagaauuaucaaggagauuuuuccuaccggcagggucaagcacacggaagaguguacuugcggcuucgcuaguaaugaaacaaucgagugugccugccgggauaacucuuacaccgcgaaacgcccauuugugaagcucaauguagaaacugacacagccgagauccgacugaugugcaccgauacguauuuagacacccccagaccuaacgauggguccauuacaggaccaugugagagcaacggugacaaaggcgggggaggcauaaaggguggguucguucaucaaaggauggaaucgaaaaucggccggugguacucucguacuauguccaagaccgagcgcaugggaaugggccuguaugugaaauacgauggggaccccugggcagacucagaugcucucgccuuuaguggagucauggugagcaugaaggaaccggguugguacuccuucggcuucgagauuaaggacaaaaagugcgaugugccuuguaucgggauagaaaugguccacgacggaggcaaagagacauggcauucugcugccacugcaauuuauugccuuauggguagcgggcagcuguugugggauaccguuacaggcguggacauggcccuauga

SEQ ID NO: 157532 - RNA, 1401 nt, Artificial Sequence; identical to SEQ ID NO: 156943
  derived and/or modified CDS sequence (opt3) from neuraminidase__InfluenzaB__AGX20243

SEQ ID NO: 157533 - RNA, 1401 nt, Artificial Sequence; identical to SEQ ID NO: 157523
  derived and/or modified CDS sequence (opt3) from neuraminidase__InfluenzaB__AGX20254

SEQ ID NO: 157534 - RNA, 1401 nt, Artificial Sequence; identical to SEQ ID NO: 156920
  derived and/or modified CDS sequence (opt3) from neuraminidase__InfluenzaB__AGX20265

SEQ ID NO: 157535 - RNA, 1401 nt, Artificial Sequence; identical to SEQ ID NO: 157523
  derived and/or modified CDS sequence (opt3) from neuraminidase__InfluenzaB__AGX20276

SEQ ID NO: 157536 - RNA, 1401 nt, Artificial Sequence; identical to SEQ ID NO: 156943
  derived and/or modified CDS sequence (opt3) from neuraminidase__InfluenzaB__AGX20287

SEQ ID NO: 157537 - RNA, 1401 nt, Artificial Sequence
  derived and/or modified CDS sequence (opt3) from neuraminidase__InfluenzaB__AGX20298
augcugcccagcaccauccagacacucacucuuuuccugacguccggcgggguguuguuaucucuguacgucucagcccuacucaguuaucugcuuuacagcgacauucuguugaaguuuuccccuaccgagauaacagcuccaacuaugucucucgauugcgcaaacgccucgaauguucaagcggugaacagaucagcuaccaaaggaguaacauuccugcugccggaacccgaguggaccuauccuaggcucagcuguccagguaguacuuuucagaaggccuuacugaucucuccccaccgguucggcgaaacaaaaggaaauuccgcaccucuuauuauccgcgagccauuuauugccugcgggcccaacgaauguaagcauuucgcuuugacccacuacgcagcccagccuggcgguuauuacaaugggacgcgaggagaccguaacaaacugagacaucuaaucagcgugaagcucggcaagauaccaacugucgaaaauuccaucuuucacauggcugccuggucaggcagugcgugccaugaugggaaagaguggaccuauauuggaguggacgguccggauaacgacgcacugcuuaagguuaaauacggcgaggccuacacagauacuuaucacagcuacgcuaauaagauccugaggacccaggagucugccuguaacugcauugggggaaauuguuauuugaugaucacagacggcuccgcaucaggugugagcgaaugccgguuccucaaaauacgcgaggggagaauuaucaaggagauuuuucccaccggaagggucaagcacacggaagaguguacuugcggcuucgcuaguaacaaaacaaucgaaugugccugccgggauaauucuuacaccgcgaagcgcccuuuugugaaacugaacguagagacugacacagccgaaauccgauuaaugugcaccgauacguaucuggacaccccaagacccgaugacggcuccauuacagggccuugugagagcaauggagacaaggguucgggcgggauaaaaggaggcuucguucaucaaaggauggagucuaagaucggucggugguacucccguacuaugucaaaaaccgaacgcauggggaugggccucuaugugaaguacgauggagacccaugggcagauagugacgcucuugccuuuagcggcgucaugguguccaugaaggagcccgggugguacucuuucggauucgaaauuaaagauaagaaaugcgacgugccguguaucgguauagagaugguccacgauggcgggaaggaaacauggcagagcgcugccacugcaauuuauugccugaugggaucaggccaguugcuaugggacaccguuacagguguggauauggcccuguga

SEQ ID NO: 157538 - RNA, 1401 nt, Artificial Sequence; identical to SEQ ID NO: 156920
  derived and/or modified CDS sequence (opt3) from neuraminidase__InfluenzaB__AGX20320

SEQ ID NO: 157539 - RNA, 1401 nt, Artificial Sequence; identical to SEQ ID NO: 156943
  derived and/or modified CDS sequence (opt3) from neuraminidase__InfluenzaB__AGX20331

SEQ ID NO: 157540 - RNA, 1401 nt, Artificial Sequence
  derived and/or modified CDS sequence (opt3) from neuraminidase__InfluenzaB__AGX20342
augcugcccagcaccauccagacacucacucuuuuccugacguccggcgggguguuguuaucucuguacgucucagccagucuaagcuaucuccuguacuccgacauucuucugaaguuuucuccuaccgagauaacagcuccaacuaugccguuggauugcgcaaacgccucgaauguucaagcggugaacagaucagcuaccaaaggaguaacacuccugcugcccgaaccugaguggaccuauccaaggcucagcugucccgguaguacuuuccagaaggccuuacugaucuccccucaccgguuuggcgaaacaaaaggaaauucugcaccacuuauuauccgcgagcccuucauugccugcgggccuaacgaauguaagcauuuugcuuugacccacuacgcagcccagccaggcgguuauuacaaugggacgcgaggagaccguaacaaacugagacaucuaaucagcgugaagcucggcaagauaccgacugucgaaaauuccaucuuccacauggcugccuggucaggcagugcgugccaugaugggaaagaguggaccuauauuggaguggacggucccgauaacaaugcacugcuuaagguuaaauacggcgaggccuacacagacacuuaucacagcuacgcuaacaagauccugaggacccaggagucugccuguaauugcauugggggaaacuguuauuugauggugacagauggcuccgcaucaggugucagcgaaugccgguuucucaaaauccgcgaggggagaauaauuaaggagaucuucccuaccggaagggugaagcacacggaagaguguacuugcggcuuugcuaguaauaaaacaauugaaugugccugccgggacaacucuuacaccgcgaagcgcccauucguaaaacugaauguugagacugauacagccgaaauccgauuaaugugcaccgacacguaucuggauacccccagaccugacgauggcuccaucacagggccaugugagagcaacggagacaaggguucgggcgggauuaaaggaggcuuugugcaucaaaggauggagucuaagauaggucggugguacucccguacuaugucaaaaaccgaacgcauggggaugggccucuaugucaaguacgacggagaucccugggcagacagugaugcucuugccuucagcggcgugaugguguccaugaaggagccggggugguacucuuuuggauucgaaaucaaagacaagaaaugcgaugucccuuguauugguaucgagaugguucacgacggcgggaaggaaacauggcauagcgcugccacugcaauauauugccugaugggaucaggccaguugcuaugggauaccgugacagguguagacauggcccuguga

SEQ ID NO: 157541 - RNA, 1401 nt, Artificial Sequence
  derived and/or modified CDS sequence (opt3) from neuraminidase__InfluenzaB__AGX20353
augcugcccagcaccauccagacacucacucuuuuccugacguccggcgggguguuguuaucucuguacgucucagcccuacucaguuaucugcuuuacagcgacauucuguugaaguuuuccccuaccgagauaaucgcuccaacaaugucucucgauugcgcaaacgccucgaauguucaagcggugaacagaucagcuacuaaaggaguaaccuuccugcugccggaacccgaguggacauauccuaggcucagcuguccagguaguaccuuucagaaggccuuacugauuucuccccaccgguucggcgaaacuaaaggaaauuccgcaccucuuaucauucgcgagccauuuaucgccugcgggcccaacgaauguaagcauuucgcuuugacacacuacgcagcccagccuggcgguuauuacaaucgaacccguggggacagaaacaaacugaggcaucuaauaagcgugaagcucggaaagaucccaacggucgaaaauuccauuuuucacauggcugccuggucaggcagugcgugccaugauggcaaagaguggacuuauaucgggguggacggaccggauaacgacgcacugcuuaagguuaaauacggugaggccuacaccgauacauaucacagcuacgcuaauaagauucugcggacucaggagucugccuguaacugcaucggcgggaauuguuauuugaugauaaccgacggauccgcaucaggcauuagcgaaugccgcuuccucaaaaucagagaggguaggauuaucaaggagaucuuucccacagggcgggugaagcacaccgaagaguguacgugcggauucgcuaguaacaaaacuauugaaugugccugccgcgauaauucuuacacagcgaagcgaccuuuugucaaacugaacguggagaccgacacugccgaaauaagauuaaugugcacagauaccuaucuggacacgccaaggcccgaugacggcuccaucaccggcccuugugagagcaauggggacaagggaucggguggcauuaaagggggauucguacaucaacggauggagucuaagaucggccguugguacucccgcacaaugucaaaaacugaaagaauggguauggggcucuauguuaaguacgauggcgacccaugggcagauagugacgcucuugccuuuagcggagugauggucuccaugaaggagcccggcugguacucuuucggguucgaaauaaaagauaagaaaugcgacgugccguguauuggaaucgagauggugcacgaugguggcaaggaaaccuggcauagcgcugccacagcaaucuauugccugauggggucaggacaguugcuaugggacacugucaccggcguugauauggcccuguga

SEQ ID NO: 157542 - RNA, 1401 nt, Artificial Sequence; identical to SEQ ID NO: 156943
  derived and/or modified CDS sequence (opt3) from neuraminidase__InfluenzaB__AGX20364

SEQ ID NO: 157543 - RNA, 1401 nt, Artificial Sequence; identical to SEQ ID NO: 156938
  derived and/or modified CDS sequence (opt3) from neuraminidase__InfluenzaB__AGX20375

SEQ ID NO: 157544 - RNA, 1401 nt, Artificial Sequence
  derived and/or modified CDS sequence (opt3) from neuraminidase__InfluenzaB__AGX20386
augcugcccagcaccauccagacacucacucuuuuccugacguccggcgggguguuguuaucucuguacgucucagcccuacucaguuaucugcuuuacagcgacauucuguugaaguuuuccccuaccgagauaacagcuccaacuaugucucucgauugcgcaaacgccucgaauguucaagcggugaacagaucagcuaccaaaggaguaacauuccugcugccggaacccgaguggacccacccuaggcucagcuguccagguaguacuuuucagaaggccuuacugaucucuccccaucgguucggcgaaacaaaaggaaauuccgcaccucuuauuauccgcgagccauuuauugccugcgggcccaacgaauguaagcacuucgcuuugacccauuaugcagcccagccuggcgguuacuauaaugggacgcgaggagaccguaacaaacugagacaccuaaucagcgugaagcucggcaagauaccaacugucgaaaauuccaucuuucauauggcugccuggucaggcagugcgugccacgaugggaaagaguggaccuacauuggaguggacgguccggauaacgacgcacugcuuaagguuaaauauggcgaggccuacacagauacuuaccacagcuaugcuaauaagauccugaggacccaggagucugccuguaacugcauugggggaaauuguuacuugaugaucacagacggcuccgcaucagguauaagcgaaugccgguuccucaaaauucgcgaggggagaaucauuaaggagaucuuucccaccggaagggugaagcauacggaagaguguacuugcggcuucgcuaguaacaaaacaaucgaaugugccugccgggauaauucuuauaccgcgaagcgcccuuuugucaaacugaacguggagacugacacagccgaaauucgauuaaugugcaccgauacguaccuggacaccccaagacccgaugacggcuccauaacagggccuugugagagcaauggagacaaggguucgggcgggaucaaaggaggcuucguacaccaaaggauggagucuaagauuggucggugguauucccguacuaugucaaaaaccgaacgcauggggaugggccucuacguuaaguaugauggagacccaugggcagauagugacgcucuugccuuuagcggcgugauggucuccaugaaggagcccgggugguacucuuucggauucgaaaucaaagauaagaaaugcgacgugccguguauagguauugagauggugcaugauggcgggaaggaaacauggcacagcgcugccacugcaaucuacugccugaugggaucaggccaguugcuaugggacaccgucacagguguugauauggcccuguga

SEQ ID NO: 157545 - RNA, 1401 nt, Artificial Sequence; identical to SEQ ID NO: 156943
  derived and/or modified CDS sequence (opt3) from neuraminidase__InfluenzaB__AGX20397

SEQ ID NO: 157546 - RNA, 1401 nt, Artificial Sequence; identical to SEQ ID NO: 156938
  derived and/or modified CDS sequence (opt3) from neuraminidase__InfluenzaB__AGX20408

SEQ ID NO: 157547 - RNA, 1401 nt, Artificial Sequence; identical to SEQ ID NO: 156920
  derived and/or modified CDS sequence (opt3) from neuraminidase__InfluenzaB__AGX20419

SEQ ID NO: 157548 - RNA, 1401 nt, Artificial Sequence
  derived and/or modified CDS sequence (opt3) from neuraminidase__InfluenzaB__AGX20430
augcugcccagcaccauccagacacucacucuuuuccugacguccggcgggguguuguuaucucuguacgucucagcccuacucaguuaucugcuuuacagcgacauucuguugaaguuuuccccuaccgagauaacagcuccaacuaugucucucgauugcgcaaacgccucgaauguucaagcggugaacagaucagcuaccaaaggaguaacauuccugcugccggaacccgaguggaccuauccuaggcucagcuguccagguaguacuuuucagcgggccuuacugaucucuccccaccgcuucggcgaagcaaagggaaauuccgccccucuuauuauccgagagccauuuauugcuugcgggcccaacgaauguaaacauuucgcauugacacacuacgccgcucagccuggcgguuauuacaaugggacccguggagacagaaacaagcugaggcaucuaaucagcgugaaacucggcaagauaccaacggucgaaaauuccaucuuucacauggccgcguggucaggcagugcaugccaugaugggaaggaguggacuuauauuggaguggacgguccggauaacgacgcccugcuuaaaguuaaguacggcgaggcuuacaccgauacauaucacagcuacgccaauaaaauccugcggacucaggagucugcauguaacugcauugggggaaauuguuauuugaugaucaccgacggcuccgcuucaggugugagcgaaugccgcuuccucaagauaagagaggggaggauuaucaaagagauuuuucccacaggacgggucaagcacaccgaagaguguacgugcggcuucgccaguaacaagacuaucgaaugugcgugccgcgauaauucuuacacagccaaacgaccuuuugugaagcugaacguagagaccgacacugcagaaaucagauuaaugugcacagauaccuaucuggacacgccaaggcccgaugacggcuccauuaccgggccuugugagagcaauggagacaaagguucgggcgggauaaagggaggcuucguucaucaacggauggagucuaaaaucggucguugguacucccgcacaaugucaaagacugaaagaauggggaugggccucuaugugaaauacgauggagacccaugggcugauagugacgcccuugcuuuuagcggcgucaugguguccaugaaggagcccgggugguacucuuucggauucgaaauuaaggauaaaaagugcgacgugccguguaucgguauagagaugguccacgauggcgggaaagaaaccuggcauagcgccgcaacagccauuuauugccugaugggaucaggccaguugcuaugggacacuguuaccgguguggauauggcucuguga

SEQ ID NO: 157549 - RNA, 1401 nt, Artificial Sequence; identical to SEQ ID NO: 156920
  derived and/or modified CDS sequence (opt3) from neuraminidase__InfluenzaB__AGX20441

SEQ ID NO: 157550 - RNA, 1401 nt, Artificial Sequence
  derived and/or modified CDS sequence (opt3) from neuraminidase__InfluenzaB__AGX20452
augcugcccagcaccauccagacacucacucuuuuccugacguccggcgggguguuguuaucucuguacgucucagccagucuaagcuaucuccuguacuccgacauucuucugaaguuuucuccuaccgagauaacagcuccaacuaugucguuggauugcgcaaacgccucaaauguucaagcggugaacagaagcgcuaccaaaggaguaacauuccuccugccggaacccgaguggaccuauccuaggcugaguuguccagguuccacuuuucagaaggcccucuuaaucucuccccaccgguucggcgaaacaaaagggaauagcgcaccucugauuauccgcgagccauuuauugccugcggacccaacgaauguaagcauuucgcucuuacccacuacgcagcccagccuggcgguuauuacaaugggacgcgaggagaccguaacaaauugagacaucugaucuccgugaagcuaggcaagauaccaacugucgaaaauucaaucuuucacauggcugccuggaguggcagcgcgugccaugaugggaaagaguggaccuauauuggaguggacgguccggauaacgacgcacuccugaagguuaaauacggcgaggccuacacagauacuuaucacucuuacgcuaauaagauccuuaggacccaggaguccgccuguaacugcauugggggaaauuguuaucugaugaucacagacggcucagcaagcggugugagugaaugccgguucuugaaaauacgcgaggggagaauuaucaaggagauuuuucccaccggaagggucaagcacacggaagaguguacuugcggcuucgcuucuaacaaaacaaucgaaugugccugccgggauaauuccuacaccgcgaagcgcccuuuugugaaacucaacguagagacugacacagccgaaauccgacugaugugcaccgauacguauuuagacaccccaagacccgaugacggcagcauuacagggccuugugagucgaauggagacaaggguucuggcgggauaaaaggaggcuucguucaucaaaggauggaguccaagaucggucggugguacucacguacuaugaguaaaaccgaacgcauggggaugggccuguaugugaaguacgauggagacccaugggcagauagcgacgcucucgccuuuuccggcgucauggugucuaugaaggagcccgggugguacagcuucggauucgaaauuagagauaaaaagugcgacgugccguguaucgguauagagaugguccacgauggcgggaaagaaacauggcauucagcugccacugcaauuuauugccuuaugggaaguggccagcuguugugggacaccguuacagguguggauauggcccuauga

SEQ ID NO: 157551 - RNA, 1401 nt, Artificial Sequence; identical to SEQ ID NO: 156943
  derived and/or modified CDS sequence (opt3) from neuraminidase__InfluenzaB__AGX20463

SEQ ID NO: 157552 - RNA, 1401 nt, Artificial Sequence; identical to SEQ ID NO: 156943
  derived and/or modified CDS sequence (opt3) from neuraminidase__InfluenzaB__AGX20474

SEQ ID NO: 157553 - RNA, 1401 nt, Artificial Sequence; identical to SEQ ID NO: 156943
  derived and/or modified CDS sequence (opt3) from neuraminidase__InfluenzaB__AGX20485

SEQ ID NO: 157554 - RNA, 1401 nt, Artificial Sequence; identical to SEQ ID NO: 157523
  derived and/or modified CDS sequence (opt3) from neuraminidase__InfluenzaB__AGX20496

SEQ ID NO: 157555 - RNA, 1401 nt, Artificial Sequence; identical to SEQ ID NO: 156943
  derived and/or modified CDS sequence (opt3) from neuraminidase__InfluenzaB__AGX20507

SEQ ID NO: 157556 - RNA, 1401 nt, Artificial Sequence; identical to SEQ ID NO: 156943
  derived and/or modified CDS sequence (opt3) from neuraminidase__InfluenzaB__AGX20518

SEQ ID NO: 157557 - RNA, 1401 nt, Artificial Sequence
  derived and/or modified CDS sequence (opt3) from neuraminidase__InfluenzaB__AGX20529
augcugcccagcaccauccagacacucacucuuuuccugacguccggcgggguguuguuaucucuguacgucucagcccuacucaguuaucugcuuuacagcgacauucuguugaaguuuuccccuaccgagauaacagcuccaacuaugucucucgauugcgcaaacgccucgaauguucaagcggugaacagaucagcuaccaaaggaguaacauuccugcugccggaacccgaguggaccuauccuaggcucagcuguccagguaguacuuuucagaaggccuuacugaucucuccccaccgguucggcgaaacaaaaggaaauuccgcaccucuuauuauccgcgagccauuuauugccugcgggcccaacgaauguaagcauuucgcuuugacccacuacgcagcccagccuggcgguuauuacaaugggacgcgaggagaccguaacaaacugagacaucuaaucagcgugaagcucggcaagauaccaacugucgaaaauuccaucuuucacauggcugccuggucaggcagugcgugccaugaugggaaagaguggaccuauauuggaguggacgguccggauaacgacgcacugcuuaagguuaaauacggcgaggccuacacagauacuuaucacagcuacgcuaauaagauccugaggacccaggagucugccuguaacugcauugggggaaauuguuauuugaugaucacagacggcuccgcaucaggugugagcgaaugccgguuccucaaaauacgcgaggggagaauuaucaaggagauuuuucccaccggaagggucaagcacacggaagaguguacuugcggcuucgcuaguaacaaaacaaucgaauguaccugccgggauaauucuuacacugccaagcgcccuuuugugaaacugaacguagagacagacaccgcggaaauccgauuaaugugcacggauaccuaucuggacacaccaagacccgaugacggcuccauuacugggccuugugagagcaauggagacaaggguucgggcgggauaaaaggaggcuucguucaucaaaggauggagucuaagaucggucggugguacucccguaccaugucaaaaacagaacgcauggggaugggccucuaugugaaguacgauggagacccaugggccgauagugacgcacuugcuuuuagcggcgucaugguguccaugaaggagcccgggugguacucuuucggauucgaaauuaaagauaagaaaugcgacgugccguguaucgguauagagaugguccacgauggcgggaaggaaacuuggcauagcgccgcuaccgccauuuauugccugaugggaucaggccaguugcuaugggacacaguuaccgguguggauauggcacuguga

SEQ ID NO: 157558 - RNA, 1401 nt, Artificial Sequence; identical to SEQ ID NO: 157521
  derived and/or modified CDS sequence (opt3) from neuraminidase__InfluenzaB__AGX20540

SEQ ID NO: 157559 - RNA, 1401 nt, Artificial Sequence; identical to SEQ ID NO: 157167
  derived and/or modified CDS sequence (opt3) from neuraminidase__InfluenzaB__AGX20551

SEQ ID NO: 157560 - RNA, 1401 nt, Artificial Sequence; identical to SEQ ID NO: 156920
  derived and/or modified CDS sequence (opt3) from neuraminidase__InfluenzaB__AGX20562

SEQ ID NO: 157561 - RNA, 1401 nt, Artificial Sequence; identical to SEQ ID NO: 156943
  derived and/or modified CDS sequence (opt3) from neuraminidase__InfluenzaB__AGX20573

SEQ ID NO: 157562 - RNA, 1401 nt, Artificial Sequence
  derived and/or modified CDS sequence (opt3) from neuraminidase__InfluenzaB__AGX20584
augcugcccagcaccauccagacacucacucuuuuccugacguccggcgggguguuguuaucucuguacgucucagccagucuaagcuaucuccuguacuccgacauucuucugaaguuuucuucgaccgagauaacagcuccuacuaugccauuggauugcgcaaacgccucaaauguucaagcggugaacagaagcgcuaccaaaggaguaacacuccugcugccggaacccgaguggaccuauccuaggcucaguuguccagguuccacuuuccagaaggccuuacugaucucuccccaccgguuuggcgaaacaaaagggaauagcgcaccucuuauuauccgcgagccauucauugccugcggacccaacgaauguaagcauuuugcuuugacccacuacgcagcccagccuggcgguuauuacaaugggacgcgaggagaccguaacaaacugagacaucuaaucuccgugaagcucggcaagauaccaacugucgaaaauucaaucuuccacauggcugccuggaguggcagcgcgugccaugaugggaaagaguggaccuauauuggaguggacgguccggauaacaaugcacugcuuaagguuaaauacggcgaggccuacacagacacuuaucacucuuacgcuaacaagauccugaggacccaggaguccgccuguaauugcauugggggaaacuguuauuugaugaucacagauggcucagcaagcggugugagugaaugccgguuucucaaaauacgcgaggggagaauuaucaaggagauuuuccccaccggaagggucaagcacacggaagaguguacuugcggcuuugcuucuaauaaaacaaucgaaugugccugccgggacaacuccuacaccgcgaagcgcccuuucgugaaacugaauguagagacugauacagccgaaauccgauuaaugugcaccgacacguaucuggauaccccaagacccaacgacggcagcauuacagggccuugugagucgaacggagauaaggguucuggcgggauaaaaggaggcuuuguucaucaaaggauggagucccggaucggucguugguacucacgcacuaugaguaagaccgaaagaauggggaugggccucuaugugaaauacgacggagacccauggacagauagcgacgcacuuacuuucuccggcgucauggugucuaugaaggagcccgggugguacagcuuuggauucgaaauuaaggauaaaaagugcgacgugccguguaucgguauagagaugguccacgauggcgggaaagaaaccuggcauucagcugccacagcuauuuauugccugaugggaaguggccaguugcuaugggacaccguuacugguguggauauggcccuguga

SEQ ID NO: 157563 - RNA, 1401 nt, Artificial Sequence; identical to SEQ ID NO: 156943
  derived and/or modified CDS sequence (opt3) from neuraminidase__InfluenzaB__AGX20595

SEQ ID NO: 157564 - RNA, 1401 nt, Artificial Sequence; identical to SEQ ID NO: 157521
  derived and/or modified CDS sequence (opt3) from neuraminidase__InfluenzaB__AGX20606

SEQ ID NO: 157565 - RNA, 1401 nt, Artificial Sequence; identical to SEQ ID NO: 157521
  derived and/or modified CDS sequence (opt3) from neuraminidase__InfluenzaB__AGX20617

SEQ ID NO: 157566 - RNA, 1401 nt, Artificial Sequence; identical to SEQ ID NO: 157548
  derived and/or modified CDS sequence (opt3) from neuraminidase__InfluenzaB__AGX20628

SEQ ID NO: 157567 - RNA, 1401 nt, Artificial Sequence; identical to SEQ ID NO: 156948
  derived and/or modified CDS sequence (opt3) from neuraminidase__InfluenzaB__AGX20639

SEQ ID NO: 157568 - RNA, 1401 nt, Artificial Sequence
  derived and/or modified CDS sequence (opt3) from neuraminidase__InfluenzaB__AGX20650
augcugcccagcaccauccagacacucacucuuuuccugacguccggcgggguguuguuaucucuguacgucucagcccuacucaguuaucugcuuuacagcgacauucuguugaaguuuuccccuaccgagauaacagcuccaacuaugucucucgauugcgcaaacgccucgaauguucaagcggugaacagaucagcuaccaaaggaguaacauuccugcugccggaacccgaguggaccuauccuaggcucagcuguccagguaguacuuuucagaaggccuuacugaucucuccccaccgguucggcgaaacaaaaggaaauuccgcaccucuuauuauccgcgagccauuuauugccugcgggcccaacgaauguaagcauuucgcuuugacccacuacgcagcccagccuggcgguuauuacaaugggacgcgaggagaccguaacaaacugagacaucuaaucagcgugaagcucggcaagauaccaacugucgaaaauuccaucuuucacauggcugccuggucaggcagugcgugccaugaugggaaagaguggaccuauauuggaguggacgguccggauaacgacgcacugcuuaagguuaaauacggcgaggccuacacagauacuuaucacagcuacgcuaauaagauccugaggacccaggagucuacauguaacugcauugggggaaauuguuauuugaugaucaccgacggcuccgccucaggugugagcgaaugccgguuccucaaaauacgcgaggggagaauuaucaaggagauuuuucccacgggaagggucaagcacacugaagaguguacaugcggcuucgcaaguaacaaaaccaucgaaugugcuugccgggauaauucuuacacugccaagcgcccuuuugugaaacugaacguagagacagacaccgcggaaauccgauuaaugugcacggauaccuaucuggacacaccaagacccgaugacggcuccauuacugggccuugugagagcaauggagacaaggguucgggcgggauaaaaggaggcuucguucaucaaaggauggagucuaagaucggucggugguacucccguaccaugucaaaaacagaacgcauggggaugggccucuaugugaaguacgauggagacccaugggccgauagugacgcacuugcuuuuagcggcgucaugguguccaugaaggagcccgggugguacucuuucggauucgaaauuaaagauaagaaaugcgacgugccguguaucgguauagagaugguccacgauggcgggaaggaaacuuggcauagcgccgcuaccgccauuuauugccugaugggaucaggccaguugcuaugggacacaguuaccgguguggauauggcacuguga

SEQ ID NO: 157569 - RNA, 1401 nt, Artificial Sequence
  derived and/or modified CDS sequence (opt3) from neuraminidase__InfluenzaB__AGX20661
augcugcccagcaccauccagacacucacucuuuuccugacguccggcgggguguuguuaucucuguacgucucagccagucuaagcuaucuccuguacuccgacauucuucugaaguuuucuccuaccgagauaacagcuccaacuaugccguuggauugcgcaaacgccucgaauguucaagcggugaacagaucagcuaccaaaggaguaacacuccugcugcccgaaccugaguggaccuauccaaggcucagcugucccgguaguacuuuccagaaggccuuacugaucuccccucaccgguuuggcgaaacaaaaggaaauucugcaccacuuauuauccgcgagcccuucauugccugcgggccuaacgaauguaagcauuuugcuuugacccacuacgcagcccagccaggcgguuauuacaaugggacgcgaggagaccguaacaaacugagacaucuaaucagcgugaaucucggcaagauaccgacugucgagaacuccaucuuccacauggcugccuggucaggcagugcgugccaugaugggaaggaguggaccuauauuggaguggacggucccgauaauaacgcacugcuuaaaguuaaguacggcgaagccuacacagacacuuaucacagcuacgcuaauaacauccugaggacccaggagucugccuguaauugcauugggggaaacuguuauuugaugaucacagauggcuccgcaucaggugugagcgaaugccgguuucucaaaauacgcgaggggagaauuaucaaggagauuuucccuaccggaagggucaaacacacggaagaguguacuugcggcuuugcuaguaauaagacaaucgaaugugccugccgggacaacucuuacaccgcgaagcgcccauucgugaaacugaacguagagacugauacagccgaaauccgauuaaugugcaccgacacguaucuggauacccccagaccuaaugacggcuccauuacagggccaugugagagcaacggagauaaggguucgggcgggauaaaaggaggcuuuguucaucaaaggauggagucuaagaucggucggugguacucccguacuaugucaaaaaccgaacgcauggggaugggccucuaugugaaguacgacggagaccccuggacagauagugacgcacuugcuuucagcggcgucaugguguccaugaaagagccggggugguacucuuuuggauucgaaauuaaggauaagaaaugcgacgugccuuguaucgguauagagaugguccacgauggcgggaaggaaacuuggcauagcgccgcuaccgccauuuauugccugaugggaucaggccaguugcuaugggacacaguuaccgguguggauauggcacuguga

SEQ ID NO: 157570 - RNA, 1401 nt, Artificial Sequence; identical to SEQ ID NO: 157004
  derived and/or modified CDS sequence (opt3) from neuraminidase__InfluenzaB__AGX20683

SEQ ID NO: 157571 - RNA, 1401 nt, Artificial Sequence; identical to SEQ ID NO: 157167
  derived and/or modified CDS sequence (opt3) from neuraminidase__InfluenzaB__AGX20694

SEQ ID NO: 157572 - RNA, 1401 nt, Artificial Sequence
  derived and/or modified CDS sequence (opt3) from neuraminidase__InfluenzaB__AGX20705
augcugcccagcaccauccagacacucacucuuuuccugacguccggcgggguguuguuaucucuguacgucucagccagucuaagcuaucuccuguacuccgggauucuucugaaguuuucuccuaccgagauaacagcuccaacuaugccguuggacugcgcaaacgccucggauguucaagcggugaauagaucagcuaccaaagguguaacacuccugcugcccgaaccugaguggaccuauccaaggcucagcugucccggcaguacuuuccagaaggccuuacugaucuccccucaccgguuuggggaaacaaaaggaaacucugcaccacuuauuauccgcgagcccuucauugccugcggcccuaaugaauguaagcauuuugcuuugacccacuacgcagcccagccagguggguauuacaacggaacgcgaggcgaccguaauaaacugagacaucuaaucagcgugaagcucggcaagauaccgacugucgagaacuccaucuuccacauggcugccuggucagggagugcgugccaugauggaaaagaguggaccuauauugguguggacggccccgauaauaacgcacugcuuaagguuaaauacggggaagccuacacagacacuuaucacagcuacgcuaauaagauccugaggacccaggagucugccuguaacugcauuggaggcaauuguuauuugaugaucacagaugguuccgcaucaggggugagcgaaugccgguuucucaaaauacgcgagggaagaauuaucaaggagauuuucccuaccggcagggucaagcacacggaagaguguacuugcggcuuugcuaguaacaaaacaaucgaaugugccugccgggacaauucuuacaccgcgaagcgcccauucgugaaacugaacguagagacugauacagccgaaauccgauuaaugugcaccgacacguaucuggauacccccagaccuaaugacggguccauuacaggaccaugugagagcaacggugauaagggcucgggaggaauaaaaggcgguuuuguucaucaaaggauggagucuaagaucgggcggugguacucccguacuaugucaaaaaccgaacgcaugggcaugggacucuaugugaaguacgacggcgaccccugggcagauagugacgcucuuacauucagcggggucaugguguccaugaaggagccgggaugguacucuuuugguuucgaaauuaaagauaagaaaugcgacgugccuuguaucggcauagagaugguccacgaugggggaaaggaaacuuggcauagcgccgcuaccgccauuuauugccugaugggcucaggucaguugcuaugggacacaguuaccgggguggauauggcacuguga

SEQ ID NO: 157573 - RNA, 1401 nt, Artificial Sequence
  derived and/or modified CDS sequence (opt3) from neuraminidase__InfluenzaB__AGX20716
augcugcccagcaccauccagacacucacucuuuuccugacguccggcgggguguuguuaucucuguacgucucagccagucuaagcuaucuccuguacuccgacauucuucugaaguuuucuccuaccgagauaacagcuccaacuaugccguuggauugcgcaaacgccucgaauguucaagcggugaacagaucagcuaccaaaggaguaacacuccugcugcccgaaccugaguggaccuauccaaggcucagcugucccgguaguacuuuccagaaggccuuacugaucuccccucaccgguuuggcgaaacaaaaggaaauucugcaccacuuauuauccgcgagcccuucauugccugcgggccuaacgaauguaagcauuuugcuuugacccacuacgcagcccagccaggcgguuauuacaaugggacgcgaggagaccguaacaaacugagacaucuaaucagcgugaagcucggcaagauaccgacugucgaaaauuccaucuuccacauggcugccuggucaggcagugcgugccaugaugggaaagaguggaccuauauuggaguggacggucccgauaacaaugcacugcuuaagguuaaauacggcgaggccuacacagacacuuaucacagcuacgcuaacaagauccugaggacccaggagucugccuguaauugcauugggggaaacuguuauuugaugaucacagauggcuccgcaucaggugugagcgaaugccgguuucucaaaauacgcgaggggagaauuaucaaggagauuuucccuaccggaagggucaagcacacggaagaguguacuugcggcuuugcuaguaauaaaacaaucgaaugugccugccgggacaacucuuacaccgcgaagcgcccauucgugaaacugaauguagagacugauacagccgaaauccgauuaaugugcaccgacacguaucuggauacccccagaccuaacgacggcuccauuacagggccaugugagagcgauggagacaaggguucgggcgggauaaaaggaggcuuuguucaucaaaggaucgagucucggauuggucguugguacucccgcacuaugucaaagaccgaaagaauggggaugggccucuaugugaaauacgacggagaucccugggcagacagugaugcucuugccuucagcggcgucaugguguccaugaaggagccggggugguacucuuuuggauucgaaaucaaggacaaaaagugcgaugugccuuguauagguauugagaugguccacgacggcgggaaagaaacauggcauagcgcugccacugcaaucuauugccugaugggaucaggccaguugcuaugggauaccguuacagguguggacauggcccuguga

SEQ ID NO: 157574 - RNA, 1401 nt, Artificial Sequence
  derived and/or modified CDS sequence (opt3) from neuraminidase__InfluenzaB__AGX20727
augcugcccagcaccauccagacacucacucuuuuccugacguccggcgggguguuguuaucucuguacgucucagcccuacucaguuaucugcuuuacagcgacauucuguugaaguuuuccccuaccgagauaacagcuccaacuaugucucucgauugcgcaaacgccucgaauguucaagcggugaacagaucagcuaccaaaggaguaacauuccugcugccggaacccgaguggaccuauccuaggcucagcuguccagguaguacuuuucagaaggccuuacugaucucuccccaccgguucggcgaaacaaaaggaaauuccgcaccucuuauuauccgcgagccauuuauugccugcgggcccaacgaauguaagcauuucgcuuugacccacuacgcagcccagccuggcgguuauuacaaugggacgcgaggagaccguaacaaacugagacaucuaaucagcgugaagcucggcaagauaccaacugucgaaaauuccaucuuucacauggcugccuggucaggcagugcgugccaugaugggaaagaguggaccuauauuggaguggacgguccggauaacgacgcacugcuuaagguuaaauacggcgaggccuacacagauacuuaucacagcuacgcuaauaagauccugaggacccaggagucugccuguaacugcauugggggaaauuguuauuugaugaucacagacggcuccgcaucaggugugagcgaaugccgguuccucaaaauacgcgaggggagaauuaucaaggagauuuuucccaccggaagggucaagcacacggaagaguguacuugcggcuucgcuaguaacaaaacaaucgaaugugccugccgggauaauucuuacaccgcgaagcgcccuuuugugaaacugaacguagagacugacacagccgaaauccgauuaaugugcaccgauacguaucuggacaccccaagacccgaugacggcuccacaacugggccuugugagagcaauggagacaaggguucgggcgggauuaaaggaggcuucguucaucaaaggauggagucuaagauaggucggugguacucccguaccaugucaaaaacagaacgcauggggaugggccucuaugugaaguacgauggagacccaugggcagauagugacgcucuugccuuuagcggcgucaugguguccaugaaggagcccgggugguacucuuucggauucgaaaucaaagauaagaaaugcgacgugccguguauugguaucgagaugguccacgauggcgggaaggaaacuuggcauagcgcugccaccgcaauauauugccugaugggaucaggccaguugcuaugggacacaguuaccgguguggauauggcccuguga

SEQ ID NO: 157575 - RNA, 1401 nt, Artificial Sequence; identical to SEQ ID NO: 157167
  derived and/or modified CDS sequence (opt3) from neuraminidase__InfluenzaB__AGX20738

SEQ ID NO: 157576 - RNA, 1401 nt, Artificial Sequence; identical to SEQ ID NO: 156943
  derived and/or modified CDS sequence (opt3) from neuraminidase__InfluenzaB__AGX20749

SEQ ID NO: 157577 - RNA, 1401 nt, Artificial Sequence
  derived and/or modified CDS sequence (opt3) from neuraminidase__InfluenzaB__AGX20760
augcugcccagcaccauccagacacucacucuuuuccugacguccggcgggguguuguuaucucuguacgucucagccagucuaagcuaucuccuguacuccgacauucuucugaaguuuucuccuaccgagauaacagcuccaacuaugccguuggauugcgcaaacgccucgaauguucaagcggugaacagaucagcuaccaaaggaguaacacuccugcugcccgaaccugaguggaccuauccaaggcucagcugucccgguaguacuuuccagaaggccuuacugaucuccccucaccgguuuggcgaaacaaaaggaaauucugcaccacuuauuauccgcgagcccuucauugccugcgggccuaacgaauguaagcauuuugcuuugacccacuacgcagcccagccaggcgguuauuacaaugggacgcgaggagaccguaacaaacugagacaucuaaucagcgugaagcucggcaagauaccgacugucgaaaauuccaucuuccacauggcugccuggucaggcagugcgugccaugaugggaaagaguggaccuauauuggaguggacggucccgauaacaaugcacugcuuaagguuaaauacggcgaggccuacacagacacuuaucacagcuacgcuaacaagauccugaggacccaggagucugccuguaauugcauugggggaaacuguuauuugaugaucacagauggcuccgcaucaggugugagcgaaugccgguuucucaaaauacgcgaggggagaauuaucaaggagauuuucccuaccggaagggucaagcacacggaagaguguacuugcggcuuugcuaguaauaaaacaaucgaaugugccugccgggacaacucuuacaccgcgaagcgcccauucgugaaacugaauguagagacugauacagccgaaauccgauuaaugugcaccgacacguaucuggauacccccagaccuaacgacggcuccauuacagggccaugugagagcgauggagacaaggguucgggcgggauaaaaggaggcuuuguucaucaaaggauggagucucggaucggucguugguacucccgcacuaugucaaagaccgaaagaauggggaugggccucuaugugaaauacgacggagaucccugggcagacagugaugcucuugccuucagcggcgucaugguguccaugaaggagccggggugguacucuuuuggauucgaaauuaaggacaaaaagugcgaugugccuuguaucgguauagagaugguccacgacggcgggaaagaaacauggcauagcgcugccacugcaauuuauugccugaugggaucaggccaguugcuaugggauaccguuacagguguggacauggcccuguga

SEQ ID NO: 157578 - RNA, 1401 nt, Artificial Sequence; identical to SEQ ID NO: 156943
  derived and/or modified CDS sequence (opt3) from neuraminidase__InfluenzaB__AGX20771

SEQ ID NO: 157579 - RNA, 1401 nt, Artificial Sequence
  derived and/or modified CDS sequence (opt3) from neuraminidase__InfluenzaB__AGX20782
augcugcccagcaccauccagacacucacucuuuuccugacguccggcgggguguuguuaucucuguacgucucagccagucuaagcuaucuccuguacuccgacauucuucugaaguuuucuccuaccgagauaacagcuccaacuaugccguuggauugcgcaaacgccucgaauguucaagcggugaaccacucagcuaccaaaggaguaacacuccugcugcccgaaccugaguggaccuauccaagacucagcugucccgguaguacuuuccagaaggccuuacugaucuccucucauagguuuggcgaaacaaaagggaauagcgcaccucuuauuauccgggagccauucguggccugcggacccaacgaauguaagcacuuugcuuugacccauuacgcagcccagccuggcgguuauuacaaugggacgcgcggagaccgaaacaaacugcgucaccuaauuuccgucaagcucggcaagaucccaacuguggaaaauucaauauuccauauggcugccuggaguggcagcgcgugccacgaugggaaagaguggaccuauaucggaguugacgguccggauaacaaugcacugcuuaaggugaaauacggcgaggccuacacagacacuuaucacucuuacgcuaacaagauucugagaacccaggaguccgccuguaauugcaucgggggaaacuguuauuugaugauuacagauggcucagcaagcggugucagugaaugcagguuucucaaaauccgggaggggcgcauaauuaaggagaucuuccccaccggaagagugaagcauacggaagaguguacuugcggcuuugcuucuaauaaaacaauugaaugugccugcagggacaacuccuacaccgcgaagcggccuuucguaaaacugaauguugagacugauacagccgaaauccgcuuaaugugcaccgacacguaucuggauaccccacgacccaacgacggcagcaucacagggccuugugagucggauggagacaaggguucuggcgggauuaaaggaggcuuugugcaccaaagaauggaguccaagauagguaggugguacucacggacuaugagucguaccgaacgcauggggaugggccucuaugucaaauacgacggagauccaugggcagacagcgaugcucuugccuucuccggcgugauggugucuaugaaggagcccgggugguacagcuuuggauucgaaaucaaggacaaaaagugcgaugucccguguauugguaucgagaugguucaugacggcgggaaagaaacauggcacucagcugccacugcaauauauugccugaugggaaguggccaguugcuaugggauaccgugacagguguagacauggcccuguga

SEQ ID NO: 157580 - RNA, 1401 nt, Artificial Sequence
  derived and/or modified CDS sequence (opt3) from neuraminidase__InfluenzaB__AGX20793
augcugcccagcaccauccagacacucacucuuuuccugacguccggcgggguguuguuaucucuguacgucucagcccuacucaguuaucugcuuuacagcgacauucuguugaaguuuuccccuaccgagauaacagcuccaacuaugucucucgauugcgcaaacaccucgaauguucaagccgugaacagaucagcgacaaaaggaguaaccuuccugcugccggaacccgaguggacuuauccuaggcucagcuguccagguaguacauuucagaaggcuuuacugaucucuccccaccgguucggcgaaaccaaaggaaauuccgccccucuuauuauccgcgagccauuuauugcaugcgggcccaacgaauguaagcauuucgccuugacgcacuacgcugcacagccuggcgguuauuacaaugggacucgaggagaccguaacaaacugagacaucuaaucagcgugaagcucggcaagauaccaaccgucgaaaauuccaucuuucacauggccgcuuggucaggcagugccugccaugaugggaaagaguggacauauauuggaguggacgguccggauaacgacgcgcugcuuaagguuaaauacggcgaggcauacacugauaccuaucacagcuacgccaauaagauccugaggacacaggagucugcuuguaacugcauugggggaaauuguuauuugaugaucaccgacggcuccgccucaggugugagcgaaugccgguuccucaaaauacgcgaggggagaauuaucaaggagauuuuucccacgggaagggucaagcacacugaagaguguacaugcggcuucgcaaguaacaaaaccaucgaaugugcuugccgggauaauucuuacacugccaagcgcccuuuugugaaacugaacguagagacagacaccgcggaaauccgauuaaugugcacggauaccuaucuggacacaccaagacccgaugacggcuccauuacugggccuugugagagcaauggagacaaggguucgggcgggauaaaaggaggcuucguucaucaaaggauggagucuaagaucggucggugguacucccguaccaugucaaaaacagaacgcauggggaugggccucuaugugaaguacgauggagacccaugggccgauagugacgcacuugcuuuuagcggcgucaugguguccaugaaggagcccgggugguacucuuucggauucgaaauuaaagauaagaaaugcgacgugccguguaucgguauagagaugguccacgauggcgggaaggaaacuuggcauagcgccgcuaccgccauuuauugccugaugggaucaggccaguugcuaugggacacaguuaccggugugaacauggcacuguga

SEQ ID NO: 157581 - RNA, 1401 nt, Artificial Sequence
  derived and/or modified CDS sequence (opt3) from neuraminidase__InfluenzaB__AGX20804
augcugcccagcaccauccagacacucacucuuuucauuacguccggcggggugcuguugucuuuauacgucucagcccugcuaaguuaucuccuguacagcgacauacuucugaaguuuuccccuaccgagaucacagcuccaacuaugucuuuggauugcgcaaacgccucgaauguucaagcggugaacagaucagcuaccaaaggaguaacauuccuccugccggaacccgaguggaccuauccuaggcugagcuguccagguaguacuuuucagaaggcccucuuaauuucuccccaccgguucggcgaaacaaaaggaaauuccgcaccucugaucauucgcgagccauuuaucgccugcgggcccaacgaauguaagcauuucgcucuuacccacuacgcagcccagccuggcgguuauuacaaugggacgcgaggagaccguaacaaauugagacaucugauaagcgugaagcuaggcaagaucccaacugucgaaaauuccauuuuucacauggcugccuggucaggcagugcgugccaugaugggaaagaguggaccuauaucggaguggacgguccggauaacgacgcacuccugaagguuaaauacggcgaggccuacacagauacuuaucacagcuacgcuaauaagauucuuaggacccaggagucugccuguaacugcaucgggggaaauuguuaucugaugauaacagacggcuccgcaucaggugugagcgaaugccgguucuugaaaauucgcgaggggagaaucauuaaggagaucuuucccaccggaagggucaagcacacggaagaguguacuugcggcuucgcuaguaacaaaacaaucgaaugugccugccgggauaauucuuacaccgcgaagcgcccuuuugugaaacucaacguagagacugacacagccgaaauucgacugaugugcaccgauacguauuuagacaccccaagacccgaugacggcuccauaacagggccuugugagagcaauggagacaaggguucgggcgggaucaaaggaggcuucguucaucaaaggauggagucuaagauuggucggugguacucccguacuaugucaaaaaccgaacgcauggggaugggccuguaugugaaguacgauggagacccaugggcagauagugacgcucucgccuuuagcggcgucaugguguccaugaaggagcccgggugguacucuuucggauucgaaaucaaagauaagaaaugcgacgugccguguauagguauugagaugguccacgauggcgggaaggaaacauggcauagcgcugccacugcaaucuauugccuuaugggaucaggccagcuguugugggacaccguuacagguguggauauggcccuauga

SEQ ID NO: 157582 - RNA, 1401 nt, Artificial Sequence; identical to SEQ ID NO: 157004
  derived and/or modified CDS sequence (opt3) from neuraminidase__InfluenzaB__AGX20815

SEQ ID NO: 157583 - RNA, 1401 nt, Artificial Sequence; identical to SEQ ID NO: 157004
  derived and/or modified CDS sequence (opt3) from neuraminidase__InfluenzaB__AGX20826

SEQ ID NO: 157584 - RNA, 1401 nt, Artificial Sequence; identical to SEQ ID NO: 157004
  derived and/or modified CDS sequence (opt3) from neuraminidase__InfluenzaB__AGX20837

SEQ ID NO: 157585 - RNA, 1401 nt, Artificial Sequence; identical to SEQ ID NO: 157004
  derived and/or modified CDS sequence (opt3) from neuraminidase__InfluenzaB__AGX20848

SEQ ID NO: 157586 - RNA, 1401 nt, Artificial Sequence
  derived and/or modified CDS sequence (opt3) from neuraminidase__InfluenzaB__AGX20870
augcugcccagcaccauccagaugcucacacuuuuccugacuuccggcgggguguuguuaucucuguacgucucagccagucuaagcuaucuccuguacuccgacauucuucugaaguuuucuccuacggagauaaccgcuccaacaaugccguuggauugcgcaaacgccucgaauguucacgcggugaacagaucagcuacuaaaggaguaaccuuccuccugcccgaaccugaguggacauauccaaggcugagcugucccgguaguaccuuucaaaaggcccucuuaaucuccccucaucgguucggcgaaacuaaaggaaauucugcaccacugauuauccgcgagcccuuuauugccugcgggccuaacgaauguaagcacuucgcucuuacacauuacgcagcccagccaggcgguuauuacaaugggacccgaggagaccguaacaaauugagacaccugaucagcgugaagcuaggcaagauaccgacggucgaaaauuccaucuuucauauggcugccuggucaggcagugcgugccacgaugggaaagaguggacuuauauuggaguggacggucccgauaacaaugcacuccugaagaucaaauacggcgaggccuacaccgacacauaucacagcuacgcuaacaauauucuuaggacucaggagucugccuguaacugcaucgggggaaauuguuaucugaugauaaccgauggcuccgcaucagguguuagcgaaugccgguucuugaagauucgcgaggggagaaucauuaaagagaucuuuccuacaggaagggugaagcauaccgaagaguguacgugcggcuucgcuaguaacaagacuaucgaaugugccugccgggacaauucuuacacagcgaaacgcccauuugucaagcucaacguggagaccgauacugccgaaauucgacugaugugcacagacaccuauuuagauacgcccagaccugacgauggcuccauaaccgggccaugugagagcaacggagacaaagguucgggcgggaucaagggaggcuucguacaccagaggauggcaucuaaaauuggucggugguacucccguacaaugucaaagacugagcgcaaagggaugggccuguauguuaaguacgacggagaacccuggaccgauagugacgcucucgccuuuagaggcgugauggucagcaugaaggagccggggugguacuccuucggauucgaaaucaaagauaagaaaugcgacgugccuuguauagguauugagauggugcaugauggcgggaaggaaacauggcacucugcugccacugcaaucuauugccuuaugggaagcggccaacuguugugggacaccgucacagguguugauauggcccuauga

SEQ ID NO: 157587 - RNA, 1401 nt, Artificial Sequence
  derived and/or modified CDS sequence (opt3) from neuraminidase__InfluenzaB__AGX20881
augcugcccagcaccauccagaugcucacacuuuuccugacuuccggcgggguguuguuaucucuguacgucucagccagucuaagcuaucuccuguacuccgacauucuucugaaguuuucuccuacggagauaaccgcuccaacaaugccguuggauugcgcaaacgccucgaauguucacgcggugaacagaucagcuacuaaaggaguaaccuuccuccugcccgaaccugaguggacauauccaaggcugagcugucccgguaguaccuuucaaaaggcccucuuaaucuccccucaucgguucggcgaaacuaaaggaaauucugcaccacugauuauccgcgagcccuuuauugccugcgggccuaacgaauguaagcacuucgcucuuacacauuacgcagcccagccaggcgguuauuacaaugggacccgaggaaaccguaauaaauugagacaccugaucagcgugaagcuaggcaagauaccgacggucgagaacuccaucuuucauauggcugccuggucaggcagugcgugccacgacgggaaagaguggacuuauauuggaguggauggucccgacaauaacgcacuccugaagaucaaauacggcgaagccuacaccgauacauaucacagcuacgcuaauaacauucuuaggacucaggagucugccuguaauugcaucgggggaaacuguuaucugaugauaaccgacggcuccgcaucagguguuagcgaaugccgguucuugaagauucgcgaggggagaaucauuaaagagaucuuuccuacaggaagggugaagcauaccgaagaguguacgugcggcuucgcuaguaauaagacuaucgaaugugccugccgggauaacucuuacacagcgaaacgcccauuugucaagcucaacguggagaccgacacugccgaaauucgacugaugugcacagauaccuauuuagacacgcccagaccugaugacggcuccauaaccgggccaugugagagcaauggagauaaagguucgggcgggaucaagggaggcuucguacaccagaggauggcaucuaaaauuggucggugguacucccguacaaugucaaagacugagcgcaaagggaugggccuguauguuaaguacgacggagaccccuggaccgauagugacgcucucgccuuuagaggcgugauggucagcaugaaggaaccggggugguacuccuucggauucgagaucaaagauaagaaaugcgacgugccuuguauagguauugaaauggugcaugauggcgggaaggagacauggcacucugcugccacugcaaucuauugccuuaugggaagcggccaacuguugugggacaccgucacagguguugauauggcccuauga

SEQ ID NO: 157588 - RNA, 1401 nt, Artificial Sequence
  derived and/or modified CDS sequence (opt3) from neuraminidase__InfluenzaB__AGX20892
augcugcccagcaccauccagacacucacucuuuuccugacguccggcgggguguuguuaucucuguacgucucagcccuacucaguuaucugcuuuacagcgacauucuguugaaguuuuccccuaccgagauaacagcuccaacuaugucucucgauugcgcaaacgccucgaauguucaagcggugaacagaucagcuaccaaaggaguaacauuccugcugccggaacccgaguggaccuauccuaggcucagcuguccagguaguacuuuucagcgggccuuacugaucucuccccaccgcuucggcgaagcaaagggaaauuccgccccucuuauuauccgagagccauuuauugcuugcgggcccaacgaauguaaacauuucgcauugacacacuacgccgcucagccuggcgguuauuacaaugggacccguggagacagaaacaagcugaggcaucuaaucagcgugaaacucggcaagauaccaacggucgaaaauuccaucuuucacauggccgcguggucaggcagugcaugccaugaugggaaggaguggacuuauauuggaguggacgguccggauaacgacgcccugcuuaaaguuaaguacggcgaggcuuacaccgauacauaucacagcuacgccaauaaaauccugcggacucaggagucugcauguaacugcauugggggaaauuguuauuugaugaucaccgacggcuccgcuucaggugugagcgaaugccgcuuccucaagauaagagaggggaggauuaucaaagagauucugcccacaggacgggucaagcacaccgaagaguguacgugcggcuuugccaguaacaagacuaucgaaugugcgugccgcgauaauucuuacacagccaaacgaccuuucgugaaguuaaacguagagaccgacacugcagaaaucagacugaugugcacagauaccuaucucgacacgccaaggcccgaugacggcuccauuaccgggccuugugagagcaauggagacaaagguucgggcgggauaaagggaggcuuuguucaucaacggauggagucuaaaaucggucguugguacucccgcacaaugucaaagacugaaagaauggggaugggccuuuaugugaaauacgauggagacccaugggcugauagugacgcccuggcuuucagcggcgucaugguguccaugaaggagcccgggugguacucuuuuggauucgaaauuaaggauaaaaagugcgacgugccguguaucgguauagagaugguccacgauggcgggaaagaaaccuggcauagcgccgcaacagccauuuauugcuugaugggaucaggccagcuacugugggacacuguuaccgguguggauauggcucucuga

SEQ ID NO: 157589 - RNA, 1401 nt, Artificial Sequence; identical to SEQ ID NO: 157004
  derived and/or modified CDS sequence (opt3) from neuraminidase__InfluenzaB__AGX20903

SEQ ID NO: 157590 - RNA, 1401 nt, Artificial Sequence; identical to SEQ ID NO: 157004
  derived and/or modified CDS sequence (opt3) from neuraminidase__InfluenzaB__AGX20914

SEQ ID NO: 157591 - RNA, 1401 nt, Artificial Sequence
  derived and/or modified CDS sequence (opt3) from neuraminidase__InfluenzaB__AGX20925
augcugcccagcaccauccagacacucacucuuuuccugacguccggcgggguguuguuaucucuguacgucucagcccuacucaguuaucugcuuuacagcgacauucuguugaaguuuuccccuaccgagauaacagcuccaacuaugucucucgauugcgcaaacgccucgaauguucaagcggugaacagaucagcuaccaaaggaguaacauuccugcugccggaacccgaguggaccuauccuaggcucagcuguccagguaguacuuuucagaaggccuuacugaucucuccccaccgguucggcgaaacaaaaggaaauuccgcaccucuuauuauccgcgagccauuuauugccugcgggcccaacgaauguaagcauuucgcuuugacccacuacgcagcccagccuggcgguuauuacaaugggacgcgaggagaccguaacaaacugagacaucuaaucagcgugaagcucggcaagauaccaacugucgaaaauuccaucuuucacauggcugccuggucaggcagugcgugccaugaugggaaagaguggaccuauauuggaguggacgguccggauaacgacgcacugcuuaagguuaaauacggcgaggccuacacagauacuuaucacagcuacgcuaauaagauccugaggacccaggagucugccuguaacugcauugggggaaauuguuauuugaugaucacagacggcuccgcaucaggugugagcgaaugccgguuccucaaaauacaagaggggcgcauuaucaaggagauuuuucccaccggaagagucaagcacacggaagaguguacuugcggcuucgcuaguaacaaaacaaucgaaugugccugcagggauaauucuuacaccgcgaagcggccuuuugugaaacugaacguagagacugacacagccgaaauccgcuuaaugugcaccgauacguaucuggacaccccacgacccgaugacggcuccauuacagggccuugugagagcaauggagacaaggguucgggcgggauaaaaggaggcuucguucaucagagaauggagucuaagaucgguaggugguacucccggacuaugucaaaaaccgaacguauggggaugggccucuaugugaaguacgauggagacccaugggcagauagugacgcucuugccuuuagcggcgucaugguguccaugaaggagcccgggugguacucuuucggauucgaaauuaaagauaagaaaugcgacgugccguguaucgguauagagaugguccacgauggcgggaaggaaacauggcauagcgcugccacugcaauuuauugccugaugggaucaggccaguugcuaugggacaccguuacagguguggauauggcccuguga

SEQ ID NO: 157592 - RNA, 1401 nt, Artificial Sequence
  derived and/or modified CDS sequence (opt3) from neuraminidase__InfluenzaB__AGX20936
augcugcccagcaccauccagacacucacucuuuuccugacguccggcgggguguuguuaucucuguacgucucagcccuacucaguuaucugcuuuacagcgacauucugccuaaguuuuccccaaccgagauaacagcuccgacuaugucuuuggauugcgcaaacgccucgaauguucaagcggugaacagaucagcuaccaaaggaguaacauuccuccugcccgaaccugaguggaccuauccaaggcugagcugucccgguaguacuuuucagaaggcccucuuaaucuccccucaccgguucggcgaaacaaaaggaaauucugcaccacugauuauccgcgagcccuuuauugccugcgggccuaacgaauguaagcauuucgcucuuacccacuacgcagcccagccaggcgguuauuacaaugggacgcgaggagaccguaacaaauugagacaucugaucagcgugaagcuaggcaagauaccgacugucgaaaauuccaucuuucacauggcugccuggucaggcagugcgugccaugaugggaaagaguggaccuauauuggaguggacggucccgauaacgacgcacuccugaagguuaaauacggcgaggccuacacagauacuuaucacagcuacgcuaauaagauccuuaggacccaggagucugccuguaacugcauugggggaaauuguuaucugaugaucacagacggcuccgcaucaggugugagcgaaugccgguucuugaaaauacgcgaggggagaauuaucaaggagauuuuuccuaccggaagggucaagcacacggaagaguguacuugcggcuucgcuaguaacaaaacaaucgaaugugccugccgggauaauucuuacaccgcgaagcgcccauuugugaaacucaacguagagacugacacagccgaaauccgacugaugugcaccgauacguauuuagacacccccagaccugaugacggcuccauuacagggccaugugagagcaauggagacaaggguucgggcgggauaaaaggaggcuucguucaucaaaggauggagucuaagaucggucggugguacucccguacuaugucaaaaaccgaacgcauggggaugggccuguaugugaaguacgauggagaccccugggcagauagugacgcucucgucuuuagcggcgugaugguguccaugaaggagccggggugguacucuuucggauucgaaauuaaagauaagaaaugcgacgucccuuguaucgguauagagaugguucacgauggcgggaaggaaacauggcauagcgccgcuacugccauuuauugccuuaugggaucaggccagcuguugugggacaccgugacagguguagauauggcacuauga

SEQ ID NO: 157593 - RNA, 1401 nt, Artificial Sequence; identical to SEQ ID NO: 156943
  derived and/or modified CDS sequence (opt3) from neuraminidase__InfluenzaB__AGX20947

SEQ ID NO: 157594 - RNA, 1401 nt, Artificial Sequence
  derived and/or modified CDS sequence (opt3) from neuraminidase__InfluenzaB__AGX20958
augcugcccagcaccauccagacacucacucuuuuccugacguccggcgggguguuguuaucucuguacgucucagcccuacucaguuaucugcuuuacagcgacauucuguugaaguuuuccccuaccgagauaacaacuccaaccaugucucucgauugcacaaacgcuucgaauguucaagcagugaacagaucagccaccaaaggaguaacuuuccugcugccggaacccgaguggacauauccuaggcucagcuguccagguaguaccuuucagaaggcguuacugaucucuccccaccgguucggcgaaacgaaaggaaauuccgcuccucuuauuauccgcgagccauuuauugccugcgggcccaacgaauguaagcauuucgcauugacucacuacgccgcucagccuggcgguuauuacaaugggacccgaggagaccguaacaaacugagacaucuaaucagcgugaagcucggcaagauaccaacagucgaaaauuccaucuuucacauggcagccuggucaggcagugcuugccaugaugggaaagaguggacuuauauuggaguggacgguccggauaacgacgcccugcuuaagguuaaauacggcgaggcguacaccgauacauaucacagcuacgcaaauaagauccugaggacccaggagucugccuguaacugcauugggggaaauuguuauuugaugaucacggacggcuccgcuucaggugugagcgaaugccgguuccucaaaauacaagaggggcgcauuaucaaggagauuuuucccacuggaagagucaagcacacagaagaguguaccugcggcuucgccaguaacaaaacuaucgaaugugcaugcagggauaauucuuacacagcuaagcggccuuuugugaaacugaacguagagaccgacacggccgaaauccgcuuaaugugcaccgauacauaucuggacacuccacgacccgaugacggcuccauuaccgggccuugugagagcaauggagacaaggguucgggcgggauaaaaggaggcuucguucaucagagaauggagucuaagaucgguaggugguacucccggacaaugucaaaaacugaacguauggggaugggccucuaugugaaguacgauggagacccaugggcggauagugacgcccuugcauuuagcggcgucaugguguccaugaaggagcccgggugguacucuuucggauucgaaauuaaagauaagaaaugcgacgugccguguaucgguauagagaugguccacgauggcgggaaggaaaccuggcauagcgcugccacagcuauuuauugccugaugggaucaggccaguugcuaugggacaccguuacugguguggauauggcccuguga

SEQ ID NO: 157595 - RNA, 1401 nt, Artificial Sequence; identical to SEQ ID NO: 157167
  derived and/or modified CDS sequence (opt3) from neuraminidase__InfluenzaB__AGX20969

SEQ ID NO: 157596 - RNA, 1401 nt, Artificial Sequence; identical to SEQ ID NO: 157580
  derived and/or modified CDS sequence (opt3) from neuraminidase__InfluenzaB__AGX20980

SEQ ID NO: 157597 - RNA, 1401 nt, Artificial Sequence
  derived and/or modified CDS sequence (opt3) from neuraminidase__InfluenzaB__AGX20991
augcugcccagcaccauccagacacucacucuuuuccugacguccggcgggguguuguuaucucuguacgucucagcccuacucaguuaucugcuuuacagcgacauucugccuaaguuuuccccaaccgagauaacagcuccgacuaugucuuuggauugcgcaaacgccucgaauguucaagcggugaacagaucagcuaccaaaggaguaacauuccuccugcccgaaccugaguggaccuauccaaggcugagcugucccgguaguacuuuucagaaggcccucuuaaucuccccucaccgguucggcgaaacaaaaggaaauucugcaccacugauuauccgcgagcccuuuauugccugcgggccuaacgaauguaagcauuucgcucuuacccacuacgcagcccagccaggcgguuauuacaaugggacgcgaggagaccguaacaaauugagacaucugaucagcgugaagcuaggcaagauaccgacugucgaaaauuccaucuuucacauggcugccuggucaggcagugcgugccaugaugggaaagaguggaccuauauuggaguggacggucccgauaacgacgcacuccugaagguuaaauacggcgaggccuacacagauacuuaucacagcuacgcuaauaagauccuuaggacccaggagucugccuguaacugcauugggggaaauuguuaucugaugaucacagacggcuccgcaucaggugugagcgaaugccgguucuugaaaauacgcaaggggagaauuaucaaggagauuuuuccuaccggaagggucaaacacacggaggaauguacuugcggcuucgcuaguaacaagacaaucgagugugccugccgggauaauucuuacaccgcgaaacgcccauuugugaagcucaacguagaaacugacacagccgagauccgacugaugugcaccgauacguauuuagacacccccagaccugaugacggcuccauuacagggccaugugaaagcaauggagacaaagguucgggcgggauaaagggaggcuucguucaucaaaggauggagucuaaaaucggucggugguacucccguacuaugucaaagaccgagcgcauggggaugggccuguaugugaaguacgauggagaccccugggcagauagugacgcucucgucuuuagcggcgugaugguguccaugaaagaaccggggugguacucuuucggauucgagauuaaggauaaaaagugcgacgucccuuguaucgguauagaaaugguucacgauggcgggaaagagacauggcauagcgccgcuacugccauuuauugccuuaugggaucaggccagcuguugugggacaccgugacagguguagauauggcacuauga

SEQ ID NO: 157598 - RNA, 1401 nt, Artificial Sequence; identical to SEQ ID NO: 157004
  derived and/or modified CDS sequence (opt3) from neuraminidase__InfluenzaB__AGX21002

SEQ ID NO: 157599 - RNA, 1401 nt, Artificial Sequence
  derived and/or modified CDS sequence (opt3) from neuraminidase__InfluenzaB__AGX21013
augcugcccagcaccauccagacacucacucuuuuccugacguccggcgggguguuguuaucucuguacgucucagcccuacucaguuaucugcuuuacagcgacauucuguugaaguuuuccccuaccgagauaacagcuccaacuaugucucucgauugcgcaaacgccucgaauguucaagcggugaacagaucagcuaccaaaggaguaacauuccugcugccggaacccgaguggaccuauccuaggcucagcuguccagguaguacuuuucagaaggccuuacugaucucuccccaccgguucggcgaaacaaaaggaaauuccgcaccucuuauuauccgcgagccauuuauugccugcgggcccaacgaauguaagcauuucgcuuugacccacuacgcagcccagccuggcgguuauuacaaugggacgcgaggagaccguaacaaacugagacaucuaaucagcgugaagcucggcaagauaccaacugucgaaaauuccaucuuucacauggcugccuggucaggcagugcgugccaugaugggaaagaguggaccuauauuggaguggacgguccggauaacgacgcacugcuuaagguuaaauacggcgaggccuacacagauacuuaucacagcuacgcuaauaagauccugaggacccaggagucugccuguaacugcauugggggaaauuguuauuugaugaucacagacggcuccgcaucaggugugagcgaaugccgguuccucaaaauacgcgaggggagaauuaucaaggagauuuuucccaccggaagggucaagcacacggaagaguguacuugcggcuucgcuaguaacaaaacaaucgaaugugccugccgggauaauucuuacaccgcgaagcgcccuuuugugaaacugaacguagagacugacacagccgaaauccgauuaaugugcaccaauacguaucuggauaccccaagacccgacgauggcuccauuacagggccuugugagagcaacggagacaaggguucgggcgggauaaaaggaggcuucguucaucaaaggauggagucuaagaucggucggugguacucccguacuaugucaaaaaccgaacgcauggggaugggccucuaugugaaguacgacggagauccaugggcagacagugaugcucuugccuuuagcggcgucaugguguccaugaaggagcccgggugguacucuuucggauucgaaauuaaagacaagaaaugcgaugugccguguaucgguauagagaugguccacgacggcgggaaggaaacauggcauagcgcugccacugcaauuuauugccugaugggaucaggccaguugcuaugggauaccguuacagguguggacauggcccuguga

SEQ ID NO: 157600 - RNA, 1401 nt, Artificial Sequence
  derived and/or modified CDS sequence (opt3) from neuraminidase__InfluenzaB__AGX21024
augcugcccagcaccauccagacacucacucuuuuccugacguccggcgggguguuguuaucucuguacgucucagccagucuaagcuaucuccuguacuccgacauucuucugaaguuuucuccuaccgagauaacagcuccaacuaugccguuggauugcgcaaacgccucgaauguucaagcggugaacagaucagcuaccaaaggaguaacacuccugcugcccgaaccugaguggaccuauccaaggcucagcugucccgguaguacuuuccagaaggccuuacugaucuccccuaaucgguuuggcgaaacaaaagggaacucugcaccacuuauuauccgcgagcccuucauugccugcggaccuaaugaauguaagcacuuugcuuugacccauuacgcagcccagccaggcgguuauuacaacgggacgcgaggagaccguaauaaacugagacaccuaaucagcgugaagcucggcaagauaccgacugucgagaacuccaucuuccauauggcugccuggucaggcagugcgugccacgaugggaaagaguggaccuauauuggaguggacggucccgauaauaacgcacugcuuaagguuaaauacggcgaagccuacacagacacuuaucauagcuacgcuaauaagauccugaggacccaggagucugccuguaacugcauugggggaaauuguuauuugaugaucacagauggcuccgcaucaggugugagcgaaugccgguuucucaaaauacgcgaggggagaauuaucaaggagauuuucccuaccggaagggucaagcacacggaagaguguacuugcggcuuugcuaguaacaaaacaaucgaaugugccugccgggacaauucuuacaccgcgaagcgcccauucgugaaacugaacguagagacugauacagccgaaguucgauuaaugugcaccgacacguaucuggauacccccagaccuaacgacggcuccaucacagggccaugugagagcgauggagacaaggguucgggcgggauuaaaggaggcuuugugcaccaaaggauggagucuaagauaggucggugguacucccguacuaugucaaaaaccgaacgcauggggaugggccucuaugucaaguacgacggagaucccugggcagacagugaugcucuuacauucagcggcgugaugguguccaugaaggagccggggugguacucuuuuggauucgaaaucaaagacaagaaaugcgaugucccuuguauugguaucgagaugguucaugacggcgggaaggaaacuuggcacagcgccgcuaccgccauauauugccugaugggaucaggccaguugcuaugggauacagugaccgguguagacauggcacuguga

SEQ ID NO: 157601 - RNA, 1401 nt, Artificial Sequence; identical to SEQ ID NO: 157004
  derived and/or modified CDS sequence (opt3) from neuraminidase__InfluenzaB__AGX21035

SEQ ID NO: 157602 - RNA, 1401 nt, Artificial Sequence; identical to SEQ ID NO: 157167
  derived and/or modified CDS sequence (opt3) from neuraminidase__InfluenzaB__AGX21046

SEQ ID NO: 157603 - RNA, 1401 nt, Artificial Sequence; identical to SEQ ID NO: 157170
  derived and/or modified CDS sequence (opt3) from neuraminidase__InfluenzaB__AGX21057

SEQ ID NO: 157604 - RNA, 1401 nt, Artificial Sequence; identical to SEQ ID NO: 157588
  derived and/or modified CDS sequence (opt3) from neuraminidase__InfluenzaB__AGX21068

SEQ ID NO: 157605 - RNA, 1401 nt, Artificial Sequence
  derived and/or modified CDS sequence (opt3) from neuraminidase__InfluenzaB__AGX21079
augcugcccagcaccauccagacacucacucuuuuccugacguccggcgggguguuguuaucucuguacgucucagccagucuaagcuaucuccuguacuccgacauucuucugaaguuuucuccuaccgagauaacagcuccagcaaugccguuggauugcgccaacgcgucgaauguucaagcugugaacagaucagccacuaaaggaguaacccuccugcugcccgaaccugaguggacauauccaaggcucagcugucccgguaguaccuuccagaaggcauuacugaucuccccucaccgguuuggcgaaacuaaaggaaauucugccccacuuauuauccgcgagcccuucauugcuugcgggccuaacgaauguaagcauuuugcauugacacacuacgccgcucagccaggcgguuauuacaaugggacccgaggagaccguaacaaacugagacaucuaaucagcgugaagcucggcaagauaccgacggucgaaaauuccaucuuccacauggccgcguggucaggcagugcaugccaugaugggaaagaguggacuuauauuggaguggacggucccgauaacaaugcccugcuuaagguuaaauacggcgaggcuuacaccgacacauaucacagcuacgccucuaagauccugaggacucaggaguccgcauguaacugcauugggggaaauuguuauuugaugaucaccgauggcucagcuagcggugugagugaaugccgguuucucaaaauacgcgaggggagaauuaucaaggagauuuucccuacaggaagggucaagcacaccgaagaguguacgugcggcuuugccucuaacaaaacuaucgaaugugcgugccgggacaauuccuacacagccaagcgcccauucgugaaacugaacguagagaccgauacugcagaaauccgauuaaugugcacagacaccuaucuggauacgcccagaccuaaugacggcagcauuaccgggccaugugagucggauggagacaaggguucuggcgggauaaaaggaggcuuuguucaucaaaggauggaguccaagaucggucggugguacucacguacaaugaguaaaacugaacgcauggggaugggccucuaugugaaguacgacggagaucccugggcugacagcgaugcccuugcuuucuccggcgucauggugucuaugaaggagccggggugguacagcuuuggauucgaaauuaaagacaagaaaugcgaugugccuuguaucgguauagagaugguccacgacggcgggaaggaaaccuggcauucagccgcaacagccauuuauugccugaugggaaguggccaguugcuaugggauacuguuaccgguguggacauggcucuguga

SEQ ID NO: 157606 - RNA, 1401 nt, Artificial Sequence; identical to SEQ ID NO: 157170
  derived and/or modified CDS sequence (opt3) from neuraminidase__InfluenzaB__AGX21088

SEQ ID NO: 157607 - RNA, 1401 nt, Artificial Sequence; identical to SEQ ID NO: 157170
  derived and/or modified CDS sequence (opt3) from neuraminidase__InfluenzaB__AGX21099

SEQ ID NO: 157608 - RNA, 1401 nt, Artificial Sequence
  derived and/or modified CDS sequence (opt3) from neuraminidase__InfluenzaB__AGX21110
augcugcccagcaccauccagacacucacucuuuuccugacguccggcgggguguuguuaucucuguacgucucagcccuacucaguuaucugcuuuacagcgacauucuguugaaguuuuccccuaccgagauaacagcuccaacuaugucucucgauugcgcaaacgccucgaauguucaagcggugaacagauucgcuaccaaaggaguaacauuucugcugccggaacccgaguggaccuauccuaggcucucauguccagguagcacuuuccagaaggccuuacugaucaguccccaccgguuuggcgaaacaaaaggaaauuccgcaccucuuauuauccgcgagccauucauugccugcgggcccaacgaauguaagcauuuugcuuugacccacuacgcagcccagccuggcgguuauuacaaugggacgcgaggagaccguaacaaacugagacaucuaaucucugugaagcucggcaagauaccaacugucgagaauagcaucuuccacauggcugccugguccggcucagcgugccaugaugggaaagaguggaccuauauuggaguggacgguccggauaacgacgcacugcuuaagguuaaauacggcgaagccuacacagauacuuaucacaguuacgcuaauaagauccugaggacccaggagagcgccuguaacugcauugggggaaauuguuauuugaugaucacagacggcucugcauccggugugucagaaugccgguuucucaaaauacgcgaggggagaauuaucaaggagauuuuccccaccggaagggucaagcacacggaagaguguacuugcggcuuugcuagcaacaaaacaaucgaaugugccugccgggauaauaguuacaccgcgaagcgcccuuucgugaaacugaacguagagacugacacagccgaaauccgauuaaugugcaccgauacguaucuggacaccccaagacccgaugacggcucuauuacagggccuugugaguccaauggagacaaggguagcggcgggauaaaaggaggcuuuguucaucaaaggauggagucgaagaucggucggugguacucucguacuauguccaaaaccgaacgcauggggaugggccucuaugugaaguacgauggagacccaugggcagauucagacgcucuugccuucaguggcgucauggugagcaugaaggagcccgggugguacuccuucggauuugaaauuaaagauaagaaaugcgacgugccguguaucgguauagagaugguccacgauggcgggaaggaaacauggcauucugcugccacugcaauuuauugccugaugggaagcggccaguugcuaugggacaccguuacagguguggauauggcccuguga

SEQ ID NO: 157609 - RNA, 1401 nt, Artificial Sequence
  derived and/or modified CDS sequence (opt3) from neuraminidase__InfluenzaB__AGX21121
augcugcccagcaccauccagacacucacucuuuuccugacguccggcgggguguuguuaucucuguacgucucagcccuacucaguuaucugcuuuacagcgacauucuguugaaguuuuccccuaccgagauaacagcuccaacuaugucucucgauugcgcaaacgccucgaauguucaagcggugaacagaucagcuaccaaaggaguaacauuccugcugccggaacccgaguggaccuauccuaggcucagcuguccagguaguacuuuucagaaggccuuacugaucucuccccaccgguucggcgaaacaaaaggaaauuccgcaccucuuauuauccgcgagccauuuauugccugcgggcccaacgaauguaagcauuucgcuuugacccacuacgcagcccagccuggcgguuauuacaaugggacgcgaggagaccguaacaaacugagacaucuaaucagcgugaagcucggcaagauaccaacugucgaaaauuccaucuuucacauggcugccuggucaggcagugcgugccaugaugggaaagaguggaccuauauuggaguggacgguccggauaacgacgcacugcuuaagguuaaauacggcgaggccuacacagauacuuaucacagcuacgcuaauaagauccugaggacccaggagucugccuguaacugcauugggggaaauuguuauuugaugaucacagacggcuccgcaucaggugugagcgaaugccgguuccucaaaauacgcgaggggagaauuaccaaggagaucuuucccacgggaagggucaagcacacugaagaguguacaugcggcuucgcuaguaacaaaaccauugaaugugccugccgggauaauucuuacacugcgaagcgcccuuuugugaaacugaacguagagacagacaccgccgaaauccgauuaaugugcacggauaccuaucuggacacaccaagacccgaugacggcuccaucacugggccuugugagagcaauggagacaaggguucgggcgggauuaaaggaggcuucguucaucaaaggauggagucuaagauaggucggugguacucccguaccaugucaaaaacagaacgcauggggaugggccucuaugugaaguacgauggagacccaugggcagauagugacgcucuugccuuuagcggcgucaugguguccaugaaggagcccgggugguacucuuucggauucgaaaucaaagauaagaaaugcgacgugccguguauugguaucgagaugguccacgauggcgggaaggaaacuuggcauagcgcugccaccgcaauauauugccugaugggaucaggccaguugcuaugggacacaguuaccgguguggauauggcccuguga

SEQ ID NO: 157610 - RNA, 1401 nt, Artificial Sequence; identical to SEQ ID NO: 157167
  derived and/or modified CDS sequence (opt3) from neuraminidase__InfluenzaB__AGX21132

SEQ ID NO: 157611 - RNA, 1401 nt, Artificial Sequence; identical to SEQ ID NO: 156943
  derived and/or modified CDS sequence (opt3) from neuraminidase__InfluenzaB__AGX21143

SEQ ID NO: 157612 - RNA, 1401 nt, Artificial Sequence; identical to SEQ ID NO: 157004
  derived and/or modified CDS sequence (opt3) from neuraminidase__InfluenzaB__AGX21154

SEQ ID NO: 157613 - RNA, 1401 nt, Artificial Sequence
  derived and/or modified CDS sequence (opt3) from neuraminidase__InfluenzaB__AGX21165
augcugcccagcaccauccagacacucacucuuuuccugacguccggcgggguguuguuaucucuguacgucucagcccuacucaguuaucugcuuuacagcgacauucuguugaaguuuuccccuaccgagauaacagcuccaacuaugucucucgauugcgcaaacgccucgaauguucaagcggugaacagaucagcuaccaaaggaguaacauuccugcugccggaacccgaguggaccuauccuaggcucagcuguccagguaguacuuuucagaaggccuuacugaucucuccccaccgguucggcgaaacaaaaggaaauuccgcaccucuuauuauccgcgagccauuuauugccugcgggcccaacgaauguaagcauuucgcuuugacccacuacgcagcccagccuggcgguuauuacaaugggacgcgaggagaccguaacaaacugagacaucuaaucagcgugaagcucggcaagauaccaacugucgaaaauuccaucuuucacauggcugccuggucaggcagugcgugccaugaugggaaagaguggaccuauauuggaguggacgguccggauaacgacgcacugcuuaagguuaaauacggcgaggccuacacagauacuuaucacagcuacgcuaauaagauccugaggacccaggagucugccuguaacugcauugggggaaauuguuauuugaugaucacagacggcuccgcaucaggugugagcgaaugccgguuccucaaaauacgcgaggggagaauuaucaaggagauuuuucccaccggaagggucaagcacacggaagaguguacuugcggcuucgcuaguaacaaaacaaucgaaugugccugccgggauaauucuuacaccgcgaagcgcccuuuugugaaacugaacauggagacugacacagccgaaauccgauuaaugugcaccgauacguaucuggacaccccaagacccgaugacggcuccauuacagggccuugugagagcaauggagacaaggguucgggcgggauaaaaggaggcuucguacaucaaaggauggagucuaagaucggucggugguacucccguacuaugucaaaaaccgaacgcauggggaugggccucuauguuaaguacgauggagacccaugggcagauagugacgcucuugccuuuagcggcgugauggucuccaugaaggagcccgggugguacucuuucggauucgaaauuaaagauaagaaaugcgacgugccguguaucgguauagagauggugcacgauggcgggaaggaaacauggcauagcgcugccacugcaauuuauugccugaugggaucaggccaguugcuaugggacaccgucacagguguugauauggcccuguga

SEQ ID NO: 157614 - RNA, 1401 nt, Artificial Sequence; identical to SEQ ID NO: 157004
  derived and/or modified CDS sequence (opt3) from neuraminidase__InfluenzaB__AGX21176

SEQ ID NO: 157615 - RNA, 1401 nt, Artificial Sequence
  derived and/or modified CDS sequence (opt3) from neuraminidase__InfluenzaB__AGX21187
augcugcccagcaccauccagacacucacucuuuuccugacguccggcgggguguuguuaucucuguacgucucagccagucuaagcuaucuccuguacuccgacauucuucugaaguuuucuccuaccgagauaacagcuccaacuaugccguuggauugcgcaaacgccucgaauguucaagcggugaacagaucagcuaccaaaggaguaacacuccugcugcccgaaccugaguggaccuauccaaggcucagcugucccgguaguacuuuccagaaggccuuacugaucuccccucaccgguuuggcgaaacaaaaggaaauucugcaccacuuauuauccgcgagcccuucauugccugcgggccuaacgaauguaagcauuuugcuuugacccacuacgcagcccagccaggcgguuauuacaaugggacgcgaggagaccguaacaaacugagacaucuaaucagcgugaagcucggcaagauaccgacugucgaaaauuccaucuuccacauggcugccuggucaggcagugcgugccaugaugggaaagaguggaccuauauuggaguggacggucccgauaacaaugcacugcuuaagguuaaauacggcgaggccuacacagacacuuaucacagcuacgcuaacaagauccugaggacccaggagucugccuguaauugcauugggggaaacuguuauuugaugaucacagauggcuccgcaucaggugugagcgaaugccgguuucucaaaauacgcgaggggagaauuaucaaggagauuuucccuaccggaagggucaagcacacggaagaguguacuugcggcuuugcuaguaauaaaacaaucgaaugugugugccgggacaacucuuacaccgccaagcgcccauucguaaaacugaauguugagacugauacagcggaagugcgauuaaugugcaccgacacguaucuggauacccccagaccuaacgacggcuccaucacagggccaugugagagcgauggagacaaggguucgggcgggauuaaaggaggcuuuguccaucaaaggauggagucuaagauaggucggugguacucccguacuaugucaaaaaccgaacgcauggggaugggccucuaugugaaguacgacggagaucccugggccgacagugaugcacuuacauucagcggcgugauggucuccaugaaggagccggggugguacucuuuuggauucgaaaucaaagacaagaaaugcgauguuccuuguauugguaucgagauggugcacgacggcgggaaggaaacuuggcauagcgcugccaccgcuauauauugccugaugggaucaggccaguugcuaugggauacaguaaccgguguggacauggcccuguga

SEQ ID NO: 157616 - RNA, 1401 nt, Artificial Sequence
  derived and/or modified CDS sequence (opt3) from neuraminidase__InfluenzaB__AGX21198
augcugcccagcaccauccagaugcucacacuuuuccugacuuccggcgggguguuguuaucucuguacgucucagccagucuaagcuaucuccuguacuccgacauucuucugaaguuuucuccuacggagauaaccgcuccaacaaugccguuggauugcgcaaacgccucgaauguucacgcggugaacagaucagcuacuaaaggaguaaccuuccuccugcccgaaccugaguggacauauccaaggcugagcugucccgguaguaccuuucaaaaggcccucuuaaucuccccucaucgguucggcgaaacuaaaggaaauucugcaccacugauuauccgcgagcccuuuauugccugcgaaccuaacgaguguaagcacuucgcucuuacacauuacgcagcccagccagggggcuauuacaaugguacccgaggggaccguaacaaauugagacaccugaucagcgugaagcuaggaaagauaccgacggucgaaaauuccaucuuucauauggcugccuggucaggcagugcgugccacgauggcaaagaguggacuuauauugggguggacggacccgauaacaaugcacuccugaagaucaaauacggugaggccuacaccgacacauaucacagcuacgcuaacaauauucuuaggacucaggaaucugccuguaacugcaucggcgggaauuguuaucugaugauaaccgauggauccgcaucaggcguuagcgagugccgguucuugaagauucgcgaggguagaaucauuaaagaaaucuuuccuacagggagggugaagcauaccgaggaauguacgugcggauucgcuaguaacaagacuaucgagugugccugccgggacaauucuuacacagcgaaacgcccauuugucaagcucaacguggaaaccgauacugccgagauucgacugaugugcacagacaccuauuuagauacgcccagaccugacgauggcuccauaaccggcccaugugagagcaacggggacaaaggaucggguggcaucaaagggggauucguacaccagaggauggcaucuaagauuggccggugguacucccguacaaugucaaagacugaacgcaaagguauggggcuguauguuaaguacgacggcgaucccuggaccgacagugaugcucucgccuuuagaggagugauggucagcaugaaggagccgggcugguacuccuucggguucgaaaucaaagacaagaaaugcgaugugccuuguauaggaauugagauggugcaugacgguggcaaggaaacauggcacucugcugccacugcaaucuauugccuuauggggagcggacaacuguugugggauaccgucacaggcguugacauggcccuauga

SEQ ID NO: 157617 - RNA, 1401 nt, Artificial Sequence; identical to SEQ ID NO: 157004
  derived and/or modified CDS sequence (opt3) from neuraminidase__InfluenzaB__AGX21209

SEQ ID NO: 157618 - RNA, 1401 nt, Artificial Sequence; identical to SEQ ID NO: 157167
  derived and/or modified CDS sequence (opt3) from neuraminidase__InfluenzaB__AGX21220

SEQ ID NO: 157619 - RNA, 1401 nt, Artificial Sequence
  derived and/or modified CDS sequence (opt3) from neuraminidase__InfluenzaB__AGX21231
augcugcccagcaccauccagacacucacucuuuuccugacguccggcgggguguuguuaucucuguacgucucagcccuacucaguuaucugcuuuacagcgacauucuguugaaguuuuccccuaccgagauaacagcuccaacuaugucucucgauugcgcaaacgccucgaauguucaagcggugaacagaucagcuaccaaaggaguaacauuccugcugccggaaagcgaguggaccuaucccaggcucaguuguccugguuccacuuuucagaaggccuuacugaucucuccacaccgguucggcgaaacaaaagggaauagcgcaccccuuauuauccgcgagccuuuuauugccugcggaccaaacgaauguaagcauuucgcuuugacccacuacgcagcccagcccggcgguuauuacaaugggacgcgaggagaccguaacaaacugagacaucuaaucuccgugaagcucggcaagauaccuacugucgaaaauucaaucuuucacauggcugccuggaguggcagcgcgugccaugaugggaaagaguggaccuauauuggaguggacgguccagauaacgacgcacugcuuaagguuaaauacggcgaggccuacacagauacuuaucacucuuacgcuaauaagauccugaggacccaggaguccgccuguaacugcauugggggaaauuguuauuugaugaucacagacggcucagcaagcggugugagugaaugccgguuccucaaaauacgcgaggggagaauuaucaaggagauuuuuccgaccggaagggucaagcacacggaagaguguacuugcggcuucgcuucuaacaaaacaaucgaaugugccugccgggauaauuccuacaccgcgaagcgccccuuugugaaacugaacguagagacugacacagccgaaauccgauuaaugugcaccgauacguaucuggacaccccuagaccagaugacggcagcauuacagggcccugugagucgaauggagacaaggguucuggcgggauaaaaggaggcuucguucaucaaaggauggaguccaagaucggucggugguacucacguacuaugaguaaaaccgaacgcauggggaugggccucuaugugaaguacgauggagacccuugggcagauagcgacgcucuugccuuuuccggcgucauggugucuaugaaggagccagggugguacagcuucggauucgaaauuaaagauaagaaaugcgacgugcccuguaucgguauagagaugguccacgauggcgggaaggaaacauggcauucagcugccacugcaauuuauugccugaugggaaguggccaguugcuaugggacaccguuacagguguggauauggcccuguga

SEQ ID NO: 157620 - RNA, 1401 nt, Artificial Sequence; identical to SEQ ID NO: 157170
  derived and/or modified CDS sequence (opt3) from neuraminidase__InfluenzaB__AGX21242

SEQ ID NO: 157621 - RNA, 1401 nt, Artificial Sequence; identical to SEQ ID NO: 157004
  derived and/or modified CDS sequence (opt3) from neuraminidase__InfluenzaB__AGX21253

SEQ ID NO: 157622 - RNA, 1401 nt, Artificial Sequence
  derived and/or modified CDS sequence (opt3) from neuraminidase__InfluenzaB__AGX21264
augcugcccagcaccauccagacacucacucuuuuccugacguccggcgggguguuguuaucucuguacgucucagccagucuaagcuaucuccuguacuccgacauucuucugaaguuuucuaccacagagauaacugcuccuaccaugccauuggauugcgcaaacgccucgaauguucaagcggugaacagaucagcuacaaaaggaguaacccuccugcugccggaacccgaguggacuuauccuaggcucagcuguccagguaguacauuccagaaggccuuacugaucucuccccaccgguuuggcgaaaauaaagggaacuccgcaccucuuauuauccgcgagccauucauugccugcggacccaaugaauguaagcauuuugcuuugacccacuacgcagcccagccuggcgguuauuacaacgggacgcgaggagaccguaauaaacugagacaucuaaucagcgugaagcucggcaagauaccaacugucgagaacuccaucuuccacauggcugccuggucaggcagugcgugccaugaugggaaagaguggaccuauauuggaguggacgguccggauaauaacgcacugcuuaagguuaaauacggcgaagccuacacagacacuuaucacagcuacgcuaauaagauccugaggacccaggagucugccuguaacugcauugggggaaauuguuauuugaugaucacagauggcuccgcaucaggugugagcgaaugccgguuucucaaaauacgcgaggggagaauuaucaaggagauuuuccccaccggaagggucaagcacacggaagaguguacuugcggcuuugcuaguaacaaaacaaucgaaugugccugccgggacaauucuuacaccgcgaagcgcccuuucgugaaacugaacguagagacugauacagccgaaauccgauuaaugugcaccgacacguaucuggauaccccaagacccaacgacggcuccauuacagggccuugugagagcgauggagacaaggguucgggcgggauaaaaggaggcuuuguucaucaaaggauggagucuaagaucggucggugguacucccguacuaugucaaaaaccgaacgcauggggaugggccucuaugugaaguacgacggagauccaugggcagacagugaugcucuugccuucagcggcgucaugguguccaugaaggagcccucuugguacagcuuuggguucgaaauuaaagacaagaaaugcgaugugccguguaucggaauagagaugguccacgacgguggcaaggaaacauggcauucagcugccacugcaauuuauugccugauggggaguggacaguugcuaugggauaccguuacaggcguggacauggcccuguga

SEQ ID NO: 157623 - RNA, 1401 nt, Artificial Sequence; identical to SEQ ID NO: 156943
  derived and/or modified CDS sequence (opt3) from neuraminidase__InfluenzaB__AGX21275

SEQ ID NO: 157624 - RNA, 1401 nt, Artificial Sequence; identical to SEQ ID NO: 157004
  derived and/or modified CDS sequence (opt3) from neuraminidase__InfluenzaB__AGX21286

SEQ ID NO: 157625 - RNA, 1401 nt, Artificial Sequence
  derived and/or modified CDS sequence (opt3) from neuraminidase__InfluenzaB__AGX21297
augcugcccagcaccauccagacacucacucuuuuccugacguccggcgggguguuguuaucucuguacgucucagccagucuaagcuaucuccuguacuccgacauucuucugaaguuuucuccuaccgagauaacagcuccaacuaugccguuggauugcgcaaacgccucgaauguucaagcggugaacagaucagcuaccaaaggaguaacacuccugcugcccgaaccugacuggaccuauccaaggcucagcugucccgguaguacuuuccagaaggccuuacugaucuccccucaccgguuuggcgagacaaaaggaaauucugcaccacuuauuauccgcgaacccuucauugccugcgggccuaacgaguguaagcauuuugcuuugacccacuacgcagcccagccaggcgguuauuacaaugggacgcgaggagaucguaacaaacugagacaucuaaucagcgugaagcucggcaagauaccgacugucgaaaauuccaucuuccacauggcugccuggucaggcagugcgugccaugacgggaaagaguggaccuauauuggaguggauggucccgacaacaaugcacugcuuaagguuaaauacggcgaggccuacacagauacuuaucacagcuacgcuaacaagauccugaggacccaggaaucugccuguaauugcauugggggaaacuguuauuugaugaucacagacggcuccgcaucaggugugagcgagugccgguuucucaaaauacgcgaagggagaauuaucaaggagauuuucccuaccggaagggucaagcacacggaggaauguacuugcggcuuugcuaguaauaaaacaaucgagugugccugccgggauaacucuuacaccgcgaagcgcccauucgugaaacugaauguagaaacugacacagccgagguucgauuaaugugcaccgauacguaucuggacacccccagaccuaacgauggcuccaucacagggccaugugaaagcgacggagacaaggguucgggcgggauuaaaggaggcuuugugcaucaaaggauggagucuaagauaggucggugguacucccguacuaugucaaaaaccgagcgcauggggaugggccucuaugucaaguacgauggagaccccugggcagauagugacgcucuuacauucagcggcgugaugguguccaugaaggaaccggggugguacucuuuuggauucgagaucaaagauaagaaaugcgacgucccuuguauugguaucgaaaugguucacgauggcgggaaggagacuuggcauagcgccgcuaccgccauauauugccugaugggaucaggccaguugcuaugggacacagugaccgguguagauauggcacuguga

SEQ ID NO: 157626 - RNA, 1401 nt, Artificial Sequence
  derived and/or modified CDS sequence (opt3) from neuraminidase__InfluenzaB__AGX21308
augcugcccagcaccauccagaugcucacacuuuuccugacuuccggcgggguguuguuaucucuguacgucucagccagucuaagcuaucuccuguacuccgacauucuucugaaguuuucuccuacggagauaaccgcuccaacaaugccguuggauugcgcaaacgccucgaauguucacgcggugaacagaucagcuacuaaaggaguaaccuuccuccugcccgaaccugaguggacauauccaaggcugagcugucccgguaguaccuuucaaaaggcccucuuaaucuccccucaucgguucggcgaaacuaaaggaaauucugcaccacugauuauccgcgagcccuuuauugccugcgggccuaacgaauguaagcacuucgcucuuacacauuacgcagcccagccaggcgguuauuacaaugggacccgaggagaccguaacaaauugagacaccugaucagcgugaagcuaggcaagauaccgacggucgaaaauuccaucuuucauauggcugccuggucaggcagugcgugccacgaugggaaagaguggacuuauauuggaguggacggucccgauaacaaugcacuccugaagaucaaauacggcgaggccuacaccgacacauaucacagcuacgcuaacaauauucuuaggacucaggagucugccuguaacugcaucgggggaaauuguuaucugaugauaaccgauggcuccgcaucagguguuagcgaaugccgguucuugaagauucgcgaggggagaaucauuaaagagaucuuuccuacaggaagggugaagcauaccgaagaguguacgugcggcuucgcuaguaacaagacuaucgaaugugccugccgggacaauucuuacacagcgaaacgcccauuugucaagcucaacguggagaccgauacugccgaaauucgacugaugugcacagacaccuauuuagauacgcccagaccugacgauggcuccauaaccgggccaugugagagcaacggagacaaagguucgggcgggaucaagggaggcuucguacaccagaggauggcaucuaaaauuggucggugguacucccguacaaugucaaagacugagcgcaaagggaugggccuguauguuaaguacgacggagaucccuggaccgacagugaugcucucgcccuuagaggcgugauggucagcaugaaggaaccggggugguacuccuuuggauucgagaucaaagacaagaaaugcgaugugccuuguauagguauugaaauggugcaugacggcgggaaggagacauggcacucugcugccacugcaaucuauugccugaugggaagcggccaauugcuaugggauaccgucacagguguugacauggcccuguga

SEQ ID NO: 157627 - RNA, 1401 nt, Artificial Sequence; identical to SEQ ID NO: 156948
  derived and/or modified CDS sequence (opt3) from neuraminidase__InfluenzaB__AGX21319

SEQ ID NO: 157628 - RNA, 1401 nt, Artificial Sequence; identical to SEQ ID NO: 156943
  derived and/or modified CDS sequence (opt3) from neuraminidase__InfluenzaB__AGX21330

SEQ ID NO: 157629 - RNA, 1401 nt, Artificial Sequence; identical to SEQ ID NO: 156943
  derived and/or modified CDS sequence (opt3) from neuraminidase__InfluenzaB__AGX21341

SEQ ID NO: 157630 - RNA, 1401 nt, Artificial Sequence; identical to SEQ ID NO: 157170
  derived and/or modified CDS sequence (opt3) from neuraminidase__InfluenzaB__AGX21352

SEQ ID NO: 157631 - RNA, 1401 nt, Artificial Sequence
  derived and/or modified CDS sequence (opt3) from neuraminidase__InfluenzaB__AGX21363
augcugcccagcaccauccagacacucacucuuuuccugacguccggcgggguguuguuaucucuguacgucucagccagucuaagcuaucuccuguacuccgacauucuucugaaguuuucuccuaccgagauaacagcuccaacuaugccguuggauugcgcaaacgccucgaauguucaagcggugaacagaucagcuaccaaaggaguaacacuccugcugcccgaaccugaguggaccuauccaaggcucagcugucccgguaguacuuuccagaaggccuuacugaucuccucucaccgguuuggcgaaacaaaagggaauagcgcaccucuuauuauccgcgagccauucguggccugcggacccaacgaauguaagcauuuugcuuugacccacuacgcagcccagccuggcgguuauuacaaugggacgcgaggagaccguaacaaacugagacaucuaauuuccgucaagcucggcaagaucccaacuguggaaaauucaauauuccacauggcugccuggaguggcagcgcgugccaugaugggaaagaguggaccuauaucggaguugacgguccggauaacaaugcacugcuuaaggugaaauacggcgaggccuacacagacacuuaucacucuuacgcuaacaagauucugaggacccaggaguccgccuguaauugcaucgggggaaacuguuauuugaugauuacagauggcucagcaagcggugucagugaaugccgguuucucaaaauccgcgaggggagaauaauuaaggagaucuuccccaccggaagggugaagcacacggaagaguguacuugcggcuuugcuucuaauaaaacaauugaaugugccugccgggacaacuccuacaccgcgaagcgcccuuucguaaaacugaauguugagacugauacagccgaaauccgauuaaugugcaccgacacguaucuggauaccccaagacccaacgacggcagcaucacagggccuugugagucggauggagacaaggguucuggcgggauuaaaggaggcuuugugcaucaaaggauggaguccaagauaggucggugguacucacguacuaugaguaaaaccgaacgcauggggaugggccucuaugucaaguacgacggagauccaugggcagacagcgaugcucuugccuucuccggcgugauggugucuaugaaggagcccgggugguacagcuuuggauucgaaaucaaagacaagaaaugcgaugucccguguauugguaucgagaugguucacgacggcgggaaggaaacauggcauucagcugccacugcaauauauugccugaugggaaguggccaguugcuaugggauaccgugacagguguagacauggcccuguga

SEQ ID NO: 157632 - RNA, 1401 nt, Artificial Sequence; identical to SEQ ID NO: 156943
  derived and/or modified CDS sequence (opt3) from neuraminidase__InfluenzaB__AGX21374

SEQ ID NO: 157633 - RNA, 1401 nt, Artificial Sequence; identical to SEQ ID NO: 157004
  derived and/or modified CDS sequence (opt3) from neuraminidase__InfluenzaB__AGX21385

SEQ ID NO: 157634 - RNA, 1401 nt, Artificial Sequence; identical to SEQ ID NO: 157004
  derived and/or modified CDS sequence (opt3) from neuraminidase__InfluenzaB__AGX21396

SEQ ID NO: 157635 - RNA, 1401 nt, Artificial Sequence; identical to SEQ ID NO: 156943
  derived and/or modified CDS sequence (opt3) from neuraminidase__InfluenzaB__AGX21407

SEQ ID NO: 157636 - RNA, 1401 nt, Artificial Sequence; identical to SEQ ID NO: 156943
  derived and/or modified CDS sequence (opt3) from neuraminidase__InfluenzaB__AGX21418

SEQ ID NO: 157637 - RNA, 1401 nt, Artificial Sequence
  derived and/or modified CDS sequence (opt3) from neuraminidase__InfluenzaB__AGX21429
augcugcccagcaccauccagacacucacucuuuuccugacguccggcgggguguuguuaucucuguacgucucagcccuacucaguuaucugcuucacagcgacauucuguugaaguuuuccccuaccgagauaacagcuccaacuaugucucucgauugcgcaaacgccucgaauguucaagcggugaacagaucaguaaccaaaggagugacauuccugcugccggaacccgaguggaccuacccuaggcucagcuguccagguaguacuuuucagaaggcuuuacugaucucuccccaucgguucggcgaaacaaaaggaaauuccgccccucuuauuauccgcgagccauuuauugcaugcgggcccaacgaauguaagcacuucgccuugacccauuaugcugcacagccuggcgguuacuauaaugggacgcgaggagaccguaacaaacugagacaccuaaucagcgucaagcucggcaagauaccaacuguggaaaauuccaucuuucauauggccgcuuggucaggcagugccugccacgaugggaaagaguggaccuacauuggaguugacgguccggauaacgacgcgcugcuuaaggugaaauauggcgaggcauacacagauacuuaccacagcuaugccaauaagauccugaggacccaggagucugcuuguaacugcauugggggaaauuguuacuugaugaucacagacggcuccgccucaggugucagcgaaugccgguuccucaaaauacgcgaggggagaauuaucaaggagauuuuucccaccggaagggugaagcauacggaagaguguacuugcggcuucgcaaguaacaaaacaaucgaaugugcuugccgggauaauucuuauaccgccaagcgcccuuuuguaaaacugaacguugagacugacacagcggaaauccgauuaaugugcaccgauacguaccuggacaccccaagacccgaugacggcuccauuacagggccuugugagagcaauggagacaaggguucgggcgggauaaaaggaggcuucgugcaccaaaggauggagucuaagaucggucggugguauucccguacuaugucaaaaaccgaacgcauggggaugggccucuacgucaaguaugauggagacccaugggccgauagugacgcacuugcuuuuagcggcgugaugguguccaugaaggagcccgggugguacucuuucggauucgaaauuaaagauaagaaaugcgacgucccguguaucgguauagagaugguucaugauggcgggaaggaaacauggcacagcgccgcuacugccauuuacugccugaugggaucaggccaguugcuaugggacaccgugacagguguagauauggcacuguga

SEQ ID NO: 157638 - RNA, 1401 nt, Artificial Sequence; identical to SEQ ID NO: 157004
  derived and/or modified CDS sequence (opt3) from neuraminidase__InfluenzaB__AGX21440

SEQ ID NO: 157639 - RNA, 1401 nt, Artificial Sequence; identical to SEQ ID NO: 157004
  derived and/or modified CDS sequence (opt3) from neuraminidase__InfluenzaB__AGX21451

SEQ ID NO: 157640 - RNA, 1401 nt, Artificial Sequence; identical to SEQ ID NO: 157588
  derived and/or modified CDS sequence (opt3) from neuraminidase__InfluenzaB__AGX21462

SEQ ID NO: 157641 - RNA, 1401 nt, Artificial Sequence
  derived and/or modified CDS sequence (opt3) from neuraminidase__InfluenzaB__AGX21473
augcugcccagcaccauccagacacucacucuuuuccugacguccggcgggguguuguuaucucuguacgucucagcccuacucaguuaucugcuuuacagcgacauucuguugaaguuuuccccuaccgagauaacagcuccaacuaugucucucgauugcgcaaacgccucgaauguucaagcggugaacagaucagcuaccaaaggaguaacauuccugcugccggaacccgaguggaccuauccuaggcucagcuguccagguaguacuuuucagcgggccuuacugaucucuccccaccgcuucggcgaagcaaagggaaauuccgccccucuuauuauccgagagccauuuauugcuugcgggcccaacgaauguaaacauuucgcauugacacacuacgccgcucagccuggcgguuauuacaaugggacccguggagacagaaacaagcugaggcaucuaaucagcgugaaacucggcaagauaccaacggucgaaaauuccaucuuucacauggccgcguggucaggcagugcaugccaugaugggaaggaguggacuuauauuggaguggacgguccggauaacgacgcccugcuuaaaguuaaguacggcgaggcuuacaccgauacauaucacagcuacgccaauaaaauccugcggacucaggagucugcauguaacugcauugggggaaauuguuauuugaugaucaccgacggcuccgcuucaggugugagcgaaugccgcuuccucaagauaagagaggggaggauuaucaaagagauucugcccacaggacgggucaagcacaccgaagaguguacgugcggcuuugccaguaacaagacuaucgaaugugcgugccgcgauaauucuuacacagccaaacgaccuuucgugaaguuaaacguagagaccgacacugcagaaaucagacugaugugcacagauaccuaucucgacacgccaaggcccgaugacggcuccauuaccgggccuugugagagcaauggagacaaagguucgggcgggauaaagggaggcuuuguucaucaacggauggagucuaaaaucggucguugguacucccgcacaaugucaaagacugaaagaauggggaugggccuuuaugugaaauacgauggagacccaugggcugauagugacgcccuggucuucagcggcgugaugguguccaugaaggagcccgggugguacucuuuuggauucgaaauuaaggauaaaaagugcgacgucccguguaucgguauagagaugguucacgauggcgggaaagaaaccuggcauagcgcugccacagcaauuuauugcuugaugggaucaggccagcuacugugggacacugugaccgguguagauauggcccucuga

SEQ ID NO: 157642 - RNA, 1401 nt, Artificial Sequence; identical to SEQ ID NO: 156948
  derived and/or modified CDS sequence (opt3) from neuraminidase__InfluenzaB__AGX21484

SEQ ID NO: 157643 - RNA, 1401 nt, Artificial Sequence; identical to SEQ ID NO: 157004
  derived and/or modified CDS sequence (opt3) from neuraminidase__InfluenzaB__AGX21495

SEQ ID NO: 157644 - RNA, 1401 nt, Artificial Sequence; identical to SEQ ID NO: 157004
  derived and/or modified CDS sequence (opt3) from neuraminidase__InfluenzaB__AGX21506

SEQ ID NO: 157645 - RNA, 1401 nt, Artificial Sequence
  derived and/or modified CDS sequence (opt3) from neuraminidase__InfluenzaB__AGX21517
augcugcccagcaccauccagacacucacucuuuuccugacguccggcgggguguuguuaucucuguacgucucagcccuacucaguuaucugcuuuacagcaacauucuguugaaguuuuccccuaccgagauaacagcuccaacuaugucucucgacugcgcaaaugccucgaacguucaagcggugaauagaucagcuaccaaaggaguaacauuccugcugccggaacccgaguggaccuauccuaggcucagcuguccagguaguacuuuucagaaggccuuacugaucucuccccaccgguucggcgaaacaaaagggaacuccgcaccucuuauuauccgcgagccauuuauugccugcggacccaaugaauguaagcauuucgcuuugacccacuacgcagcccagccuggcgguuauuacaacgggacgcgaggagaucguaauaaacugagacaucuaaucagcgugaagcucggcaagauaccaacugucgagaacuccaucuuucacauggcugccuggucaggcagugcgugccaugacgggaaagaguggaccuauauuggaguggaugguccggacaaugaugcacugcuuaagguuaaauacggcgaagccuacacagacacuuaucacagcuacgcuaacaagauccugaggacccaggagucugccuguaauugcauugggggaaacuguuauuugaugaucacagauggcuccgcaucaggugugagcgaaugccgguuccucaaaauacgcgaggggagaauuaucaaggagauuuuucccaccggaagggucaagcacacggaagaguguacuugcggcuucgcuaguaauaaaacaaucgaaugugccugccgggacaacucuuacaccgcgaagcgcccuuuugugaaacugaauguagagacugauacagccgaaauccgauuaaugugcaccgacacguaucuggauaccccaagacccgacgauggcuccauuacagggccuugugagagcaacggagacaaggguucgggcgggauaaaaggaggcuucguucaucaaaggauggagucuaagaucggucggugguacucccguacuaugucaaaaaccgaacgcauggggaugggccucuaugugaaguacgacggagauccaugggcagacagugaugcucuugccuuuagcggcgucaugguguccaugaaggagcccgggugguacucuuucggauucgaaauuaaagacaagaaaugcgaugugccguguaucgguauagagaugguccacgacggcgggaaggaaacauggcauagcgcugccacugcaauuuauugccugaugggaucaggccaguugcuaugggauaccguuacagguguggacauggcccuguga

SEQ ID NO: 157646 - RNA, 1401 nt, Artificial Sequence
  derived and/or modified CDS sequence (opt3) from neuraminidase__InfluenzaB__AGX21528
augcugcccagcaccauccagacacucacucuuuuccugacguccggcgggguguuguuaucucuguacgucucagccagucuaagcuaucuccuguacuccgacauucuucugaaguuuucuccuaccgagauaacagcuccaacuaugccguuggauugcgcaaacgccucgaauguucaagcggugaacagaucagcuaccaaaggaguaacacuccugcugcccgaaccugaguggaccuauccaaggcucagcugucccgguaguacuuuccagaaggccuuacugaucuccccucaccgguuuggcgaaacaaaaggaaauucugcaccacuuauuauccgcgagcccuucauugccugcgggccuaacgaauguaagcauuuugcuuugacccacuacgcagcccagccaggcgguuauuacaaugggacgcgaggagaccguaacaaacugagacaucuaaucagcgugaagcucggcaagauaccgacugucgaaaauuccaucuuccacauggcugccuggucaggcagugcgugccaugaugggaaagaguggaccuauauuggaguggacggucccgauaacaaugcacugcuuaagguuaaauacggcgaggccuacacagacacuuaucacagcuacgcuaacaagauccugaggacccaggagucugccuguaauugcauugggggaaacuguuauuugaugaucacagauggcuccgcaucaggugugagcgaaugccgguuucucaaaauacgcgaggggagaauuaucaaggagauuuucccuaccggaagggucaagcacacggaagaguguacuugcggcuuugcuaguaauaaaacaaucgaaugugccugccgggacaacucuuacaccgcgaagcgcccauucgugaaacugaauguagagacugauacagccgaaguucgauuaaugugcaccgacacguaucuggauacccccagaccuaacgacggcuccaucacagggccaugugagagcgauggagacaaggguucgggcgggauuaaaggaggcuuugugcaucaaaggauggagucuaagauaggucggugguacucccguacuaugucaaaaaccgaacgcauggggaugggccucuaugucaaguacgacggagaucccugggcagacagugaugcucuuacauucagcggcgugaugguguccaugaaggagccggggugguacucuuuuggauucgaaaucaaagacaagaaaugcgaugucccuuguauugguaucgagaugguucacgacagcggcaaggaaacuuggcauucagccgcuaccgccauauauugccugauggggaguggacaguugcuaugggauacagugaccggcguagacauggcacuguga

SEQ ID NO: 157647 - RNA, 1401 nt, Artificial Sequence; identical to SEQ ID NO: 157004
  derived and/or modified CDS sequence (opt3) from neuraminidase__InfluenzaB__AGX21539

SEQ ID NO: 157648 - RNA, 1401 nt, Artificial Sequence
  derived and/or modified CDS sequence (opt3) from neuraminidase__InfluenzaB__AGX21550
augcugcccagcaccauccagacacucacucuuuuccugacguccggcgggguguuguuaucucuguacgucucagccagucuaagcuaucuccuguacuccgacauucuucugaaguuuucuccuaccgagauaacagcuccaacuaugccguuggauugcgcaaacgccucgaauguucaagcggugaacagaucagcuaccaaaggaguaacacuccugcugcccgaaccugaguggaccuauccaaggcucagcugucccgguaguacuuuccagaaggccuuacugaucuccccucaccgguuuggcgaaacaaaaggaaauucugcaccacuuauuauccgcgagcccuucauugccugcgggccuaacgaauguaagcauuuugcuuugacccacuacgcagcccagccaggcgguuauuacaaugggacgcgaggagaccguaacaaacugagacaucuaaucagcgugaagcucggcaagauaccgacugucgaaaauuccaucuuccacauggcugccuggucaggcagugcgugccaugaugggaaagaguggaccuauauuggaguggacggucccgauaacaaugcacugcuuaagguuaaauacggcgaggccuacacagacacuuaucacagcuacgcuaacaagauccugaggacccaggagucugccuguaauugcauugggggaaacuguuauuugaugaucacagauggcuccgcaucaggugugagcgaaugccgguuucucaaaauacgcgaggggagaauuaucaaggagauuuucccugcuggaagggucaagcacaccgaagaguguacgugcggcuuugccaguaauaaaacuaucgaaugugcgugccgggacaacucuuacacagccaagcgcccauucgugaaacugaauguagagaccgauacugcagaaguucgauuaaugugcacagacaccuaucuggauacgcccagaccuaacgacggcuccaucaccgggccaugugagagcgauggagacaaggguucgggcgggauuaaaggaggcuuugugcaucaaaggauggagucuaagauaggucggugguacucccguacaaugucaaaaacugaacgcauggggaugggccucuaugucaaguacgacggagaucccugggcugacagugaugcccuuaccuucagcggcgugaugguguccaugaaggagccggggugguacucuuuuggauucgaaaucaaagacaagaaaugcgaugucccuuguauugguaucgagaugguucacgacggcgggaaggaaacauggcauagcgcugccacugcaauauauugccugaugggaucaggccaguugcuaugggauaccgugacagguguagacauggcccuguga

SEQ ID NO: 157649 - RNA, 1401 nt, Artificial Sequence
  derived and/or modified CDS sequence (opt3) from neuraminidase__InfluenzaB__AGX21561
augcugcccagcaccauccagacacucacucuuuuccugacguccggcgggguguuguuaucucuguacgucucagccagucuaagcuaucuccuguacuccgacauucuucugaaguuuucuccuaccgagauaacagcuccaacuaugccguuggauugcgcaaacgccucgaauguucaagcggugaacagaucagcuaccaaaggaguaacacuccugcugcccgaaccugaguggaccuauccaaggcucagcugucccgguaguacuuuccagaaggccuuacugaucuccccucaccgguuuggcgaaacaaaaggaaauucugcaccacuuauuauccgcgagcccuucauugccugcgggccuaacgaauguaagcauuuugcuuugacccacuacgcagcccagccaggcgguuauuacaaugggacgcgaggagaccguaacaaacugagacaucuaaucagcgugaagcucggcaagauaccgacugucgaaaauuccaucuuccacauggcugccuggucaggcagugcgugccaugaugggaaagaguggaccuauauuggaguggacggucccgauaacaaugcacugcuuaagguuaaauacggcgaggccuacacagacacuuaucacagcuacgcuaacaagauccugaggacccaggagucugccuguaauugcauugggggaaacuguuauuugaugaucacagauggcuccgcaucaggugugagcgaaugccgguuucucaaaguccgcgaggggagaauaauuaaggagaucuucccuaccggaagggugaagcacacggaagaguguacuugcggcuuugcuaguaauaaaacaauugaaugugccugccgggacaacucuuacaccgcgaagcgcccauucguaaaacugaauguugagacugauacagccgaagugcgauuaaugugcaccgacacguaucuggauacccccagaccuaacgacggcuccaucacagggccaugugagagcgauggagacaaggguucgggcgggaucaaaggaggcuuuguccaucaaaggauggagucuaagauuggucggugguacucccguacuaugucaaaaaccgaacgcauggggaugggccucuaugugaaguacgacggagaucccugggcagacagugaugcucuuacauucagcggcgugauggucuccaugaaggagccggggugguacucuuuuggauucgaaauaaaagacaagaaaugcgauguuccuuguaucgguauugagauggugcacgacggcgggaaggaaacuuggcauagcgccgcuaccgccaucuauugccugaugggaucaggccaguugcuaugggauacaguaaccgguguggacauggcacuguga

SEQ ID NO: 157650 - RNA, 1401 nt, Artificial Sequence; identical to SEQ ID NO: 156948
  derived and/or modified CDS sequence (opt3) from neuraminidase__InfluenzaB__AGX21572

SEQ ID NO: 157651 - RNA, 1401 nt, Artificial Sequence
  derived and/or modified CDS sequence (opt3) from neuraminidase__InfluenzaB__AGX21583
augcugcccagcaccauccagacacucacucuuuuccugacguccggcgggguguuguuaucucuguacgucucagcccuacucaguuaucugcuuuacagcgacauucuguugaaguuuuccccuaccgagauaacagcuccaacuaugucucucgauugcgcaaacgccucgaauguucaagcggugaacagaucagcuaccaaaggaguaacauuccugcugccggaacccgaguggaccuauccuaggcucagcuguccagguaguacuuuucagcgggccuuacugaucucuccccaccgcuucggcgaagcaaagggaaauuccgccccucuuauuauccgagagccauuuauugcuugcgggcccaacgaauguaaacauuucgcauugacacacuacgccgcucagccuggcgguuauuacaaugggacccguggagacagaaacaagcugaggcaucuaaucagcgugaaacucggcaagauaccaacggucgaaaauuccaucuuucacauggccgcguggucaggcagugcaugccaugaugggaaggaguggacuuauauuggaguggacgguccggauaacgacgcccugcuuaaaguuaaguacggcgaggcuuacaccgauacauaucacagcuacgccaauaaaauccugcggacucaggagucugcauguaacugcauugggggaaauuguuauuugaugaucaccgacggcuccgcuucaggugugagcgaaugccgcuuccucaagauaagagaggggaggauuaucaaagagauucugcccacaggacgggucaagcacaccgaagaguguacgugcggcuuugccaguaacaagacuaucgaaugugcgugccgcgauaauucuuacacagccaaacgaccuuucgugaaguuaaacguagagaccgacacugcagaaaucagacugaugugcacagauaccuaucucgacacgccaaggcccgaugacggcuccauuaccgggccuugugagagcaauggagacaaagguucgggcgggauaaagggaggcuuuguucaucaacggauggagucuaaaaucggucguugguacucccgcacaaugucaaagacugaaagaauggggauggagcuuuaugugaaauacgauggcgacccaugggcugauagugacgcccuggcuuucagcggagucaugguguccaugaaggaacccggcugguacucuuuuggguucgagauuaaggauaaaaagugcgacgugccguguaucggaauagaaaugguccacgaugguggcaaagagaccuggcauagcgccgcaacagccauuuauugcuugauggggucaggacagcuacugugggacacuguuaccggcguggauauggcucucuga

SEQ ID NO: 157652 - RNA, 1401 nt, Artificial Sequence; identical to SEQ ID NO: 156948
  derived and/or modified CDS sequence (opt3) from neuraminidase__InfluenzaB__AGX21594

SEQ ID NO: 157653 - RNA, 1401 nt, Artificial Sequence; identical to SEQ ID NO: 157170
  derived and/or modified CDS sequence (opt3) from neuraminidase__InfluenzaB__AGX21605

SEQ ID NO: 157654 - RNA, 1401 nt, Artificial Sequence
  derived and/or modified CDS sequence (opt3) from neuraminidase__InfluenzaB__AGX21615
augcugcccagcaccauccagacacucacucuuuuccugacguccggcgggguguuguuaucucuguacgucucagccagucuaagcuaucuccuguacuccgacauucuucugaaguuuucuaccacagagauaacugcuccuaccaugccauuggauugcgcaaacgccucgaauguucaagcggugaacagaucagcuacaaaaggaguaacccuccugcugccggaacccgaguggacuuauccuaggcucagcuguccagguaguacauuccagaaggccuuacugaucucuccccaccgguuuggcgaaaauaaagggaacuccgcaccucuuauuauccgcgagccauucauugccugcggacccaaugaauguaagcauuuugcuuugacccacuacgcagcccagccuggcgguuauuacaacgggacgcgaggagaccguaauaaacugagacaucuaaucagcgugaagcucggcaagauaccaacugucgagaacuccaucuuccacauggcugccuggucaggcagugcgugccaugaugggaaagaguggaccuauauuggaguggacgguccggauaauaacgcacugcuuaagguuaaauacggcgaagccuacacagacacuuaucacagcuacgcuaauaagauccugaggacccaggagucugccuguaacugcauugggggaaauuguuauuugaugaucacagauggcuccgcaucaggugugagcgaaugccgguuucucaaaauacgcgaggggagaauuaucaaggagauuuuccccaccggaagggucaagcacacggaagaguguacuugcggcuuugcuaguaacaaaacaaucgaaugugccugccgggacaauucuuacaccgcgaagcgcccuuucgugaaacugaacguagagacugauacagccgaaauccgauuaaugugcaccgacacguaucuggauaccccaagacccaacgacggcuccauuacagggccuugugagagcgauggagacaaggguucgggcgggauaaaaggaggcuuuguucaucaaaggauggagucuaagaucggucggugguacucccguacuaugucaaaaaccgaacgcauggggaugggccucuaugugaaguacgacggagauccaugggcagacagugaugcucuugccuucagcggcgucaugguguccaugaaggagcccgggugguacucuuuuggauucgaaauuaaagacaagaaaugcgaugugccguguaucgguauagagaugguccacgacggcgggaaggaaacauggcauagcgcugccacugcaauuuauugccugaugggaucaggccaguugcuaugggauaccguuacagguguggacauggcccuguga

SEQ ID NO: 157655 - RNA, 1401 nt, Artificial Sequence; identical to SEQ ID NO: 157004
  derived and/or modified CDS sequence (opt3) from neuraminidase__InfluenzaB__AGX21626

SEQ ID NO: 157656 - RNA, 1401 nt, Artificial Sequence; identical to SEQ ID NO: 157004
  derived and/or modified CDS sequence (opt3) from neuraminidase__InfluenzaB__AGX21637

SEQ ID NO: 157657 - RNA, 1401 nt, Artificial Sequence; identical to SEQ ID NO: 157004
  derived and/or modified CDS sequence (opt3) from neuraminidase__InfluenzaB__AGX21648

SEQ ID NO: 157658 - RNA, 1401 nt, Artificial Sequence
  derived and/or modified CDS sequence (opt3) from neuraminidase__InfluenzaB__AGX21659
augcugcccagcaccauccagacacucacucuuuuccugacguccggcgggguguuguuaucucuguacgucucagcccuacucaguuaucugcuuuacagcgacauucuguugaaguuuuccccuaccgagauaacagcuccaacuaugucucucgauugcgcaaacgccucgaauguucaagcggugaacagaucagcuaccaaaggaguaacauuccugcugccggaacccgaguggaccuauccuaggcucagcuguccagguaguacuuuucagaaggccuuacugaucucuccccaccgguucggcgaaacaaaaggaaauuccgcaccucuuauuauccgcgagccauuuauugccugcgggcccaacgaauguaagcauuucgcuuugacccacuacgcagcccagccuggcgguuauuacaaugggacgcgaggagaccguaacaaacugagacaucuagugagcgucaagcucggcaagaucccaacuguggaaaauuccauauuucacauggcugccuggucaggcagugcgugccaugaugggaaagaguggaccuauaucggaguugacgguccggauaacgacgcacugcuuaaggugaaauacggcgaggccuacacagauacuuaucacagcuacgcuaauaagauucugaggacccaggagucugccuguaacugcaucgggggaaauuguuauuugaugauuacagacggcuccgcaucaggugucagcgaaugccgguuccucaaaauccgcgaggggagaauaauuaaggagaucuuucccaccggaagggugaagcacacggaagaguguacuugcggcuucgcuaguaacaaaacaauugaaugugccugccgggauaauucuuacaccgcgaagcgcccuuuuguaaaacugaacguugagacugacacagccgaaauccgauuaaugugcaccgauacguaucuggacaccccaagacccgaugacggcuccaucacagggccuugugagagcaauggagacaaggguucgggcgggauuaaaggaggcuucgugcaucaaaggauggagucuaagauaggucggugguacucccguacuaugucaaaaaccgaacgcauggggaugggccucuaugucaaguacggaggcgauccaugggcagacagugaugcucuugccuuuagcggggugaugguguccaugaaggagcccggaugguacucuuucgguuucgaaaucaaagacaagaaaugcgaugucccguguauuggcaucgagaugguucacgacgggggaaaggaaacauggcauagcgcugccacugcaauauauugccugaugggcucaggucaguugcuaugggauaccgugacagggguagacauggcccuguga

SEQ ID NO: 157659 - RNA, 1401 nt, Artificial Sequence
  derived and/or modified CDS sequence (opt3) from neuraminidase__InfluenzaB__AGX21670
augcugcccagcaccauccagacacucacucuuuuccugacguccggcgggguguuguuaucucuguacgucucagcccuacucaguuaucugcuuuacagcgacauucuguugaaguuuuccccuaccgagauaacagcuccaacuaugucucucgauugcgcaaacgccucgaauguucaagcggugaacagaucagcuaccaaaggaguaacauuccugcugccggaacccgaguggaccuauccuaggcucagcuguccagguaguacuuuucagaaggccuuacugaucucuccccaccgguucggcgaaacaaaaggaaauuccgcaccucuuauuauccgcgagccauuuauugccugcgggcccaacgaauguaagcauuucgcuuugacccacuacgcagcccagccuggcgguuauuacaaugggacgcgaggagaccguaacaaacugagacaucuaaucagcgugaagcucggcaagauaccaacugucgaaaauuccaucuuucacauggcugccuggucaggcagugcgugccaugaugggaaagaguggaccuauauuggaguggacgguccggauaacgacgcacugcuuaagguuaaauacggcgaggccuacacagauacuuaucacagcuacgcuaauaagauccugaggacccaggagucugccuguaacugcauugggggaaauuguuauuugaugaucacagacggcuccgcaucaggugugagcgaaugccgguuccucaaaauacgcgaggggagaauuaucaaggagauuuuucccaccggaagggucaagcacacggaagaguguacuugcggcuucgcuaguaacaaaacaaucgaaugugccugccgggauaauucuuacaccgcgaagcgcccuuuugugaaacugaacguagagacugacacagccgaaauccgauuaaugugcaccgauacguaucuggacaccccaagacccgaugacggcuccauuacagggccuugugagagcaauggagacaaggguucgggcgggauaaaaggaggcuucguucaucaaaggauggagucuaagaucggucggugguacucccguacuaugucaaaaaccgaacgcauggggaugggccucuaugugaaguacgauggagacccaugggcagauagugacgcucuugccuuuagcggcgucaugguguccaugaaggagcccgggugguacucuuucggauucgaaauuaaagauaagaaaugcgacgugccguguaucgguacagagaugguccacgauggcgggaaggaaacuuggcauagcgcugccaccgcaauauauugccugaugggaucaggccaguugcuaugggacacaguuaccgguguggauauggcccuguga

SEQ ID NO: 157660 - RNA, 1401 nt, Artificial Sequence
  derived and/or modified CDS sequence (opt3) from neuraminidase__InfluenzaB__AGX21681
augcugcccagcaccauccagaugcucacacuuuuccugacuuccggcgggguguuguuaucucuguacgucucagccagucuaagcuaucuccuguacuccgacauucuucugaaguuuucuccuacggagauaaccgcuccaacaaugccguuggauugcgcaaacgccucgaauguucacgcggugaacagaucagcuacuaaaggaguaaccuuccuccugcccgaaccugaguggacauauccaaggcugagcugucccgguaguaccuuucaaaaggcccucuuaaucuccccucaucgguucggcgaaacuaaaggaaauucugcaccacugauuauccgcgagcccuuuauugccugcgggccuaacgaauguaagcacuucgcucuuacacauuacgcagcccagccaggcgguuauuacaaugggacccgaggagaccguaacaaauugagacaccugaucagcgugaagcuaggcaagauaccgacggucgaaaauuccaucuuucauauggcugccuggucaggcagugcgugccacgaugggaaagaguggacuuauauuggaguggacggucccgauaacaaugcacuccugaagaucaaauacggcgaggccuacaccgacacauaucacagcuacgcuaacaauauucuuaggacucaggagucugccuguaacugcaucgggggaaauuguuaucugaugauaaccgauggcuccgcaucagguguuagcgaaugccgguucuugaagauucgcgaggggagaaucauuaaagagaucuuuccuacaggaagggugaagcauaccgaagaguguacgugcggcuucgcuaguaacaagacuaucgaaugugccugccgggacaauucuuacacagcgaaacgcccauuugucaagcucaacguggagaccgauacugccgaaauucgacugaugugcacagacaccuauuuagauacgcccagaccugacgauggcuccauaaccgggccaugugagagcaacggagacaaagguaauggcgggaucaagggaggcuucguacaccagaggauggcaucgaaaauuggucggugguacucucguacaauguccaagacugagcgcaaagggaugggccuguauguuaaguacgacggagaucccuggaccgacucagaugcucucgccuuuagaggcgugauggucaguaugaaggaaccggggugguacagcuucggauucgagaucaaagacaagaaaugcgaugugccuuguauagguauugaaauggugcaugacggcgggaaggagacauggcacuccgcugccacugcaaucuauugccuuaugggaucuggccaacuguugugggauaccgucacagguguugacauggcccuauga

SEQ ID NO: 157661 - RNA, 1401 nt, Artificial Sequence; identical to SEQ ID NO: 156943
  derived and/or modified CDS sequence (opt3) from neuraminidase__InfluenzaB__AGX21692

SEQ ID NO: 157662 - RNA, 1401 nt, Artificial Sequence; identical to SEQ ID NO: 157170
  derived and/or modified CDS sequence (opt3) from neuraminidase__InfluenzaB__AGX21703

SEQ ID NO: 157663 - RNA, 1401 nt, Artificial Sequence
  derived and/or modified CDS sequence (opt3) from neuraminidase__InfluenzaB__AGX21714
augcugcccagcaccauccagacacucacucuuuuccugacguccggcgggguguuguuaucucuguacgucucagccagucuaagcuaucuccuguacuccgacauucuucugaaguuuucuccuaccgagauaacagcuccagcaaugccguuggauugcgccaacgcgucgaauguucaagcugugaacagaucagccacuaaaggacucacccugcugcuccccgaaccugaguggacauauccaagguuaagcugucccgguaguaccuuccagaaggcacugcuuaucuccccucaccgguuuggcgaaacuaaaggaaauucugccccauugauuauccgcgagcccuucauugcuugcgggccuaacgaauguaagcauuuugcacugacacacuacgccgcucagccaggcgguuauuacaaugggacccgaggagaccguaacaaacuaagacaucucaucagcguaaagcugggcaagauaccgacgguggaaaauuccaucuuccacauggccgcguggucaggcagugcaugccaugaugggaaagaguggacuuauauuggagucgacggucccgauaacaaugcccuucugaaggugaaauacggcgaggcuuacaccgacacauaucacagcuacgccaacaagaucuugaggacucaggagucugcauguaauugcauugggggaaacuguuaucucaugaucaccgauggcuccgcuucagguguuagcgaaugccgguuucugaaaauacgcgaggggagaauuaucaaggagauuuucccuacaggaagggugaagcacaccgaagaguguacgugcggcuuugccaguaauaaaacuaucgaaugugcgugccgggacaacucuuacacagccaagcgcccauucgucaaauuaaauguggagaccgauacugcagaaauccgacugaugugcacagacaccuaucucgauacgcccagaccuaacgacggcuccauuaccgggccaugugagagcgauggagacaaggguucgggcgggauaaaaggaggcuuuguacaucaaaggauggagucuaagaucggucggugguacucccguacaaugucaaaaacugaacgcauggggaugggccuuuauguuaaguacgacggagaucccugggcugacagugaugcccuggcuuucagcggcgugauggucuccaugaaggagccggggugguacucuuuuggauucgaaauuaaagacaagaaaugcgaugugccuuguaucgguauagagauggugcacgacggcgggaaggaaaccuggcauagcgccgcaacagccauuuauugcuugaugggaucaggccagcuacugugggauacugucaccgguguugacauggcucucuga

SEQ ID NO: 157664 - RNA, 1401 nt, Artificial Sequence
  derived and/or modified CDS sequence (opt3) from neuraminidase__InfluenzaB__AGX21725
augcugcccagcaccauccagaugcucacacuuuuccugacuuccggcgggguguuguuaucucuguacgucucagccagucuaagcuaucuccuguacuccgacauucuucugaaguuuucuccuacggagauaaccgcuccaacaaugccguuggauugcgcaaacgccucgaauguucacgcggugaacagaucagcuacuaaaggaguaaccuuccuccugcccgaaccugaguggacauauccaaggcugagcugucccgguaguaccuuucaacgggcccucuuaaucuccccucaucgcuucggcgaaacuaagggaaauucugcaccacugauuauccgagagcccuuuauugccugcgggccuaacgaauguaaacacuucgcucuuacacauuacgcagcccagccaggcgguuauuacaaugggacccguggagacagaaacaaguugaggcaccugaucagcgugaaacuaggcaagauaccgacggucgaaaauuccaucuuucauauggcugccuggucaggcagugcgugccacgaugggaaggaguggacuuauauuggaguggacggucccgauaacaaugcacuccugaaaaucaaguacggcgaggccuacaccgacacauaucacagcuacgcuaacaauauucuucggacucaggagucugccuguaacugcaucgggggaaauuguuaucugaugauaaccgauggcuccgcaucagguguuagcgaaugccgcuucuugaaaauuagagaggggaggaucauuaaggagaucuuuccuacaggacgggugaaacauaccgaagaguguacgugcggcuucgcuaguaacaagacuaucgaaugugccugccgcgacaauucuuacacagcgaagcgaccauuugucaaacucaacguggagaccgauacugccgaaauuagacugaugugcacagacaccuauuuagauacgcccaggccugacgauggcuccauaaccgggccaugugagagcaacggagacaaggguucgggcgggaucaaaggaggcuucguacaccagcggauggcaucuaagauuggucguugguacucccgcacaaugucaaaaacugagagaaaggggaugggccuguauguuaaauacgacggagaucccuggaccgacagugaugcucucgccuuuaggggcgugauggucagcaugaaggaaccggggugguacuccuucggauucgagaucaaggacaaaaagugcgaugugccuuguauagguauugaaauggugcaugacggcgggaaagagacauggcacucugcugccacugcaaucuauugccuuaugggaagcggccaacuguugugggauaccgucacagguguugacauggcccuauga

SEQ ID NO: 157665 - RNA, 1401 nt, Artificial Sequence
  derived and/or modified CDS sequence (opt3) from neuraminidase__InfluenzaB__AGX21747
augcugcccagcaccauccagacacucacucuuuuccugacguccggcgggguguuguuaucucuguacgucucagccagucuaagcuaucuccuguacuccgacauucuucugaagguuucucaaaccgagauaacagcuccuacuaugccauuggauugcgcaaacgccucgaaugugcaggcgguaaacagaucagcuaccaaaggagugacacuccugcugccggaacccgaguggaccuauccuaggcucagcuguccagguaguacuuuucagaaggccuuacugaucucuccccaccgguucggcgaaacaaaaggaaauuccgcaccucuuauuauccgcgagccauuuauugccugcgggcccaaggaauguaaacauuucgcuuugacccacuacgcagcccagccuggcgguuauuacaacgggacgcgagaggaccguaauaagcugagacaucuaaucagcgucaagcucggaaaaauaccaacuguggagaacuccaucuuucacauggcugccuggucaggcagugcgugccaugauggcagggaauggaccuauauugggguugacggaccggauagcaaugcacugcuuaagaucaaauacggugaggccuacacagacacuuaucacucuuacgcuaagaacauucugcggacccaagaauccgccuguaauugcaucggcggggauuguuauuugaugauaacagacggaucagcaagcggcauuagugagugccgcuuccucaaaaucagagaggguaggauuaucaaggaaaucuuucccaccgggcgggugaagcacacggaggaauguacuugcggauucgcuucuaacaaaacaauugagugugccugccgcgauaauuccuacaccgcgaagcgaccuuuugucaaacugaacguggaaacugacacagccgagauaagauuaaugugcaccgagacguaucuggauaccccaaggcccgacgauggcagcaucacaggcccuugugaaucgaauggggacaagggaucugguggcauuaaagggggauucguacaucagcggauggcauccaagaucggccguugguacucacgcacuaugaguaaaaccaagagaauggguauggggcucuauguuaaguacgacggcgauccauggacagacagcgaggcucuugcccuguccggagugauggucucuauggaggaacccggcugguacagcuuuggguucgaaauaaaagauaagaaaugcgacgugccguguauuggaaucgagauggugcacgaugguggcaagacuaccuggcauucagcugccacagcaaucuauugcuugauggggaguggacagcuacugugggacaccgucacuggcguugauauggcccucuga

SEQ ID NO: 157666 - RNA, 1401 nt, Artificial Sequence
  derived and/or modified CDS sequence (opt3) from neuraminidase__InfluenzaB__AGX21758
augcugcccagcaccauccagacacucacucuuuuccugacguccggcgggguguuguuaucucuguacgucucagccagucuaagcuaucuccuguacuccgacauucuucugaaguuuaccccuacagagauaacuguuccaaccaugccguuggauugcgcuaacgcaucuaaugugcaagccguaaacagaucggcgacaaaaggagugacccuccugcugcccgaaccugaguggacuuauccaaggcucucaugucccgguagcacauuccagaaggcuuuacugaucaguccucaccgguuuggcgaaaccaaaggaaauuccgccccacuuauuauccgcgagcccuucauugcaugcgggccuaaggaauguaaacauuuugccuugacgcacuacgcugcacagccaggcgguuauuacaacgggacucgagaggaccguaauaagcugagacaucuaaucucugucaagcucggaaaaauaccgaccguggagaacagcaucuuccacauggccgcuugguccggcucagccugccaugauggcaaggaauggacauauauugggguugacggacccgauaguaaugcgcugcuuaaaaucaaguacggugaggcauacacugacaccuaucacagcuacgccaacaauauucugaggacacaggaaucugcuuguaacugcaucggcgggaauuguuauuugaugauaaccgauggauccgccucaggcauuagcgagugccgguuucucaaaauccgcgaggguagaauuaucaaggaaaucuucccuacggggagggugaagcacacugaggaauguacaugcggauuugcaaguaacaaaaccauugagugugcuugccgggacaauucuuacacugccaagcgcccauucgucaaacugaacguggaaacagauaccgcggagauacgauuaaugugcacggagaccuaucuggacacacccagaccugaugacggcuccaucacuggcccaugugaaagcaaugggaacaagggaucggguggcauuaaagggggauuuguacaucaaaggauggccucuaagaucggccggugguacucccguaccaugucaaaaacaaagcgcauggguauggggcucuauguuaaguacgauggcgaccccuggacugacagugaugcacuugcucugagcggagugauggucuccauggaggaaccgggcugguacucuuucggguuugagauaaaagacaagaaaugcgaugugccuuguauuggaaucgaaauggugcacgacgguggcaaggagaccuggcauagcgccgcuacagccaucuauugcuugauggggucaggacagcuacugugggauaccgucacuggcguugacauggcacucuga

SEQ ID NO: 157667 - RNA, 1401 nt, Artificial Sequence
  derived and/or modified CDS sequence (opt3) from neuraminidase__InfluenzaB__AGX21769
augcugcccagcaccauccagacacucacucuuuuccugacguccggcgggguguuguuaucucuguacgucucagccagucuaagcuaucuccuguacuccgacauucuucugaaguuuucucaaaccgagauaacagcuccuacuaugccauuggauugcgcaaacgccucgaauguucaggcggcuaacagaucagccaccaaaggagugacacuccugcugccggaacccgaguggaccuauccuaggcucagcuguccagguaguacuuuccagaaggcauuacugaucucuccccaccgguuuggcgaaacaaaaggaaauuccgccccucuuauuauccgcgagccauucauugcuugcgggcccaaggaauguaaacauuuugcauugacccacuacgccgcucagccuggcgguuauuacaacgggacgcgagaggaccguaauaagcugagacaucuaaucagcguaaagcucggaaaaauaccaacuguggagaacuccaucuuccacauggccgcguggucaggcagugcaugccaugauggcagggaauggaccuauauuggggucgacggaccggauagcaaugcccugcuuaagaucaaauacggugaggcuuacacagacacuuaucacucuuacgccaagaacauucugcggacccaagaauccgcauguaauugcaucggcggggauuguuauuugaugauaacagacggaucagcuagcggcauuagugagugccgcuuucucaaaaucagagaggguaggauuaucaaggaaaucuuccccaccgggcgggugaagcacacggaggaauguacuugcggauuugccucuaacaaaacaauugagugugcgugccgcgauaauuccuacaccgccaagcgaccuuucguuaaacugaacguggaaacugacacagcagagauaagauuaaugugcaccaagacguaucuggauaccccaaggcccaaugacggcagcaucacaggcccuugugagucggauggggacaaaggaucugguggcauuaaagggggauuuguccaucagcggauggcuuccaagaucggccguugguacucacgcacuaugaguaagaccaagagaauggguauggggcucuaugugaaauacgacggcgauccauggacagacagcgaagcccuugcucuguccggaguaaugguuucuauggaggaacccggcugguacagcuucggguuugagauaaaggauaaaaagugcgacgugccguguauuggaaucgaaaugguccacgaugguggcaaaacuaccuggcauucagccgcaacagccaucuauugcuugauggggaguggacagcuacugugggacaccgugacuggcguggauauggcucucuga

SEQ ID NO: 157668 - RNA, 1401 nt, Artificial Sequence
  derived and/or modified CDS sequence (opt3) from neuraminidase__InfluenzaB__AGX21780
augcugcccagcaccauccagacacucacucuuuuccugacguccggcgggguguuguuaucucuguacgucucagccagucuaagcuaucuccuguacuccgacauucuucugaaguuuucucaaaccgagauaacagcuccuacuaugccauuggauugcgcaaacgccucgaauguucaggcggugaacagaucagcuaccaaaggaguaacacuccugcugccggaacccgaguggaccuauccuaggcucagcuguccagguaguacuuuccagaaggccuuacugaucucuccccaccgguuuggcgaaacaaaaggaaauuccgcaccucuuauuauccgcgagccauucauugccugcgggcccaaggaauguaaacauuuugcuuugacccacuacgcagcccagccuggcgguuauuacaacgggacgcgagaggaccguaauaagcugagacaucuaaucagcgugaagcucggaaaaauaccaacugucgagaacuccaucuuccacauggcugccuggucaggcagugcgugccaugauggcagggaauggaccuauauugggguggacggaccggauagcaaugcacugcuuaagaucaaauacggugaggccuacacagacacuuaucacucuuacgcuaagaacauucugcggacccaagaauccgccuguaauugcaucggcggggauuguuauuugaugauaacagacggaucagcaagcggcauuagugagugccgcuuucucaaaaucagagaggguaggauuaucaaggaaaucuuccccaccgggcggguuaagcacacggaggaauguacuugcggauuugcuucuaacaaaacaauugagugugccugccgcgauaauuccuacaccgcgaagcgaccuuucgugaaacugaacgucgaaacugacacagccgagauaagauuaaugugcaccgagacguaucuggauaccccaaggcccaaugacggcagcaucacaggcccuugugaaucgaacggggauaagggaucugguggcauuaaagggggauuugugcaucagcggauggaguccaagaucggccguugguacucacgcacuaugaguaaaaccaagagaauggguauggggcucuauguaaaguacgacggcgacccauggacagauagcgaagcacuugcucuguccggaguuauggugucuauggaggaacccggcugguacagcuucggguuugagauaaaagacaagaaaugcgaugucccguguauuggaaucgagauggugcacgacgguggcaagacuaccuggcauucagccgcuacagccaucuauugcuugauggggaguggacagcuacugugggauaccgugacuggcgucgacaugacgcucuga

SEQ ID NO: 157669 - RNA, 1401 nt, Artificial Sequence
  derived and/or modified CDS sequence (opt3) from neuraminidase__InfluenzaB__AGX21791
augcugcccagcaccauccagacacucacucuuuuccugacguccggcgggguguuguuaucucuguacgucucagccagucuaagcuaucuccuguacuccgacauucuucugaaguuuucuccuaccgagauaacagcuccaacuaugccguuggauugcgcaaacgccucgaauguucaagcggugaacagaucagcuaccaaaggaguaacacuccugcugcccgaaccugaguggaccuauccaaggcucagcugucccgguaguacuuuccagaaggccuuacugaucuccccucaccgguuuggcgaaacaaaaggaaauucugcaccacuuauuauccgcgagcccuucauugccugcgggccuaaggaauguaaacauuuugcuuugacccacuacgcagcccagccaggcgguuauuacagcgggacgcgaggagaccguaacaagcugagacaucuaaucuccgugaagcucggcaaaauaccgacugucgaaaauucaaucuuccacauggcugccuggaguggcagcgcgugccaugaugggaaggaguggaccuauauuggaguggacggucccgauaacaaugcacugcuuaaaaucaaguacggcgaagccuacacagacacuuaucacucuuacgcuaacaauauucugaggacccaggaguccgccuguaacugcaucgggggaaauuguuauuugaugauaacagauggcucagcaagcgguauuagugaaugccgguuucucaaaauccgcgaggggagaauuaucaaggagaucuucccuaccggaaggguuaagcacacggaagaguguacuugcggcuuugcuucuaacaaaacaauugaaugugccugccgggacaauaacuacaccgcgaagcgcccauucgugaaacugaaugucgagacugauacagccgaaauacgauuaaugugcaccgagacguaucuggacacccccagaccugaugacggcuccaucacagggccaugugagagcaacggagauaaggguucgggcgggauuaaaggaggcuuugugcaucaaaggauggcaucuaagaucggucggugguacucccguacuaugaguaaaaacaagcgcauggggaugggccucuauguaaaguacgacggagaccccugggcugauucagacgcccuugcucugagcggcguuaugguguccauggaggagccggggugguacucuuucggauuugaaauaaaagauaagaaaugcgacgucccuuguauugguaucgagauggugcacgauggcgggaaggaaaccuggcauagcgccgcaacagccaucuauugcuugaugggaucaggccagcuacugugggacacugugaccggugucgauauggcucucuga

SEQ ID NO: 157670 - RNA, 1401 nt, Artificial Sequence
  derived and/or modified CDS sequence (opt3) from neuraminidase__InfluenzaB__AGX21802
augcugcccagcaccauccagacacucacucuuuuccugacguccggcgggguguuguuaucucuguacgucucagccagucuaagcuaucuccuguacuccgacauucuucugaaguuuucucaaaccgagauaacagcuccuacuaugccauuggauugcgcaaacgccucgaauguucaggcggcuaacagaucagccaccaaaggagugacacuccugcugccggaacccgaguggaccuauccuaggcucagcuguccagguaguacuuuccagaaggcauuacugaucucuccccaccgguuuggcgaaacaaaaggaaauuccgccccucuuauuauccgcgagccauucauugcuugcgggcccaaggaauguaaacauuuugcauugacccacuacgccgcucagccuggcgguuauuacaacgggacgcgagaggaccguaauaagcugagacaucuaaucagcguaaagcucggaaaaauaccaacuguggagaacuccaucuuccacauggccgcguggucaggcagugcaugccaugauggcagggaauggaccuauauuggggucgacggaccggauagcaaugcccugcuuaagaucaaauacggugaggcuuacacagacacuuaucacucuuacgccaagaacauucugcggacccaagaauccgcauguaauugcaucggcggggauuguuauuugaugauaacagacggaucagcuagcggcauuagugagugccgcuuucucaaaaucagagaggguaggauuaucaaggaaaucuuccccaccgggcgggugaagcacacggaggaauguacuugcggauuugccucuaacaaaacaauugagugugcgugccgcgauaauuccuacaccgccaagcgaccuuucguuaaacugaacguggaaacugacacagcagagauaagauuaaugugcaccgagacguaucuggauaccccaaggcccaaugacggcagcaucacaggcccuugugaaucggauggggacaagggaucugguggcauuaaagggggauuuguccaucagcggauggcuuccaagaucggccguugguacucacgcacuaugaguaaaaccaagagaauggguauggggcucuaugugaaguacgacggcgauccauggacagacagcgaggcccuugcucuguccggaguaaugguuucuauggaggaacccggcugguacagcuucggguuugaaauaaaagauaagaaaugcgacgugccguguauuggaaucgagaugguccacgaugguggcaagacuaccuggcauucagccgcaacagccaucuauugcuugauggggaguggacagcuacugugggacaccgugacuggcguggauauggcucucuga

SEQ ID NO: 157671 - RNA, 1401 nt, Artificial Sequence
  derived and/or modified CDS sequence (opt3) from neuraminidase__InfluenzaB__AGX21813
augcugcccagcaccauccagacacucacucuuuuccugacguccggcgggguguuguuaucucuguacgucucagccagucuaagcuaucuccuguacuccgacauucuucugaaguuuucucaaaccgagauaacagcuccuaaaaugccauuggauugcgcaaacgccucgaauguucaggcggcuaacagaucagccacuaagggagugacccuccugcugccggaacccgaguggacauauccuaggcucagcuguccagguaguaccuuccagaaagcauuacugaucucuccccaccgguuuggcgaaacuaagggaaauuccgccccucuuauuauccgcgagccauucauugcuugcgggcccaaagaauguaagcauuuugcauugacacacuacgccgcucagccuggcgguuauuacaacgggacccgagaggaccguaauaagcugagacaucuaaucagcguaaaacucggaaagauaccaacgguggagaacuccaucuuccacauggccgcguggucaggcagugcaugccaugauggcagggaauggacuuauauuggggucgacggaccggauagcaaugcccugcuuaaaaucaaguacggugaggcuuacaccgacacauaucacucuuacgccaaaaacauucugcggacucaagaauccgcauguaauugcaucggcggggauuguuauuugaugauaaccgacggaucagcuagcggcauuagugagugccgcuuucucaagaucagagaggguaggauuaucaaggaaaucuuccccacagggcgggugaaacacaccgaggaauguacgugcggauuugccucuaacaagacuauugagugugcgugccgcgauaauuccuacacagccaaacgaccuuucguuaagcugaacguggaaaccgacacugcagagauaagauuaaugugcacagagaccuaucuggauacgccaaggcccaaugacggcagcaucaccggcccuugugaaucggauggggacaaaggaucugguggcauuaaagggggauuuguccaucagcggauggcuuccaagaucggccguugguacucacgcacaaugaguaagacuaagagaauggguauggggcucuaugugaaauacgacggcgauccauggaccgacagcgaggcccuugcucuguccggaguaaugguuucuauggaggaacccggcugguacagcuucggguuugaaauaaaggauaaaaagugcgacgugccguguauuggaaucgagaugguccacgaugguggcaaaacaacuuggcauucagccgcaaccgccaucuauugcuugauggggaguggacagcuacugugggacacagugaccggcguggauauggcucucuga

SEQ ID NO: 157672 - RNA, 1401 nt, Artificial Sequence
  derived and/or modified CDS sequence (opt3) from neuraminidase__InfluenzaB__AGX21824
augcugcccagcaccauccagacacucacucuuuuccugacguccggcgggguguuguuaucucuguacgucucagccagucuaagcuaucuccuguacuccgacauucuucugaaguuuucucaaaccgagauaacagcuccuaucaugccauuggauugcgcaaacgccucgaauguucaggcggugaacagaucagcuacuaaaggaguaacccuccugcugccggaacccgaguggacauauccuaggcucagcuguccagguaguaccuuccagaaggccuuacugauuucuccccaccgguuuggcgaaacuaaaggaaauuccgcaccucuuaucauucgcgagccauucaucgccugcgggcccaaggaauguaaacauuuugcuuugacacacuacgcagcccagccuggcgguuauuacaacgggacccgagaggaccguaauaagcugagacaucuaauaagcgugaagcucggaaaaaucccaacggucgagaacuccauuuuccacauggcugccuggucaggcagugcgugccaugauggcagggaauggacuuauaucgggguggacggaccggauagcaaugcacugcuuaagauuaaauacggugaggccuacaccgacacauaucacucuuacgcuaagaacauccugcggacucaagaauccgccuguaauugcauaggcggggauuguuauuugaugauuaccgacggacccgcaucaggcaucagcgagugccgcuuucucaaaauuagagaggguaggaucaucaaggaaauuuucccuacagggcggguuaagaacaccgaggaauguacgugcggauuugcuaguaauaaaacuauagagugugccugccgcgauaacucuuacacagcgaagcgaccauucgugaaacugaaugucgaaaccgacacugccgagaucagauuaaugugcacagagaccuaucuggauacgcccaggccuaacgacggcuccauuaccggcccaugugaaagcaauggggauaagggaucggguggcaucaaagggggauuugugcaccagcggauggcaucuaagauaggccguugguacucccgcacaaugucaaaaacuaagagaauggguauggggcucuauguaaaguacgacggcgaccccuggaccgauagugaggcucuugcccugagcggaguuaugguguccauggaggaaccgggcugguacucuuucggguuugaaauuaaagacaagaaaugcgaugucccuuguaucggaaucgagauggugcaugacgguggcaagacaacuuggcacagcgcugccaccgcaauuuauugcuugauggggucaggacagcuacugugggauacagugaccggcgucgacauggcccucuga

SEQ ID NO: 157673 - RNA, 1401 nt, Artificial Sequence; identical to SEQ ID NO: 156791
  derived and/or modified CDS sequence (opt3) from neuraminidase__InfluenzaB__AGX21835

SEQ ID NO: 157674 - RNA, 1401 nt, Artificial Sequence; identical to SEQ ID NO: 157179
  derived and/or modified CDS sequence (opt3) from neuraminidase__InfluenzaB__AGX21846

SEQ ID NO: 157675 - RNA, 1401 nt, Artificial Sequence; identical to SEQ ID NO: 157179
  derived and/or modified CDS sequence (opt3) from neuraminidase__InfluenzaB__AGX21857

SEQ ID NO: 157676 - RNA, 1401 nt, Artificial Sequence; identical to SEQ ID NO: 156791
  derived and/or modified CDS sequence (opt3) from neuraminidase__InfluenzaB__AGX21868

SEQ ID NO: 157677 - RNA, 1401 nt, Artificial Sequence; identical to SEQ ID NO: 157177
  derived and/or modified CDS sequence (opt3) from neuraminidase__InfluenzaB__AGX21879

SEQ ID NO: 157678 - RNA, 1401 nt, Artificial Sequence
  derived and/or modified CDS sequence (opt3) from neuraminidase__InfluenzaB__AGX21890
augcugcccagcaccauccagacacucacucuuuuccugacguccggcgggguguuguuaucucuguacgucucagccagucuaagcuaucuccuguacuccgacauucuucugaaguuuucucaaaccgagauaaucgcuccuauuaugccauuggauugcgcaaacgccucgaauguucaggcggugaaccacucagcuacaaaaggaguaacucuccugcugccggaacccgaguggaccuauccuagacucagcuguccagguaguacauuccagaaggccuuacugaucucuccccauagguuuggcgaaaccaaaggaaauuccgcaccucuuauuauccgggagccauucauagccugcgggcccaaggaauguaaacacuuugcuuugacucauuacgcagcccagccuggcgguuauuacaacgggacacgcgaggaccgaaauaagcugcgucaccuaaucagcgugaagcucggaaaaauuccaaccgucgagaacuccaucuuccauauggcugccuggucaggcagugcgugccacgauggcagagaauggacguauauugggguggacggaccggauagcaaugcacugcuuaagaucaaauacggugaggccuacacugacaccuaucacucuuacgcuaagaacauacugaggacacaagaauccgccuguaauugcauuggcggggauuguuauuugaugaucacugacggacccgcaucaggcauuagcgagugccgguuucucaaaauccgcgaggguagaaucauuaaggaaauauucccuaccgggaggguuaagcauacagaggaauguaccugcggauuugcuaguaacaaaacgaucgagugugccugccgggauaauucuuacacugcgaagcgcccauucgugaaacugaacgucgaaacagacaccgccgagauucgauuaaugugcacugagacauaucuggauacccccagaccuaaugacggcuccaucacgggcccaugugaaagcaacggggauaagggaucggguggcauaaaagggggauuugugcaccagaggauggcaucuaagauuggccggugguacucccguaccaugucaaaaacaaagcgcauggguauggggcucuauguaaaguacgacggcgaccccuggacugauagugaggcucuugcccugagcggaguuaugguguccauggaggaaccgggcugguacucuuucggguuugaaaucaaagacaagaaaugcgaugucccuuguaucggaauugagauggugcaugacgguggcaagaccacauggcacagcgcugccacugcaaucuauugcuugauggggucaggacagcuacugugggauaccgugacaggcgucgacauggcccucuga

SEQ ID NO: 157679 - RNA, 1401 nt, Artificial Sequence; identical to SEQ ID NO: 156791
  derived and/or modified CDS sequence (opt3) from neuraminidase__InfluenzaB__AGX21901

SEQ ID NO: 157680 - RNA, 1401 nt, Artificial Sequence; identical to SEQ ID NO: 156791
  derived and/or modified CDS sequence (opt3) from neuraminidase__InfluenzaB__AGX21912

SEQ ID NO: 157681 - RNA, 1401 nt, Artificial Sequence
  derived and/or modified CDS sequence (opt3) from neuraminidase__InfluenzaB__AGX21923
augcugcccagcaccauccagacacucacucuuuuccugacguccggcgggguguuguuaucucuguacgucucagccagucuaagcuaucuccuguacuccgacauucuucugaaguuuucucaaaccgagauaacagcuccuaucaugccauuggauugcacuaacgcaucgaauguucaggccgugaacagaucagcgaccaaaggaguaacacuccugcugccggaacccgaguggaccuauccuaggcucagcuguccagguaguacuuuccagaaggcuuuacugauuucuccccaccgguuuggcgaaacaaaaggaaauuccgccccucuuaucauucgcgagccauucaucgcaugcgggcccaaggaauguaaacauuuugccuugacccacuacgcugcacagccuggcgguuauuacaacgggacgcgagaggaccguaauaagcugagacaucuaauaagcgugaagcucggaaaaaucccaacugucgagaacuccauuuuccacauggccgcuuggucaggcagugccugccaugauggcagggaauggaccuauaucgggguggacggaccggauagcaaugcgcugcuuaagauuaaauacggugaggcauacacagacacuuaucacucuuacgccaagaacauccugcggacccaagaauccgcuuguaauugcauaggcggggauuguuauuugaugauuacagacggacccgccucaggcaucagcgagugccgcuuucucaaaauuagagaggguaggaucaucaaggaaauuuucccuaccgggcggguuaagcacacggaggaauguacuugcggauuugcaaguaacaaaacaauagagugugcuugccgcgauaauucuuacaccgccaagcgaccauucgugaaacugaacgucgaaacugacacagcggagaucagauuaaugugcaccgagacguaucuggauacccccaggccuaaugacggcuccauuacaggcccaugugaaagcaacggggauaagggaucggguggcaucaaagggggauuugugcaucagcggauggccucuaagauaggccguugguacucccgcacuaugucaaaaaccaagagaauggguauggggcucuauguaaaguacgacggcgaccccuggacagauagugaggcacuugcucugagcggaguuaugguguccauggaggaaccgggcugguacucuuucggguuugaaauuaaagacaagaaaugcgaugucccuuguaucggaaucgagauggugcacgacgguggcaagacuaccuggcauagcgccgcuacagccauuuauugcuugauggggucaggacagcuacugugggauaccgugacuggcgucgacauggcacucuga

SEQ ID NO: 157682 - RNA, 1401 nt, Artificial Sequence; identical to SEQ ID NO: 157678
  derived and/or modified CDS sequence (opt3) from neuraminidase__InfluenzaB__AGX21934

SEQ ID NO: 157683 - RNA, 1401 nt, Artificial Sequence; identical to SEQ ID NO: 157179
  derived and/or modified CDS sequence (opt3) from neuraminidase__InfluenzaB__AGX21945

SEQ ID NO: 157684 - RNA, 1401 nt, Artificial Sequence
  derived and/or modified CDS sequence (opt3) from neuraminidase__InfluenzaB__AGX21956
augcugcccagcaccauccagacacucacucuuuuccugacguccggcgggguguuguuaucucuguacgucucagccagucuaagcuaucuccuguacuccgacauucuucugaaguuuucucaaaccgagauaacagcuccuaucaugccauuggauugcgcaaacacuucgaauauucaggccguuaacagaucagcgaccaaaggagugacacuccugcugccggaacccgaguggaccuauccuaggcucagcuguccagguaguacuuuccagaaggcuuuacugaucucuccccaccgguuuggcgaaacaaaaggaaauuccgccccucuuauuauccgcgagccauucauagcaugcgggcccaaggaauguaaacauuuugccuugacccacuacgcugcacagccuggcgguuauuacaacgggacgcgagaggaccguaauaagcugagacaucuaaucagcguaaagcucggaaaaauuccaacuguggagaacuccaucuuccacauggccgcuuggucaggcagugccugccaugauggcagggaauggaccuauauuggggucgacggaccggauagcaaugcgcugcuuaagaucaaauacggugaggcauacacagacacuuaucacucuuacgccaagaacauacugcggacccaagaauccgcuuguaauugcauuggcggggauuguuauuugaugaucacagacggacccgccucaggcauuagcgagugccgcuuucucaaaaucagagaggguaggaucauuaaggaaauauucccuaccgggcgggugaagcacacggaggaauguacuugcggauuugcaaguaacaaaacaaucgagugugcuugccgcgauaauucuuacaccgccaagcgaccauucguuaaacugaacguggaaacugacacagcggagauuagauuaaugugcaccgagacguaucuggauacccccaggccuaaugacggcuccaucacaggcccaugugaaagcaacggggauaagggaucggguggcauaaaagggggauuuguccaucagcggauggccucuaagauuggccguugguacucccgcacuaugucaaaaaccaagagaauggguauggggcucuaugugaaguacgacggcgaccccuggacagauagugaggcacuugcucugagcggaguaaugguuuccauggaggaaccgggcugguacucuuucggguuugaaaucaaagacaagaaaugcgaugugccuuguaucggaauugagaugguccacgacgguggcaagacuaccuggcauagcgccgcuacagccaucuauugcuugauggggucaggacagcuacugugggauaccgugacuggcguggacauggcacucuga

SEQ ID NO: 157685 - RNA, 1401 nt, Artificial Sequence; identical to SEQ ID NO: 157179
  derived and/or modified CDS sequence (opt3) from neuraminidase__InfluenzaB__AGX21967

SEQ ID NO: 157686 - RNA, 1401 nt, Artificial Sequence; identical to SEQ ID NO: 156791
  derived and/or modified CDS sequence (opt3) from neuraminidase__InfluenzaB__AGX21978

SEQ ID NO: 157687 - RNA, 1401 nt, Artificial Sequence; identical to SEQ ID NO: 157179
  derived and/or modified CDS sequence (opt3) from neuraminidase__InfluenzaB__AGX21989

SEQ ID NO: 157688 - RNA, 1401 nt, Artificial Sequence; identical to SEQ ID NO: 157177
  derived and/or modified CDS sequence (opt3) from neuraminidase__InfluenzaB__AGX22000

SEQ ID NO: 157689 - RNA, 1401 nt, Artificial Sequence
  derived and/or modified CDS sequence (opt3) from neuraminidase__InfluenzaB__AGX22011
augcugcccagcaccauccagacacucacucuuuuccugacguccggcgggguguuguuaucucuguacgucucagccagucuaagcuaucuccuguacuccgacauucuucugaaguuuucucaaaccgagauaacagcuccuaucaugccauuggauugcgcaaacgccucgaauguucaggcggugaacagaucagcuacuaaaggaguaacccuccugcugccggaacccgaguggacauauccuaggcucagcuguccagguaguaccuuccagaaggccuuacugauuucuccccaccgguuuggcgaaacuaaaggaaauuccgcaccucuuaucauucgcgagccauucaucgccugcgggcccaaggaauguaaacauuuugcuuugacacacuacgcagccaagccuggcgguuauuacaacgggacccgagaggaccguaauaagcugagacaucuaauaagcgugaaacucggaaagaucccaacggucgagaacuccauuuuccacauggcugccuggucaggcagugcgugccaugauggcagggaauggacuuauaucgggguggacggaccggauagcaaugcacugcuuaaaauuaaguacggugaggccuacaccgacacauaucacucuuacgcuaaaaacauccugcggacucaggaauccgccuguaauugcauaggcggggauuguuauuugaugauuaccgacggacccgcaucaggcaucagcgagugccgcuuucucaagauuagagaggguaggaucaucaaggaaauuuucccuacagggcggguuaaacacaccgaggaauguacgugcggauuugcuaguaacaagacuauagagugugccugccgcgauaauaacuacacagcgaaacgaccauucgugaagcugaaugucgaaaccgacacugccgagaucagauuaaugugcacagagaccuaucuggauacgcccaggccuaacgacggcucuauuaccggcccaugugaauccaauggggauaaaggaagcgguggcaucaaagggggauuugugcaucaacggauggcaucgaagauaggccguugguacucucgcacaauguccaagacuaagagaauggguauggggcucuauguaaaauacgacggcgaccccuggaccgauucagaggcucuugcccugaguggaguuauggugagcauggaggaaccgggcugguacuccuucggguuugaaauuaaggacaaaaagugcgaugucccuuguaucggaaucgagauggugcacgacgguggcaaaacaacuuggcauucugcugccaccgcaauuuauugcuugauggggagcggacagcuacugugggauacagugaccggcgucgacauggcccucuga

SEQ ID NO: 157690 - RNA, 1401 nt, Artificial Sequence; identical to SEQ ID NO: 156791
  derived and/or modified CDS sequence (opt3) from neuraminidase__InfluenzaB__AGX22033

SEQ ID NO: 157691 - RNA, 1401 nt, Artificial Sequence; identical to SEQ ID NO: 156791
  derived and/or modified CDS sequence (opt3) from neuraminidase__InfluenzaB__AGX22044

SEQ ID NO: 157692 - RNA, 1401 nt, Artificial Sequence; identical to SEQ ID NO: 157177
  derived and/or modified CDS sequence (opt3) from neuraminidase__InfluenzaB__AGX22055

SEQ ID NO: 157693 - RNA, 1401 nt, Artificial Sequence; identical to SEQ ID NO: 156791
  derived and/or modified CDS sequence (opt3) from neuraminidase__InfluenzaB__AGX22066

SEQ ID NO: 157694 - RNA, 1401 nt, Artificial Sequence; identical to SEQ ID NO: 157678
  derived and/or modified CDS sequence (opt3) from neuraminidase__InfluenzaB__AGX22077

SEQ ID NO: 157695 - RNA, 1401 nt, Artificial Sequence; identical to SEQ ID NO: 156793
  derived and/or modified CDS sequence (opt3) from neuraminidase__InfluenzaB__AGX22088

SEQ ID NO: 157696 - RNA, 1401 nt, Artificial Sequence; identical to SEQ ID NO: 157179
  derived and/or modified CDS sequence (opt3) from neuraminidase__InfluenzaB__AGX22099

SEQ ID NO: 157697 - RNA, 1401 nt, Artificial Sequence; identical to SEQ ID NO: 157177
  derived and/or modified CDS sequence (opt3) from neuraminidase__InfluenzaB__AGX22110

SEQ ID NO: 157698 - RNA, 1401 nt, Artificial Sequence; identical to SEQ ID NO: 157179
  derived and/or modified CDS sequence (opt3) from neuraminidase__InfluenzaB__AGX22132

SEQ ID NO: 157699 - RNA, 1401 nt, Artificial Sequence
  derived and/or modified CDS sequence (opt3) from neuraminidase__InfluenzaB__AGX22143
augcugcccagcaccauccagacacucacucuuuuccugacguccggcgggguguuguuaucucuguacgucucagccagucuaagcuaucuccuguacuccgacauucuucugaaguuuucucaaaccgagauaacagcuccuaucaugccauuggauugcgcaaacgccucgaauguucaggcggugaacagaucagcuacuaaaggaguaacccuccugcugccggaacccgaguggacauauccuaggcucagcuguccagguaguaccuuccagaaggccuuacugauuucuccccaccgguuuggcgaaacuaaaggaaauuccgcaccucuuaucauucgcgagccauucaucgccugcgggcccaaggaauguaaacauuuugcuuugacacacuacgcagcccagccuggcgguuauuacaacgggacccgagaggaccguaauaagcugagacaucuaauaagcgugaagcucggaaaaaucccaacggucgagaacuccauuuuccacauggcugccuggucaggcagugcgugccaugauggcagggaauggacuuauaucgggguggacggaccggauagcaaugcacugcuuaagauuaaauacggugaggccuacaccgacacauaucacucuuacgcuaagaacauccugcggacucaagaauccgccuguaauugcauaggcggggauuguuauuugaugauuaccgacggacccgcaucaggcaucagcgagugccgcuuucucaaaauuagagaggguaggaucaucaaggaaauuuucccuacagggcggguuaagcacaccgaggaauguacgugcggauuugcuaguaacaaaacuauagagugugccugccgcgauaauucuuacacagcgaagcgaccauucgugaaacugaacgucgaaaccgacacugccgagaucagauuaaugugcacagagaccuaucuggauacgcccaggccuaaugacggcuccauuaccggcccaugugaaagcaacggggauaagggaucggguggcaucaaagggggauuugugcaucagcggauggcaucuaagauaggccguugguacucccgcacaauuucaaaaacuaagagaauggguauggggcucuauguaaaguacgacggcgaccccuggaccgauagugaggcucuugcccugagcggaguuaugguguccauggaggaaccgggcugguacucuuucggguuugaaaucaaagacaagaaaugcgaugucccuuguaucggaauugagauggugcacgacgguggcaagacaacuuggcauagcgcugccaccgcaaucuauugcuugauggggucaggacagcuacugugggauacagugaccggcgucgacauggcccucuga

SEQ ID NO: 157700 - RNA, 1401 nt, Artificial Sequence; identical to SEQ ID NO: 157699
  derived and/or modified CDS sequence (opt3) from neuraminidase__InfluenzaB__AGX22154

SEQ ID NO: 157701 - RNA, 1401 nt, Artificial Sequence; identical to SEQ ID NO: 157699
  derived and/or modified CDS sequence (opt3) from neuraminidase__InfluenzaB__AGX22165

SEQ ID NO: 157702 - RNA, 1401 nt, Artificial Sequence; identical to SEQ ID NO: 157678
  derived and/or modified CDS sequence (opt3) from neuraminidase__InfluenzaB__AGX22176

SEQ ID NO: 157703 - RNA, 1401 nt, Artificial Sequence; identical to SEQ ID NO: 157699
  derived and/or modified CDS sequence (opt3) from neuraminidase__InfluenzaB__AGX22187

SEQ ID NO: 157704 - RNA, 1401 nt, Artificial Sequence; identical to SEQ ID NO: 157699
  derived and/or modified CDS sequence (opt3) from neuraminidase__InfluenzaB__AGX22198

SEQ ID NO: 157705 - RNA, 1401 nt, Artificial Sequence; identical to SEQ ID NO: 157699
  derived and/or modified CDS sequence (opt3) from neuraminidase__InfluenzaB__AGX22209

SEQ ID NO: 157706 - RNA, 1401 nt, Artificial Sequence; identical to SEQ ID NO: 157177
  derived and/or modified CDS sequence (opt3) from neuraminidase__InfluenzaB__AGX22220

SEQ ID NO: 157707 - RNA, 1401 nt, Artificial Sequence; identical to SEQ ID NO: 157179
  derived and/or modified CDS sequence (opt3) from neuraminidase__InfluenzaB__AGX22231

SEQ ID NO: 157708 - RNA, 1401 nt, Artificial Sequence; identical to SEQ ID NO: 157678
  derived and/or modified CDS sequence (opt3) from neuraminidase__InfluenzaB__AGX22242

SEQ ID NO: 157709 - RNA, 1401 nt, Artificial Sequence; identical to SEQ ID NO: 157177
  derived and/or modified CDS sequence (opt3) from neuraminidase__InfluenzaB__AGX22253

SEQ ID NO: 157710 - RNA, 1401 nt, Artificial Sequence; identical to SEQ ID NO: 156791
  derived and/or modified CDS sequence (opt3) from neuraminidase__InfluenzaB__AGX22264

SEQ ID NO: 157711 - RNA, 1401 nt, Artificial Sequence; identical to SEQ ID NO: 157177
  derived and/or modified CDS sequence (opt3) from neuraminidase__InfluenzaB__AGX22275

SEQ ID NO: 157712 - RNA, 1401 nt, Artificial Sequence; identical to SEQ ID NO: 156791
  derived and/or modified CDS sequence (opt3) from neuraminidase__InfluenzaB__AGX22286

SEQ ID NO: 157713 - RNA, 1401 nt, Artificial Sequence
  derived and/or modified CDS sequence (opt3) from neuraminidase__InfluenzaB__AGX22297
augcugcccagcaccauccagacacucacucuuuuccugacguugggcgggguguuacugucccuauacgucucugccucacucaguuaucugcuuuacagcgacauucuguugaaguuuucccaaaccgagauaacagcuccuaucaugccacucgauugcgcaaacgccucuaauguucaggcggugaacagaucggcuacuaaaggaguaacccugcugcucccggaacccgaguggacauauccuagguuaucauguccagguagcaccuuccagaaggcccugcuuauuaguccccaccgguuuggcgaaacuaaaggaaauuccgcaccuuugaucauucgcgagccauucaucgccugcgggcccaaggaauguaaacauuuugcucugacacacuacgcagcccagccuggcgguuauuacaacgggacccgagaggaccguaauaagcuaagacaucucauaucugugaagcugggaaaaaucccaacggucgagaacagcauuuuccacauggcugccugguccggcucagcgugccaugauggcagggaauggacuuauaucgggguggacggaccggauaguaaugcacuucugaagauuaaauacggugaggccuacaccgacacauaucacagcuacgcuaagaacaucuugcggacucaagaaucugccuguaauugcauaggcggggauuguuaucucaugauuaccgacggacccgcauccggcaucucagagugccgcuuucugaaaauuagagaggguaggaucaucaaggaaauuuucccuacagggcggguuaagcacaccgaggaauguacgugcggauuugcuagcaacaaaacuauagagugugccugccgcgauaauaguuacacagcgaagcgaccauucgugaaauuaaacgucgaaaccgacacugccgagaucagacugaugugcacagagaccuaucucgauacgcccaggccuaaugacggcucuauuaccggcccaugugaauccaacggggauaagggaagcgguggcaucaaagggggauuugugcaucagcggauggcaucgaagauaggccguugguacucucgcacaauguccaaaacuaagagaauggguauggggcuuuauguaaaguacgacggcgaccccuggaccgauucagaggcucuggccuugaguggaguuauggugagcauggaggaaccgggcugguacuccuucggguuugaaauuaaagacaagaaaugcgaugucccuuguaucggaaucgagauggugcacgacgguggcaagacaacuuggcauucugcugccaccgcaauuuauugccuaauggggagcggacagcugcucugggauacagugaccggcgucgacauggcccuguga

SEQ ID NO: 157714 - RNA, 1401 nt, Artificial Sequence; identical to SEQ ID NO: 156791
  derived and/or modified CDS sequence (opt3) from neuraminidase__InfluenzaB__AGX22308

SEQ ID NO: 157715 - RNA, 1401 nt, Artificial Sequence
  derived and/or modified CDS sequence (opt3) from neuraminidase__InfluenzaB__AGX22330
augcugcccagcaccauccagacacucacucuuuuccugacguccggcgggguguuguuaucucuguacgucucagccagucuaagcuaucuccuguacuccgacauucuucugaaguuuucucaaaccgagauaacagcuccuaucaugccauuggauugcgcaaacgccucgaauguucaggcggugaacagaucagcuacuaaaggaguaacccuccugcugccggaacccgaguggacauauccuaggcucagcuguccagguaguaccuuccagaaggccuuacugauuucuccccaccgguuuggcgaaacuaaaggaaauuccgcaccucuuaucauucgcgagccauucaucgccugcgggcccaaggaauguaaacauuuugcuuugacacacuacgcagcccagccuggcgguuauuacaacgggacccgagaggaccguaauaagcugagacaucuaauaagcgugaagcucggaaaaaucccaacggucgagaacuccauuuuccacaugacugcuuggucaggcagugccugccaugauggcaaggaauggaccuauaucgggguggacggaccggauagcaaugcgcugcuuaaaauuaaguacggugaggcauacacagacacuuaucacucuuacgccaaaaacauccugaggacccaagaauccgcuuguaauugcauaggcggggauuguuauuugaugauuacagacggacccgccucaggcaucagcgagugccgguuucucaagauucgcgaggguagaaucaucaaggaaauuuucccuaccgggaggguuaaacacacggaggaauguacuugcggauuugcaaguaacaagacaauagagugugcuugccgggauaauucuuacaccgccaaacgcccauucgugaagcugaacgucgaaacugacacagcggagauccgauuaaugugcaccgagacguaucuggauacccccagaccuaaugacggcuccauuacaggcccaugugaaagcgauggggacaaaggaucggguggcaucaaagggggauuugugcaucagaggauggccacuaagauaggccggugguacucucguaccauguccaagacaaagcgcauggguauggggcucuauguaaaauacgacggcgaucccuggacugacucagaggcacuugcucugaguggaguuauggugagcauggaggaaccgggcugguacuccuucggguuugaaauuaaggauaaaaagugcgacgucccuuguaucggaaucgagauggugcacgaugguggcaaaaccacauggcauucugccgcuaccgccauuuauugcuugauggggagcggacagcuacugugggacacugugacgggcgucgauauggcacucuga

SEQ ID NO: 157716 - RNA, 1401 nt, Artificial Sequence; identical to SEQ ID NO: 157179
  derived and/or modified CDS sequence (opt3) from neuraminidase__InfluenzaB__AGX22341

SEQ ID NO: 157717 - RNA, 1401 nt, Artificial Sequence; identical to SEQ ID NO: 157179
  derived and/or modified CDS sequence (opt3) from neuraminidase__InfluenzaB__AGX22352

SEQ ID NO: 157718 - RNA, 1401 nt, Artificial Sequence; identical to SEQ ID NO: 157179
  derived and/or modified CDS sequence (opt3) from neuraminidase__InfluenzaB__AGX22363

SEQ ID NO: 157719 - RNA, 1401 nt, Artificial Sequence; identical to SEQ ID NO: 157177
  derived and/or modified CDS sequence (opt3) from neuraminidase__InfluenzaB__AGX22374

SEQ ID NO: 157720 - RNA, 1401 nt, Artificial Sequence; identical to SEQ ID NO: 156791
  derived and/or modified CDS sequence (opt3) from neuraminidase__InfluenzaB__AGX22385

SEQ ID NO: 157721 - RNA, 1401 nt, Artificial Sequence; identical to SEQ ID NO: 156791
  derived and/or modified CDS sequence (opt3) from neuraminidase__InfluenzaB__AGX22396

SEQ ID NO: 157722 - RNA, 1401 nt, Artificial Sequence; identical to SEQ ID NO: 157678
  derived and/or modified CDS sequence (opt3) from neuraminidase__InfluenzaB__AGX22407

SEQ ID NO: 157723 - RNA, 1401 nt, Artificial Sequence
  derived and/or modified CDS sequence (opt3) from neuraminidase__InfluenzaB__AGX22418
augcugcccagcaccauccagacacucacucuuuuccugacguccggcgggguguuguuaucucuguacgucucagccagucuaagcuaucuccuguacuccgacauucuucugaaguuuucucaaaccgagauaaucgcuccuauuaugccauuggauugcgcaaacgccucgaauguucaggcggugaaccacucagcuacaaaaggaguaacucuccugcugccggaacccgaguggaccuauccuagacucagcuguccagguaguacauuccagaaggccuuacugaucucuccccauagguuuggcgaaaccaaaggaaauuccgcaccucuuauuauccgggagccauucauagccugcgggcccaaggaauguaaacacuuugcuuugacucauuacgcagcccagccuggccgcuauuacaacgguacacgagaggaccguaauaagcugagacaccuaaucagcgugaagcucgggaaaauuccaaccgucgagaacuccaucuuccauauggcugccuggucaggaagugcgugccacgauggcagggaauggacguauauuggcguggacgggccggauagcaaugcacugcuuaagaucaaauacggagaggccuacacugacaccuaucacucuuacgcuaagaacauacugcggacacaagaauccgccuguaauugcauugguggcgauuguuauuugaugaucacugacgggcccgcaucaggaauuagcgagugccgcuuucucaaaaucagagagggcaggaucauuaaggaaauauucccuaccggucggguuaagcauacagaggaauguaccugcggguuugcuaguaacaaaacgaucgagugugccugccgcgauaauucuuacacugcgaagcgaccauucgugaaacugaacgucgaaacagacaccgccgagauuagauuaaugugcacugagacauaucuggauacccccaggccuaaugacggauccaucacgggcccaugugaaagcaacggcgauaaggggucgggagguauaaaaggcggguuugugcaccagcggauggcaucuaagauuggacguugguacucccgcaccaugucaaaaacaaagagaaugggcaugggucucuauguaaaguacgacggggaccccuggacugauagugaggcucuugcccugagcggcguuaugguguccauggaggaaccgggaugguacucuuucggcuuugaaaucaaagacaagaaaugcgaugucccuuguaucgggauugagauggugcaugacggagguaagaccacauggcacagcgcugccacugcaaucuauugcuugaugggcucagggcagcuacugugggauaccgugacaggagucgacauggcccucuga

SEQ ID NO: 157724 - RNA, 1401 nt, Artificial Sequence; identical to SEQ ID NO: 157177
  derived and/or modified CDS sequence (opt3) from neuraminidase__InfluenzaB__AGX22429

SEQ ID NO: 157725 - RNA, 1401 nt, Artificial Sequence; identical to SEQ ID NO: 157177
  derived and/or modified CDS sequence (opt3) from neuraminidase__InfluenzaB__AGX22440

SEQ ID NO: 157726 - RNA, 1401 nt, Artificial Sequence; identical to SEQ ID NO: 157177
  derived and/or modified CDS sequence (opt3) from neuraminidase__InfluenzaB__AGX22449

SEQ ID NO: 157727 - RNA, 1401 nt, Artificial Sequence
  derived and/or modified CDS sequence (opt3) from neuraminidase__InfluenzaB__AGX22460
augcugcccagcaccauccagacacucacucuuuuccugacguccggcgggguguuguuaucucuguacgucucagccagucuaagcuaucuccuguacuccgacauucuucugaaguuuucucaaaccgagauaacagcuccuacuaugccauuggauugcgcaaacgccucgaauguucaggcggugaacagaucagcuaccaaaggaguaacacuccugcugccggaacucgaguggaccuaucccagguuaagcuguccugguaguacuuuccagaaggcccugcuuaucuccccacaccgguuuggcgaaacaaaaggaaauucugcacccuugauuauccgcgagccuuucauugccugcgggccaaaggaauguaaacauuuugcucugacccacuacgcagcccagcccggcgguuauuacaacgggacgcgagaggaccguaauaagcuaagacaucucaucagcgugaagcugggaaaaauaccuacugucgagaacuccaucuuccacauggcugccuggucaggcagugcgugccaugauggcagggaauggaccuauguggggguugacggaccagauagcaaugcacuucugaagauuaaauacggugaggccuacacagacacuuaucacucuuacgcuaagaacaucuugcggacccaagaauccgccuguaauugcauuggcggggauuguuaucucaugaucacagacggaccggcaucaggcauaagcgagugccgcuuucugaaaauuagagaggguaggaucauuaaggaaaucuuccccaccgggcgggugaagcacacggaggaauguacuugcggauuugcuaguaacaaaacaaucgagugugccugccgcgauaauucuuacaccgcgaagcgaccuuucgucaaauuagacguggaaacugauacagccgagauuagacugaugugcaccgagacguaucucgacaccccaaggcccaacgauggcuccauaacaggcccuugugaagcaaauggggacaagggaagcgguggcaucaaagggggauuuguacaucagcggauggcuucgaagauuggccguugguacucucgcacuauguccaaaaccaagagaauggguauggggcuuuauguuaaguacgacggcgauccauggacagacucagaggcccuggcuuugaguggagugauggucagcauggaggaacccggcugguacuccuucggguuugaaaucaaagauaagaaaugcgacgugccguguauaggaauugagauggugcacgaugguggcaagacuaccuggcauucugccgcaacagccaucuauugccuaauggggagcggacagcugcucugggacaccgucacuggcguugauauggcucuguga

SEQ ID NO: 157728 - RNA, 1401 nt, Artificial Sequence; identical to SEQ ID NO: 156791
  derived and/or modified CDS sequence (opt3) from neuraminidase__InfluenzaB__AGX22471

SEQ ID NO: 157729 - RNA, 1401 nt, Artificial Sequence; identical to SEQ ID NO: 156791
  derived and/or modified CDS sequence (opt3) from neuraminidase__InfluenzaB__AGX22482

SEQ ID NO: 157730 - RNA, 1401 nt, Artificial Sequence; identical to SEQ ID NO: 156791
  derived and/or modified CDS sequence (opt3) from neuraminidase__InfluenzaB__AGX22493

SEQ ID NO: 157731 - RNA, 1401 nt, Artificial Sequence
  derived and/or modified CDS sequence (opt3) from neuraminidase__InfluenzaB__AGX22504
augcugcccagcaccauccagacacucacucuuuuccugacguccggcgggguguuguuaucucuguacgucucagccagucuaagcuaucuccuguacuccgacauucuucugaaguuuucuaccacagagauaacugcuccuaccaucccauuggauugcgcaaacgccucgaauguucaagcggugaacagaucagcuacaaaaggaguaacccuccugcugccggaacccgaguggacuuauccuaggcucagcuguccagguaguacauuccagaaggccuuacugauuucuccccaccgguuuggcgaaaccaaaggaaauuccgcaccucuuaucauucgcgagccauucaucgccugcgggcccaaggaauguaaacauuuugcuuugacgcacuacgcagcccagccuggcgguuauuacaacgggacucgagaggaccguaauaagcugagacaucuaauaagcgugaagcucggaaaaaucccaaccgucgagaacuccauuuuccacauggcugccuggucaggcagugcgugccaugauggcaaggaauggacauauaucgggguggacggaccggauagcaaugcacugcuuaaaauuaaguacggugaggccuacacugacaccuaucacucuuacgcuaacaauauccugaggacacaggaauccgccuguaacugcauaggcgggaauuguuauuugaugauuaccgauggaucagcaagcggcaucagugagugccgguuucucaaaauucgcgaggguagaaucaucaaggaaauuuuccccacggggaggguuaagcacacugaggaauguacaugcggauuugcuucuaacaaaaccauagagugugccugccgggacaauuccuacacugcgaagcgcccuuucgugaaacugaacgucgaaacagauaccgccgagauccgauuaaugugcacggagaccuaucuggacacaccaagacccgaugacggcagcauuacuggcccuugugaaucgaaugggaacaagggaucugguggcaucaaagggggauuugugcaucaaaggauggcauccaagauaggccggugguacucacguaccaugaguaaaacaaagcgcauggguauggggcucuauguaaaguacgauggcgacccauggacugacagcgaugcucuugcccuguccggaguuauggugucuauggaggaacccggcugguacagcuucggguuugagauuaaagacaagaaaugcgaugucccguguaucggaaucgaaauggugcacgacgguggcaaggagaccuggcauucagcugccacagcaauuuauugcuugauggggaguggacagcuacugugggauaccgugacuggcgucgacauggcccucuga

SEQ ID NO: 157732 - RNA, 1401 nt, Artificial Sequence; identical to SEQ ID NO: 157177
  derived and/or modified CDS sequence (opt3) from neuraminidase__InfluenzaB__AGX22515

SEQ ID NO: 157733 - RNA, 1401 nt, Artificial Sequence
  derived and/or modified CDS sequence (opt3) from neuraminidase__InfluenzaB__AGX22526
augcugcccagcaccauccagacacucacucuuuuccugacguccggcgggguguuguuaucucuguacgucucagccagucuaagcuaucuccuguacuccgacauucuucaaaaguuuucucagaccgagauaacagcuccuaucaugccacuggauugcgcaaacgccucgaauguucaggcggugaacagaucagcuacuaaaggaguaaccuugcuccugccggaacccgaguggacauauccuaggcugagcuguccagguaguaccuuccagaaggcccucuuaauuucuccccaccgguuuggcgaaacuaaaggaaauuccgcaccucugaucauucgcgagccauucaucgccugcgggcccacagaauguaagcauuuugcucuuacccacuacgcagcccaaccuggcgguuauuacaacgggacgcgagaggaccguaauaaauugagacaucugauaagcgugaagcuaggaaagaucccaacugucgagaacuccauuuuccacauggcugccuggucaggcagugcgugccaugauggcaaagaauggaccuauaucgggguggacggaccggauagcaaugcacuccugaagauuaaauacggugaggccuacacagacacuuaucacucuuacgcuaagaacauccuuaggacccaggaauccgccuguaauugcauaggcggggauuguuaucugaugauuacagacggacccgcaucaggcaucagcgagugccgguuuuugaaaauucgcgaggguagaaucaucaaggaaauuuucccuaccgggaggguuaagcacacggaggaauguacuugcggauuugcuaguaacaaaacaauagagugugccugccgggauaauucuuacaccgcgaagcgcccauucgugaaacucaacgucgaaacugacacagccgagauccgacugaugugcaccgagacguauuuagauacccccagaccuaaugacggcuccauuacaggcccaugugaaagcgauggggacaagggaucggguggcaucaaagggggauuugugcaucagaggauggcaucuaagauaggccggugguacucccguacuaugucaaaaaccaagcgcauggguauggggcuguauguaaaguacgacggcgaucccuggacagacagugaggcucucgcccuuagcggaguuaugguguccauggaggaaccgggcugguacucuuucggguuugaaauuaaagauaagaaaugcgacgucccuuguaucggaaucgagauggugcacgaugguggcaagacuaccuggcauagcgcugccacagcaauuuauugccugauggggucaggacaguugcuaugggacaccgugacuggcgucgauauggcccuguga

SEQ ID NO: 157734 - RNA, 1401 nt, Artificial Sequence; identical to SEQ ID NO: 156836
  derived and/or modified CDS sequence (opt3) from neuraminidase__InfluenzaB__AGX22548

SEQ ID NO: 157735 - RNA, 1401 nt, Artificial Sequence; identical to SEQ ID NO: 156675
  derived and/or modified CDS sequence (opt3) from neuraminidase__InfluenzaB__AGX22559

SEQ ID NO: 157736 - RNA, 1401 nt, Artificial Sequence; identical to SEQ ID NO: 156836
  derived and/or modified CDS sequence (opt3) from neuraminidase__InfluenzaB__AGX22570

SEQ ID NO: 157737 - RNA, 1401 nt, Artificial Sequence
  derived and/or modified CDS sequence (opt3) from neuraminidase__InfluenzaB__AGX22581
augcugcccagcaccauccagacacucacucuuuuccugacguccggcgggguguuguuaucucuguacgucucagccagucuaagcuaucuccuguacuccgacauucuucugaaguuuucucaaaccgagauaacagcuccuaucaugccauuggauugcgcaaacgccucgaauguucaggcggugaacagaucagcuacuaaaggaguaacccuccugcugccggaacccgaguggacauauccuaggcucagcuguccagguaguaccuuccagaaggccuuacugauuucuccccaccgguuuggcgaaacuaaaggaaauuccgcaccucuuaucauucgcgagccauucaucgccugcgggcccaaggaauguaaacauuuugcuuugacacacuacgcagcccagccuggcgguuauuacaacgggacccgagaggaccguaauaagcugagacaucuaauaagcgugaagcucggaaaaaucccaacggucgagaacuccauuuuccacauggcugccuggucaggcagugcgugccaugauggcagggaauggacuuauaucgggguggacggaccggauaauaacgcacugcuuaagauuaaauacggugaggccuacaccgacacauaucacagcuacgcuaagaauauccugcggacucaagaaucugccuguaacugcauaggcggggauuguuauuugaugauuaccgacggacccgcauccggcaucucagagugccgcuuucucaaaauuagagaggguaggaucaucaaggaaauuuucccuacagggcggguuaagcacaccgaggaauguacgugcggauuugcuagcaauaaaacuauagagugugccugccgcgauaacaauuacacagcgaagcgaccauucgugaaacugaacgucgaaaccgacacugccgagaucagauuaaugugcacagagaccuaucuggauacgcccaggccuaaugacggcaguauuaccggcccaugugaaucuaacggggauaagggauccgguggcaucaaagggggauuugugcaucagcggauggcaagcaagauaggccguugguacucgcgcacaaugucuaaaacuaagagaauggguauggggcucuauguaaaguacgacggcgaccccuggaccgauuccgaggcucuugcccugucaggaguuauggugaguauggaggaaccgggcugguacagcuucggguuugaaauuaaagacaagaaaugcgaugucccuuguaucggaaucgagauggugcacgacgguggcaagacaacuuggcauuccgcugccaccgcaauuuauugcuugauggggucuggacagcuacugugggauacagugaccggcgucgacauggcccucuga

SEQ ID NO: 157738 - RNA, 1401 nt, Artificial Sequence; identical to SEQ ID NO: 156836
  derived and/or modified CDS sequence (opt3) from neuraminidase__InfluenzaB__AGX22592

SEQ ID NO: 157739 - RNA, 1401 nt, Artificial Sequence; identical to SEQ ID NO: 156836
  derived and/or modified CDS sequence (opt3) from neuraminidase__InfluenzaB__AGX22603

SEQ ID NO: 157740 - RNA, 1401 nt, Artificial Sequence; identical to SEQ ID NO: 157076
  derived and/or modified CDS sequence (opt3) from neuraminidase__InfluenzaB__AGX22614

SEQ ID NO: 157741 - RNA, 1401 nt, Artificial Sequence; identical to SEQ ID NO: 156836
  derived and/or modified CDS sequence (opt3) from neuraminidase__InfluenzaB__AGX22625

SEQ ID NO: 157742 - RNA, 1401 nt, Artificial Sequence
  derived and/or modified CDS sequence (opt3) from neuraminidase__InfluenzaB__AGX22636
augcugcccagcaccauccagacacucacucuuuuccugacguccggcgggguguuguuaucucuguacgucucagccagucuaagcuaucuccuguacuccgacauucuucugaaguuuucucaaaccgagauaacagcuccuaucaugccauuggauugcgcaaacgccucgaauguucaggcggugaacagaucagcugccaaaggaguagcacuccugcugccggaacccgaguggacuuauccuaggcucagcuguccagguaguaccuuccagaaggccuuacugauuucuccccaccgguuuggcgaaacaaaaggaaauuccgcuccucuuaucauucgcgagccauucaucgcaugcgggcccaccgaauguaagcauuuugccuugacucacuacgcugcccagccuggcgguuauuacaacgggacacgagaggaccguaauaaacugagacaucuaauaagcgugaagcucggaaagaucccaaccgucgagaacuccauuuuccacauggcggcauggucaggcagugccugccaugauggcaaagaauggacguauaucgggguggacggaccggauagcaaugcucugcuuaagauuaaauacggugaggccuacacugacaccuaucacucuuacgcaaagaacauccugaggacacaagaauccgcuuguaauugcauaggcggggauuguuauuugaugauuacugacggacccgccucaggcaucagcgagugccgguuucucaaaauucgcgaggguagaaucaucaaggaaauuuucccuaccgggaggguuaagcacacagaggaauguaccugcggauuugcgaguaacaaaacgauagagugugccugccgggauaauucuuacacugcaaagcgcccauucgugaaacugaacgucgaaacagacaccgcugagauccgauuaaugugcacugagacauaucuggauacccccagaccuaaugacggcuccauuacgggcccaugugaaagcgauggggacaagggaucggguggcaucaaagggggauuugugcaucagaggauggccucuaagauaggccggugguacucccguaccaugucaaaaacaaagcgcauggguauggggcucuauguaaaguacgacggcgaucccuggacugacagugaggcucuugcccugagcggaguuaugguguccauggaggaaccgggcugguacucuuucggguuugaaauuaaagauaagaaaugcgacgucccuuguaucggaaucgagauggugcacgaugguggcaagaccacauggcauagcgcagccacugcuauuuauugcuugauggggucaggacagcuacugugggacaccgugacaggcgucgauauggcgcucuga

SEQ ID NO: 157743 - RNA, 1401 nt, Artificial Sequence; identical to SEQ ID NO: 156836
  derived and/or modified CDS sequence (opt3) from neuraminidase__InfluenzaB__AGX22647

SEQ ID NO: 157744 - RNA, 1401 nt, Artificial Sequence; identical to SEQ ID NO: 156675
  derived and/or modified CDS sequence (opt3) from neuraminidase__InfluenzaB__AGX22658

SEQ ID NO: 157745 - RNA, 1401 nt, Artificial Sequence; identical to SEQ ID NO: 156836
  derived and/or modified CDS sequence (opt3) from neuraminidase__InfluenzaB__AGX22669

SEQ ID NO: 157746 - RNA, 1401 nt, Artificial Sequence; identical to SEQ ID NO: 156836
  derived and/or modified CDS sequence (opt3) from neuraminidase__InfluenzaB__AGX22680

SEQ ID NO: 157747 - RNA, 1401 nt, Artificial Sequence; identical to SEQ ID NO: 156836
  derived and/or modified CDS sequence (opt3) from neuraminidase__InfluenzaB__AGX22691

SEQ ID NO: 157748 - RNA, 1401 nt, Artificial Sequence; identical to SEQ ID NO: 156836
  derived and/or modified CDS sequence (opt3) from neuraminidase__InfluenzaB__AGX22702

SEQ ID NO: 157749 - RNA, 1401 nt, Artificial Sequence; identical to SEQ ID NO: 156836
  derived and/or modified CDS sequence (opt3) from neuraminidase__InfluenzaB__AGX22713

SEQ ID NO: 157750 - RNA, 1401 nt, Artificial Sequence
  derived and/or modified CDS sequence (opt3) from neuraminidase__InfluenzaB__AGX22724
augcugcccagcaccauccagacacucacucuuuuccugacguccggcgggguguuguuaucucuguacgucucagcccuacucaguuaucugcuuuacagcgacauucuguugaaguuuucccaaaccgagauaacagcuccuaucaugccacucgauugcgcaaacgccucuaauguucaggcggugaacagaucggcuacuaaaggaguaacccugcugcucccggaacccgaguggacauauccuagguuaucauguccagguagcaccuuccagaaggcccugcuuauuaguccccaccgguuuggcgaaacuaaaggaaauuccgcaccuuugaucauucgcgagccauucaucgccugcgggcccaaggaauguaaacauuuugcucugacacacuacgcagcccagccuggcgguuauuacaacgggacccgagaggaccguaauaagcuaagacaucucauaucugugaagcugggaaaaaucccaacggucgagaacagcauuuuccacauggcugccugguccggcucagcgugccaugauggcagggaauggacuuauaucgggguggacggaccggauaguaaugcacuucugaagauuaaauacggugaggccuacaccgacacauaucacagcuacgcuaagaacaucuugcggacucaagaaucugccuguaauugcauaggcggggauuguuaucucaugauuaccgacggacccgcauccggcaucucagagugccgcuuucugaaaauuagagaggguaggaucaucaaggaaauuuucccuacagggcggguuaagcacaccgaggaauguacgugcggauuugcuagcaacaaaacuauagagugugccugccgcgauaauaguuacacagcgaagcgaccauucgugaaauuaaacgucgaaaccgacacugccgagaucagacugaugugcacagagaccuaucucgauacgcccaggccuaaugacggcucuauuaccggcccaugugaauccaacggggauaagggaagcgguggcaucaaagggggauuugugcaucagcggauggcaucgaagauaggccguugguacucucgcacaauguccaaaacuaagagaauggguauggggcuuuauguaaaguacgacggcgaccccuggaccgauucagaggcucuggccuugaguggaguuauggugagcauggaggaaccgggcugguacuccuucggguuugaaauuaaagacaagaaaugcgaugucccuuguaucggaaucgagauggugcacgacgguggcaagacaacuuggcauucugcugccaccgcaauuuauugccuaauggggagcggacagcugcucugggauacagugaccggcgucgacauggcccuguga

SEQ ID NO: 157751 - RNA, 1401 nt, Artificial Sequence; identical to SEQ ID NO: 156836
  derived and/or modified CDS sequence (opt3) from neuraminidase__InfluenzaB__AGX22735

SEQ ID NO: 157752 - RNA, 1401 nt, Artificial Sequence
  derived and/or modified CDS sequence (opt3) from neuraminidase__InfluenzaB__AGX22746
augcugcccagcaccauccagacacucacucuuuuccugacguccggcgggguguuguuaucucuguacgucucagccagucuaagcuaucuccuguacuccgacauucuucugaaguuuucucaaaccgagauaacagcuccuaucaugccauuggauugcgcaaacgccucgaauguucaggcggugaacagaucagcuacuaaaggaguaacccuccugcugccggaacccgaguggacauauccuaggcucagcuguccagguaguaccuuccagaaggccuuacugauuucuccccaccgguuuggcgaaacuaaaggaaauuccgcaccucuuaucauucgcgagccauucaucgccugcgggcccacagaauguaagcauuuugcuuugacccacuacgcagcccagccuggcgguuauuacaaccgaacgcgugaggacagaaauaaacugaggcaucuaauaagcgugaagcucgggaagaucccaacugucgagaacuccauuuuccacauggcugccuggucaggaagugcgugccaugauggcaaagaauggaccuauaucggcguggacgggccggauagcaaugcacugcuuaagauuaaauacggagaggccuacacagacacuuaucacucuuacgcuaagaacauccugcggacccaagaauccgccuguaauugcauagguggcgauuguuauuugaugauuacagacgggcccgcaucaggaaucagcgagugccgcuuucucaaaauuagagagggcaggaucaucaaggaaauuuucccuaccggucggguuaagcacacggaggaauguacuugcggguuugcuaguaacaaaacaauagagugugccugccgcgauaauucuuacaccgcgaagcgaccauucgugaaacugaacgucgaaacugacacagccgagaucagauuaaugugcaccgagacguaucuggauacccccaggccuaaugacggauccauuacaggcccaugugaaagcgauggcgacaaggggucgggagguaucaaaggcggguuugugcaucagcggauggcaucuaagauaggacguugguacucccgcacuaugucaaaaaccaagagaaugggcaugggucucuauguaaaguacgacggggaucccuggacagacagugaggcucuugcccugagcggcguuaugguguccauggaggaaccgggaugguacucuuucggcuuugaaauuaaagauaagaaaugcgacgucccuuguaucgggaucgagauggugcacgauggagguaagacuaccuggcauagcgcugccacagcaauuuauugcuugaugggcucagggcagcuacugugggacaccgugacuggagucgauauggcccucuga

SEQ ID NO: 157753 - RNA, 1401 nt, Artificial Sequence; identical to SEQ ID NO: 156836
  derived and/or modified CDS sequence (opt3) from neuraminidase__InfluenzaB__AGX22757

SEQ ID NO: 157754 - RNA, 1401 nt, Artificial Sequence; identical to SEQ ID NO: 156836
  derived and/or modified CDS sequence (opt3) from neuraminidase__InfluenzaB__AGX22768

SEQ ID NO: 157755 - RNA, 1401 nt, Artificial Sequence; identical to SEQ ID NO: 157177
  derived and/or modified CDS sequence (opt3) from neuraminidase__InfluenzaB__AGX22779

SEQ ID NO: 157756 - RNA, 1401 nt, Artificial Sequence; identical to SEQ ID NO: 156836
  derived and/or modified CDS sequence (opt3) from neuraminidase__InfluenzaB__AGX22790

SEQ ID NO: 157757 - RNA, 1401 nt, Artificial Sequence
  derived and/or modified CDS sequence (opt3) from neuraminidase__InfluenzaB__AGX22801
augcugcccagcaccauccagacacucacucuuuuccugacguccggcgggguguuguuaucucuguacgucucagccagucuaagcuaucuccuguacuccgacauucuucugaaguuuucucaaaccgagauaacagcuccuaucaugccauuggauugcgcaaacgccucgaauguucaggcggugaacagaucagcugccaaaggaguaacucuccugcugccggaacccgaguggaccuauccuaggcucagcuguccagguaguacauuccagaaggcauuacugauuucuccccaccgguuuggcgaaaccaaaggaaauuccgccccucuuaucauucgcgagccauucaucgcuugcgggcccacugaauguaagcauuuugcauugacacacuacgccgcucagccuggcgguuauuacaacgggacccgaggagaccguaauaaacugagacaucuaauaagcgugaagcucggcaagaucccaacggucgagaacuccauuuuccacauggccgcguggucaggcagugcaugccaugaugggaaagaguggacuuauaucggaguggacgguccggauagcaaugcccugcuuaagauuaaauacggcgaggcuuacaccgacacauaucacucuuacgccaagaacauccugaggacucaagaauccgcauguaauugcauagggggaaacuguuauuugaugauuaccgauggcucagcuagcgguguuagugaaugccgguuucucaaaauccgcgaggggagaauuaucaaggagaucuuccccacaggaagggugaagcacaccgaagaguguacgugcggcuuugccucuaauaaaacuauugaaugugcgugccgggacaacuccuacacagccaagcgcccuuucgucaaacugaauguggagaccgauacugcagaaauacgauuaaugugcacagagaccuaucuggacacgccaagacccaacgauggcagcaucaccgggccuugugagucggacggagauaaggguucuggcgggauuaaaggaggcuuuguacaucagaggauggcuuccaagaucggucggugguacucacguacaaugaguaaaacuaagcgcauggggaugggccucuauguuaaguacgacggagacccauggaccgauagcgaagcccuugcucuguccggcgugauggucucuauggaggaacccgggugguacagcuucggauuugagauaaaagacaagaaaugcgaugugccguguauugguaucgaaauggugcacgacggcgggaagacaacuuggcauucagccgcaaccgccaucuauugcuugaugggaaguggccagcuacugugggauacagucaccgguguugacauggcucucuga

SEQ ID NO: 157758 - RNA, 1401 nt, Artificial Sequence; identical to SEQ ID NO: 156836
  derived and/or modified CDS sequence (opt3) from neuraminidase__InfluenzaB__AGX22812

SEQ ID NO: 157759 - RNA, 1401 nt, Artificial Sequence; identical to SEQ ID NO: 156836
  derived and/or modified CDS sequence (opt3) from neuraminidase__InfluenzaB__AGX22823

SEQ ID NO: 157760 - RNA, 1401 nt, Artificial Sequence; identical to SEQ ID NO: 156836
  derived and/or modified CDS sequence (opt3) from neuraminidase__InfluenzaB__AGX22834

SEQ ID NO: 157761 - RNA, 1401 nt, Artificial Sequence; identical to SEQ ID NO: 156836
  derived and/or modified CDS sequence (opt3) from neuraminidase__InfluenzaB__AGX22845

SEQ ID NO: 157762 - RNA, 1401 nt, Artificial Sequence; identical to SEQ ID NO: 156836
  derived and/or modified CDS sequence (opt3) from neuraminidase__InfluenzaB__AGX22856

SEQ ID NO: 157763 - RNA, 1401 nt, Artificial Sequence; identical to SEQ ID NO: 156836
  derived and/or modified CDS sequence (opt3) from neuraminidase__InfluenzaB__AGX22867

SEQ ID NO: 157764 - RNA, 1401 nt, Artificial Sequence; identical to SEQ ID NO: 156836
  derived and/or modified CDS sequence (opt3) from neuraminidase__InfluenzaB__AGX22878

SEQ ID NO: 157765 - RNA, 1401 nt, Artificial Sequence
  derived and/or modified CDS sequence (opt3) from neuraminidase__InfluenzaB__AGX22889
augcugcccagcaccauccagacacucacucuuuuccugacguccggcgggguguuguuaucucuguacgucucagccagucuaagcuaucuccuguacuccgacauucuucugaaguuuucucaaaccgagauaacagcuccuaucaugccauuggauugcgcaaacgccucgaauguucaggcggugaacagaucagcugccaaaggaguaacucuccugcugccggaacccgaguggaccuauccuaggcucagcuguccagguaguacauuccagaaggcauuacugauuucuccccaccgguuuggcgaaaccaaaggaaauuccgccccucuuaucauucgcgagccauucaucgcuugcgggcccacugaauguaagcauuuugcauugacacacuacgccgcucagccuggcgguuauuacaacgggacccgagaggaccguaauaaacugagacaucuaauaagcgugaagcucggaaagaucccaacggucgagaacuccauuuuccacauggccgcguggucaggcagugcaugccaugauggcaaagaauggacuuauaucgggguggacggaccggauagcaaugcccugcuuaagauuaaauacggugaggcuuacaccgacacauaucacucuuacgccaagaacauccugaggacucaagaauccgcauguaauugcauaggcggggauuguuauuugaugauuaccgacggacccgcuucaggcaucagcgagugccgguuucucaaaauucgcgaggguagaaucaucaaggaaauuuucccuacagggaggguuaagcacaccgaggaauguacgugcggauuugccaguaacaaaacuauagagugugcgugccgggauaauucucauacagccaagcgcccauucgugaaacugaacgucgaaaccgacacugcagagauccgauuaaugugcacagagaccuaccuggauacgcccagaccuaaugacggcuccauuaccggcccaugugaaagcgauggggacaagggaucggguggcaucaaagggggauuugugcaccagaggauggcuucuaagauaggccggugguauucccguacaaugucaaaaacuaagcgcauggguauggggcucuacguaaaguaugacggcgaucccuggaccgacagugaggcccuugcucugagcggaguuaugguguccauggaggaaccgggcugguacucuuucggguuugaaauuaaagauaagaaaugcgacgucccuuguaucggaaucgagauggugcaugaugguggcaagacaacuuggcacagcgccgcaaccgccauuuacugcuugauggggucaggacagcuacugugggacacagugaccggcgucgauauggcucucuga

SEQ ID NO: 157766 - RNA, 1401 nt, Artificial Sequence; identical to SEQ ID NO: 156675
  derived and/or modified CDS sequence (opt3) from neuraminidase__InfluenzaB__AGX22900

SEQ ID NO: 157767 - RNA, 1401 nt, Artificial Sequence
  derived and/or modified CDS sequence (opt3) from neuraminidase__InfluenzaB__AGX22911
augcugcccagcaccauccagacacucacucuuuuccugacguccggcgggguguuguuaucucuguacgucucagccagucuaagcuaucuccuguacuccgacauucuucugaaguuuucucaaaccgagauaacagcuccuaucaugccauuggauugcgcaaacgccucgaauguucaggcggugaacagaucagcugccaaaggaguaacucuccugcugccggaacccgaguggaccuauccuaggcucagcuguccagguaguacauuccagaaggcauuacugauuucuccccaccgguuuggcgaaaccaaaggaaauuccgccccucuuaucauucgcgagccauucaucgcuugcgggcccacugaauguaagcauuuugcauugacacacuacgccgcucagccuggcgguuauuacaacgggacccgagaggaccguaauaaacugagacaucuaauaagcgugaagcucggaaagaucccaacggucgagaacuccauuuuccacauggccgcguggucaggcagugcaugccaugauggcaaagaauggacuuauaucgggguggacggaccggauagcaaugcccugcuuaagauuaaauacggugaggcuuacaccgacacauaucacucuuacgccaagaacauccugaggacucaagaauccgcauguaauugcauaggcggggauuguuauuugaugauuaccgacggacccgcuucaggcacaagcgagugccgguuucucaaaauccgcgaggguagaauuaucaaggaaaucuucccuaccgggaggguuaagcacacggaggaauguacuugcggauuugccaguaacaaaacaauugagugugcgugccgggauaauucuuacaccgccaagcgcccauucgugaaacugaacgucgaaacugacacagcagagauacgauuaaugugcaccgagacguaucuggauacccccagaccuaaugacggcuccaucacaggcccaugugaaagcgauggggacaagggaucggguggcauuaaagggggauuugugcaucagaggauggcuucuaagaucggccggugguacucccguacuaugucaaaaaccaagcgcauggguauggggcucuauguaaaguacgacggcgaucccuggacagacagugaggcccuugcucugagcggaguuaugguguccauggaggaaccgggcugguacucuuucggguuugaaauaaaagauaagaaaugcgacgucccuuguauuggaaucgagauggugcacgaugguggcaagacuaccuggcauagcgccgcaacagccaucuauugcuugauggggucaggacagcuacugugggacaccgugacuggcgucgauauggcucucuga

SEQ ID NO: 157768 - RNA, 1401 nt, Artificial Sequence
  derived and/or modified CDS sequence (opt3) from neuraminidase__InfluenzaB__AGX22922
augcugcccagcaccauccagacacucacucuuuuccugacguccggcgggguguuguuaucucuguacgucucagccagucuaagcuaucuccuguacuccgacauucuucugaaguuuucucaaaccgagauaacagcuccuaucaugccauuggauugcgcaaacgccucgaauguucaggcggugaacagaucagcuacuaaaggaguaacccuccugcugccggaacccgaguggacauauccuaggcucagcuguccagguaguaccuuccagaaggccuuacugauuucuccccaccgguuuggcgaaacuaaaggaaauuccgcaccucuuaucauucgcgagccauucaucgccugcgggcccacagaauguaagcauuuugcuuugacccacuacgcagcccagccuggcgguuauuacaacgggacgcgagaggaccguaauaaacugagacaucuaauaagcgugaagcucggaaagaucccaacugucgagaacuccauuuuccacauggcugccuggucaggcagugcgugccaugauggcaaagaauggaccuauaucgggguggacggaccggauagcaaugcacugcuuaagauuaaauacggugaggccuacacagacacuuaucacucuuacgcuaagaacauccugaggacccaagaauccgccuguaauugcauaggcggggauuguuauuugaugauuacagacggacccgcaucaggcaucagcgagugccgguuucucaaaauucgcgaggguagaaucaucaaggaaauuuucccuaccgggaggguuaagcacacggaggaauguacuugcggauuugcuaguaacaaaacaauagagugugccugccgggauaauucuuacaccgcgaagcgcccauucgugaaacugaacgucgaaacugacacagccgagauccgauuaaugugcaccgagacguaucuggauacccccagaccuaaugacggcuccauuacaggcccaugugaaagcgauggggacaagggaucggguggcaucaaagggggauuugugcaucagaggauggcaucuaagauaggccggugguacucccguacuaugucaaaaaccaagcgcauggguauggggcucuauguaaaguacgacggcgaucccuggacagacaacgaggcucuugcccugaguggaguuauggugagcauggaggaaccgggcugguacuccuucggguuugaaauuaaagauaagaaaugcgacgucccuuguaucggaaucgagauggugcacgaugguggcaagacuaccuggcauucugcugccacagcaauuuauugcuugauggggagcggacagcuacugugggacaccgugacuggcgucgauauggcccucuga

SEQ ID NO: 157769 - RNA, 1401 nt, Artificial Sequence; identical to SEQ ID NO: 156836
  derived and/or modified CDS sequence (opt3) from neuraminidase__InfluenzaB__AGX22933

SEQ ID NO: 157770 - RNA, 1401 nt, Artificial Sequence; identical to SEQ ID NO: 156836
  derived and/or modified CDS sequence (opt3) from neuraminidase__InfluenzaB__AGX22944

SEQ ID NO: 157771 - RNA, 1401 nt, Artificial Sequence; identical to SEQ ID NO: 156836
  derived and/or modified CDS sequence (opt3) from neuraminidase__InfluenzaB__AGX22955

SEQ ID NO: 157772 - RNA, 1401 nt, Artificial Sequence; identical to SEQ ID NO: 156836
  derived and/or modified CDS sequence (opt3) from neuraminidase__InfluenzaB__AGX22966

SEQ ID NO: 157773 - RNA, 1401 nt, Artificial Sequence; identical to SEQ ID NO: 156675
  derived and/or modified CDS sequence (opt3) from neuraminidase__InfluenzaB__AGX22977

SEQ ID NO: 157774 - RNA, 1401 nt, Artificial Sequence; identical to SEQ ID NO: 157091
  derived and/or modified CDS sequence (opt3) from neuraminidase__InfluenzaB__AGX22988

SEQ ID NO: 157775 - RNA, 1401 nt, Artificial Sequence
  derived and/or modified CDS sequence (opt3) from neuraminidase__InfluenzaB__AGX22999
augcugcccagcaccauccagacacucacucuuuuccugacguccggcgggguguuguuaucucuguacgucucagccagucuaagcuaucuccuguacuccgacauucuucugaaguuuucucaaaccgagauaacagcuccuaucaugccauuggauugcgcaaacgccucgaauguucaggcggugaacagaucagcugccaaaggaguaacucuccugcugccggaacccgagugggcauauccuaggcucagcuguccagguaguaccuuccagaaggccuuacugauuucuccccaccgguuuggcgaaacaaaaggaaauuccgcuccucuuaucauucgcgagccauucaucgcaugcgggcccaccgaauguaagcauuuugccuugacucacuacgcugcccagccuggcgguuauuacaacgggacacgagaggaccguaauaaacugagacaucuaauaagcgugaagcucggaaagaucccaaccgucgagaacuccauuuuccacauggcggcauggucaggcagugccugccaugauggcaaagaauggacguauaucgggguggacggaccggauagcaaugcucugcuuaagauuaaauacggugaggccuacacugacaccuaucacucuuacgcaaagaacauccugaggacacaagaauccgcuuguaauugcauaggcggggauuguuauuugaugauuacugacggacccgccucaggcaucagcgagugccgguuucucaaaauucgcgaggguagaaucaucaaggaaauuuucccuaccgggaggguuaagcacacagaggaauguaccugcggauuugcgaguaacaaaacgauagagugugccugccgggauaauucuuacacugcaaagcgcccauucgugaaacugaacgucgaaacagacaccgcugagauccgauuaaugugcacugagacauaucuggauacccccagaccuaaugacggcuccauuacgggcccaugugaaagcgauggggacaagggaucggguggcaucaaagggggauuugugcaucagaggauggccucuaagauaggccggugguacucccguaccaugucaaaaacaaagcgcauggguauggggcucuauguaaaguacgacggcgaucccuggacugacagugaggcucuugcccugagcggaguuaugguguccauggaggaaccgggcugguacucuuucggguuugaaauuaaagauaagaaaugcgacgucccuuguaucggaaucgagauggugcacgaugguggcaagaccacauggcauagcgcagccacugcuauuuauugcuugauggggucaggacagcuacugugggacaccgugacaggcgucgauauggcgcucuga

SEQ ID NO: 157776 - RNA, 1401 nt, Artificial Sequence; identical to SEQ ID NO: 157775
  derived and/or modified CDS sequence (opt3) from neuraminidase__InfluenzaB__AGX23010

SEQ ID NO: 157777 - RNA, 1401 nt, Artificial Sequence; identical to SEQ ID NO: 156675
  derived and/or modified CDS sequence (opt3) from neuraminidase__InfluenzaB__AGX23021

SEQ ID NO: 157778 - RNA, 1401 nt, Artificial Sequence; identical to SEQ ID NO: 156836
  derived and/or modified CDS sequence (opt3) from neuraminidase__InfluenzaB__AGX23032

SEQ ID NO: 157779 - RNA, 1401 nt, Artificial Sequence
  derived and/or modified CDS sequence (opt3) from neuraminidase__InfluenzaB__AGX23043
augcugcccagcaccauccagacacucacucuuuuccugacguccggcgggguguuguuaucucuguacgucucagccagucuaagcuaucuccuguacuccgacauucuucugaaguuuucucaaaccgagauaacagcuccuaucaugccauuggauugcgcaaacgccucgaauguucaggcggugaacagaucagcugccaaaggaguaacucuccugcugccggaacccgaguggaccuauccuaggcucagcuguccagguaguacauuccagaaggcauuacugauuucuccccaccgguuuggcgaaaccaaaggaaauuccgccccucuuaucauucgcgagccauucaucgcuugcgggcccacugaauguaagcauuuugcauugacacacuacgccgcucagccuggcgguuauuacaacgggacccgagaggaccguaauaaacugagacaucuaauaagcgugaagcucggaaagaucccaacggucgagaacuccauuuuccacauggccgcguggucaggcagugcaugccaugauggcaaagaauggacuuauaucgggguggacggaccggauagcaaugcccugcuuaagauuaaauacggugaggcuuacaccgacacauaucacucuuacgccaagaacauccugaggacucaagaauccgcauguaauugcauaggcggggauuguuauuugaugauuaccgacggacccgcucucggcaucucagagugccgguuucugaaaauucgcgaggguagaaucaucaaggaaauuuucccuacagggaggguuaagcacaccgaggaauguacgugcggauuugccagcaacaaaacuauagagugugcgugccgggauaauaguuacacagccaagcgcccauucgugaaauuaaacgucgaaaccgacacugcagagauccgacugaugugcacagagaccuaucucgauacgcccagaccuaaugacggcucuauuaccggcccaugugaauccgauggggacaagggaagcgguggcaucaaagggggauuugugcaucagaggauggcuucgaagauaggccggugguacucucguacaauguccaaaacuaagcgcauggguauggggcuuuauguaaaguacgacggcgaucccuggaccgacucagaggcccuggcuuugaguggaguuauggugagcauggaggaaccgggcugguacuccuucggguuugaaauuaaagauaagaaaugcgacgucccuuguaucggaaucgagauggugcacgaugguggcaagacaacuuggcauucugccgcaaccgccauuuauugccuaauggggagcggacagcugcucugggacacagugaccggcgucgauauggcucuguga

SEQ ID NO: 157780 - RNA, 1401 nt, Artificial Sequence; identical to SEQ ID NO: 156675
  derived and/or modified CDS sequence (opt3) from neuraminidase__InfluenzaB__AGX23054

SEQ ID NO: 157781 - RNA, 1401 nt, Artificial Sequence; identical to SEQ ID NO: 156675
  derived and/or modified CDS sequence (opt3) from neuraminidase__InfluenzaB__AGX23065

SEQ ID NO: 157782 - RNA, 1401 nt, Artificial Sequence; identical to SEQ ID NO: 156675
  derived and/or modified CDS sequence (opt3) from neuraminidase__InfluenzaB__AGX23076

SEQ ID NO: 157783 - RNA, 1401 nt, Artificial Sequence; identical to SEQ ID NO: 156836
  derived and/or modified CDS sequence (opt3) from neuraminidase__InfluenzaB__AGX23087

SEQ ID NO: 157784 - RNA, 1401 nt, Artificial Sequence; identical to SEQ ID NO: 156675
  derived and/or modified CDS sequence (opt3) from neuraminidase__InfluenzaB__AGX23098

SEQ ID NO: 157785 - RNA, 1401 nt, Artificial Sequence
  derived and/or modified CDS sequence (opt3) from neuraminidase__InfluenzaB__AGX23109
augcugcccagcaccauccagacacucacucuuuuccugacguccggcgggguguuguuaucucuguacgucucagccagucuaagcuaucuccuguacuccgacauucuucugaaguuuucucaaaccgagauaacagcuccuaucaugccauuggauugcgcaaacgccucgaauguucaggcggugaacagaucagcuacuaaaggaguaacccuccugcugccggaacccgaguggacauauccuaggcucagcuguccagguaguaccuuccagaaggccuuacugauuucuccccaccgguuuggcgaaacuaaaggaaauuccgcaccucuuaucauucgcgagccauucaucgccugcgggcccacagaauguaagcauuuugcuuugacccacuacgcagcccagccuggcgguuauuacaacgggacgcgagaggaccguaauaaacugagacaucuaauaagcgugaagcucggaaagaucccaacugucgagaacuccauuuuccacauggcugccuggucaggcagugcgugccaugauggcaaagaauggaccuauaucgggguggacggaccggauagcaaugcacugcuuaagauuaaauacggugaggccuacacagacacuuaucacucuuacgcuaagaacauccugaggacccaagaauccgccuguaauugcauacggggcgauuguuauuugaugauuacagacgggcccgcaucaggaaucagcgagugccgcuuucucaaaauuagagagggcaggaucaucaaggaaauuuucccuaccggucggguuaagcacacggaggaauguacuugcggguuugcuaguaacaaaacaauagagugugccugccgcgauaauucuuacaccgcgaagcgaccauucgugaaacugaacgucgaaacugacacagccgagaucagauuaaugugcaccgagacguaucuggauacccccaggccuaaugacggauccauuacaggcccaugugaaagcgauggcgacaaggggucgggagguaucaaaggcggguuugugcaucagcggauggcaucuaagauaggacguugguacucccgcacuaugucaaaaaccaagagaaugggcaugggucucuauguaaaguacgacggggaucccuggacagacagugaggcucuugcccugagcggcguuaugguguccauggaggaaccgggaugguacucuuucggcuuugaaauuaaagauaagaaaugcgacgucccuuguaucgggaucgagauggugcacgauggagguaagacuaccuggcauagcgcugccacagcaauuuauugcuugaugggcucagggcagcuacugugggacaccgugacuggagucgauauggcccucuga

SEQ ID NO: 157786 - RNA, 1401 nt, Artificial Sequence; identical to SEQ ID NO: 156836
  derived and/or modified CDS sequence (opt3) from neuraminidase__InfluenzaB__AGX23120

SEQ ID NO: 157787 - RNA, 1401 nt, Artificial Sequence
  derived and/or modified CDS sequence (opt3) from neuraminidase__InfluenzaB__AGX23131
augcugcccagcaccauccagacacucacucuuuuccugacguccggcgggguguuguuaucucuguacgucucagccagucuaagcuaucuccuguacuccgacauucuucugaaguuuucucaaaccgagauaaucgcuccuauuaugccauuggauugcgcaaacgccucgaauguucaggcggugaacagaucagcugccaaaggaguaacacuccugcugccggaacccgaguggacuuauccuaggcucagcuguccagguaguaccuuccagaaggcauuacugaucucuccccaccgguuuggcgaaacaaaaggaaauuccgccccucuuauuauccgcgagccauucauagcuugcgggcccaccgaauguaagcauuuugcauugacucacuacgccgcucagccuggcgguuauuacaacgggacacgagaggaccguaauaaacugagacaucuaaucagcgugaagcucggaaagauuccaaccgucgagaacuccaucuuccacauggccgcguggucaggcagugcaugccaugauggcaaagaauggacguauauugggguggacggaccggauagcaaugcccugcuuaagaucaaauacggugaggcuuacacugacaccuaucacucuuacgccaagaacauacugaggacacaagaauccgcauguaauugcauuggcggggauuguuauuugaugaucacugacggacccgcuucaggcauuagcgagugccgguuucucaaaauccgcgaggguagaaucauuaaggaaauauucccuaccgggaggguuaagcacacagaggaauguaccugcggauuugccaguaacaaaacgaucgagugugcgugccgggauaauucuuacacugccaagcgcccauucgugaaacugaacgucgaaacagacaccgcagagauucgauuaaugugcacugagacauaucuggauacccccagaccuaaugacggcuccaucacgggcccaugugaaagcgauggggacaagggaucggguggcauaaaagggggauuugugcaucagaggauggcuucuaagauuggccggugguacucccguaccaugucaaaaacaaagcgcauggguauggggcucuauguaaaguacgacggcgaucccuggacugacagugaggcccuugcucugagcggaguuaugguguccauggaggaaccgggcugguacucuuucggguuugaaaucaaagauaagaaaugcgacgucccuuguaucggaauugagauggugcacgaugguggcaagaccacauggcauagcgccgcaacugccaucuauugcuugauggggucaggacagcuacugugggacaccgugacaggcgucgauauggcucucuga

SEQ ID NO: 157788 - RNA, 1401 nt, Artificial Sequence; identical to SEQ ID NO: 156836
  derived and/or modified CDS sequence (opt3) from neuraminidase__InfluenzaB__AGX23142

SEQ ID NO: 157789 - RNA, 1401 nt, Artificial Sequence; identical to SEQ ID NO: 156675
  derived and/or modified CDS sequence (opt3) from neuraminidase__InfluenzaB__AGX23153

SEQ ID NO: 157790 - RNA, 1401 nt, Artificial Sequence; identical to SEQ ID NO: 156675
  derived and/or modified CDS sequence (opt3) from neuraminidase__InfluenzaB__AGX23164

SEQ ID NO: 157791 - RNA, 1401 nt, Artificial Sequence; identical to SEQ ID NO: 156675
  derived and/or modified CDS sequence (opt3) from neuraminidase__InfluenzaB__AGX23175

SEQ ID NO: 157792 - RNA, 1401 nt, Artificial Sequence
  derived and/or modified CDS sequence (opt3) from neuraminidase__InfluenzaB__AGX23186
augcugcccagcaccacacagacucucacgcuuuuccugaccuccggcgggguguuguuaucucuguacgucucagccagucuaagcuaucuccuguacuccgacauccuucugaaguuuucucaaacagagauuacugcuccuauaaugccauuggauugcgcaaacgccucgaauguucaggcggugaacagaucagcugccaaaggaguaacccuccugcugccggaacccgaguggacauauccuaggcucagcuguccagguaguaccuuccagaaggcauuacugaucucuccccaccgguuuggcgaaacuaaaggaaauuccgccccucuuauuauccgcgagccauucauugcuugcgggcccacagaauguaagcauuuugcauugacccacuacgccgcucagccuggcgguuauuacaacgggacgcgagaggaccguaauaaacugagacaucuaaucagcgugaagcucggaaagauaccaacugucgagaacuccaucuuccacauggccgcguggucaggcagugcaugccaugauggcaaagaauggaccuauauugggguggacggaccggauagcaaugcccugcuuaagaucaaauacggugaggcuuacacagacacuuaucacucuuacgccaagaacauucugaggacccaagaauccgcauguaauugcaucggcggggauuguuauuugaugauaacagacggacccgcuucaggcauuagcgagugccgguuucucaaaauccgcgaggguagaauuaucaaggaaaucuucccuaccgggaggguuaagcacacggaggaauguacuugcggauuugccaguaacaaaacaauugagugugcgugccgggauaauucuuacaccgccaagcgcccauucgugaaacugaacgucgaaacugacacagcagagauacgauuaaugugcaccgagacguaucuggauacccccagaccuaaugacggcuccaucacaggcccaugugaaagcgauggggacaagggaucggguggcauuaaagggggauuugugcaucagaggauggcuucuaagaucggccggugguacucccguacuaugucaaaaaccaagcgcauggguauggggcucuauguaaaguacgacggcgaucccuggacagacagugaggcccuugcucugagcggaguuaugguguccauggaggaaccgggcugguacucuuucggguuugaaauaaaagauaagaaaugcgacgucccuuguauuggaaucgagauggugcacgaugguggcaagacuaccuggcauagcgccgcaacagccaucuauugcuugauggggucaggacagcuacugugggacaccgugacuggcgucgauauggcucucuga

SEQ ID NO: 157793 - RNA, 1401 nt, Artificial Sequence; identical to SEQ ID NO: 156836
  derived and/or modified CDS sequence (opt3) from neuraminidase__InfluenzaB__AGX23197

SEQ ID NO: 157794 - RNA, 1401 nt, Artificial Sequence; identical to SEQ ID NO: 156836
  derived and/or modified CDS sequence (opt3) from neuraminidase__InfluenzaB__AGX23208

SEQ ID NO: 157795 - RNA, 1401 nt, Artificial Sequence; identical to SEQ ID NO: 156836
  derived and/or modified CDS sequence (opt3) from neuraminidase__InfluenzaB__AGX23219

SEQ ID NO: 157796 - RNA, 1401 nt, Artificial Sequence
  derived and/or modified CDS sequence (opt3) from neuraminidase__InfluenzaB__AGX23230
augcugcccagcaccauccagacacucacucuuuuccugacguccggcgggguguuguuaucucuguacgucucagccagucuaagcuaucuccuguacuccgacauucuucugaaguuuucucaaaccgagauaacagcuccuaucaugccauuggauugcgcaaacgccucgaauguucaggcggugaacagaucagcugccaaaggaguaacucuccugcugccggaacccgaguggaccuauccuaggcucagcuguccagguaguacauuccagaaggcauuacugauuucuccccaccgguuuggcgaaaccaaaggaaauuccgccccucuuaucauucgcgagccauucaucgcuugcgggcccacugaauguaagcauuuugcauugacacacuacgccgcucagccuggcgaguauuacaacgguacccgagaggaccguaauaaacugagacaucuaauaagcgugaagcucgggaagaucccaacggucgaaaacuccauuuuccacauggccgcguggucaggaagugcaugccaugauggcaaagaguggacuuauaucggcguggacgggccggauagcaaugcccugcuuaagauuaaauacggagaggcuuacaccgacacauaucacucuuacgccaagaacauccugaggacucaagaauccgcauguaauugcauagguggcgauuguuauuugaugauuaccgacgggcccucaagcggaaucagugagugccgguuucucaaaauucgcgaaggcagaaucaucaaggagauuuucccuacagguaggguuaagcacaccgaagaguguacgugcggguuugcuucuaacaaaacuauagaaugugccugccgggauaauuccuacacagcgaagcgcccauucgugaaacugaacgucgagaccgacacugccgagauccgauuaaugugcacagaaaccuaucuggauacgcccagaccuaaugacggaagcauuaccggcccaugugagucggauggcgacaaggggucuggagguaucaaaggcggguuugugcaucagaggauggcauccaagauaggacggugguacucacguacaaugaguaaaacuaagcgcaugggcaugggucucuauguaaaguacgacggggaucccuggaccgacagcgaagcucuugcccuguccggcguuauggugucuauggaggaaccgggaugguacagcuucggcuuugagauuaaagauaagaaaugcgacgucccuuguaucgggaucgagauggugcacgauggagguaagacaacuuggcauucagcugccaccgcaauuuauugcuugaugggcagugggcagcuacugugggacacagugaccggagucgauauggcccucuga

SEQ ID NO: 157797 - RNA, 1401 nt, Artificial Sequence; identical to SEQ ID NO: 156675
  derived and/or modified CDS sequence (opt3) from neuraminidase__InfluenzaB__AGX23241

SEQ ID NO: 157798 - RNA, 1401 nt, Artificial Sequence; identical to SEQ ID NO: 156836
  derived and/or modified CDS sequence (opt3) from neuraminidase__InfluenzaB__AGX23252

SEQ ID NO: 157799 - RNA, 1401 nt, Artificial Sequence; identical to SEQ ID NO: 156836
  derived and/or modified CDS sequence (opt3) from neuraminidase__InfluenzaB__AGX23263

SEQ ID NO: 157800 - RNA, 1401 nt, Artificial Sequence; identical to SEQ ID NO: 156836
  derived and/or modified CDS sequence (opt3) from neuraminidase__InfluenzaB__AGX23274

SEQ ID NO: 157801 - RNA, 1401 nt, Artificial Sequence; identical to SEQ ID NO: 156675
  derived and/or modified CDS sequence (opt3) from neuraminidase__InfluenzaB__AGX23285

SEQ ID NO: 157802 - RNA, 1401 nt, Artificial Sequence; identical to SEQ ID NO: 156836
  derived and/or modified CDS sequence (opt3) from neuraminidase__InfluenzaB__AGX23296

SEQ ID NO: 157803 - RNA, 1401 nt, Artificial Sequence
  derived and/or modified CDS sequence (opt3) from neuraminidase__InfluenzaB__AGX23307
augcugcccagcaccauccagacacucacucuuuuccugacguccggcgggguguuguuaucucuguacgucucagccagucuaagcuaucuccuguacuccgacauucuucugaaguuuucucaaaccgagauaacagcuccuaucaugccauuggauugcgcaaacgccucgaauguucaggcggugaacagaucagcugccaaaggaguaacucuccugcugccggaacccgaguggaccuauccuaggcucagcuguccagguaguacauuccagaaggcauuacugauuucuccccaccgguuuggcgaaaccaaaggaaauuccgccccucuuaucauucgcgagccauucaucgcuugcgggcccacugaauguaagcauuuugcauugacacacuacgccgcucagccuggcgguuauuacaacgggacccgagaggaccguaauaaacugagacaucuaauaagcgugaagcucggaaagaucccaacggucgagaacuccauuuuccacauggccgcguggucaggcagugcaugccaugauggcaaagaauggacuuauguggggguugacggaccggauagcaaugcccugcuuaagaucaaauacggugaggcuuacaccgacacauaucacucuuacgccaagaacauucugaggacucaagaauccgcauguaauugcaucggcggggauuguuauuugaugauaaccgacggacccgcuucaggcauuagcgagugccgguuucucaaaauccgcgaggguagaauuaucaaggaaaucuucccuacagggagggugaagcacaccgaggaauguacgugcggauuugccaguaacaaaacuauugagugugcgugccgggauaauucuuacacagccaagcgcccauucgucaaacugaacguggaaaccgacacugcagagauacgauuaaugugcacagagaccuaucuggauacgcccagaccuaaugacggcuccaucaccggcccaugugaaagcgauggggacaagggaucggguggcauuaaagggggauuuguacaucagaggauggcuucuaagaucggccggugguacucccguacaaugucaaaaacuaagcgcauggguauggggcucuauguuaaguacgacggcgaucccuggaccgacagugaggcccuugcucugagcggagugauggucuccauggaggaaccgggcugguacucuuucggguuugaaauaaaagauaagaaaugcgacgugccuuguauuggaaucgagauggugcacgaugguggcaagacaacuuggcauagcgccgcaaccgccaucuauugcuugauggggucaggacagcuacugugggacacagucaccggcguugauauggcucucuga

SEQ ID NO: 157804 - RNA, 1401 nt, Artificial Sequence; identical to SEQ ID NO: 157803
  derived and/or modified CDS sequence (opt3) from neuraminidase__InfluenzaB__AGX23318

SEQ ID NO: 157805 - RNA, 1401 nt, Artificial Sequence; identical to SEQ ID NO: 157803
  derived and/or modified CDS sequence (opt3) from neuraminidase__InfluenzaB__AGX23329

SEQ ID NO: 157806 - RNA, 1401 nt, Artificial Sequence; identical to SEQ ID NO: 157803
  derived and/or modified CDS sequence (opt3) from neuraminidase__InfluenzaB__AGX23340

SEQ ID NO: 157807 - RNA, 1401 nt, Artificial Sequence; identical to SEQ ID NO: 157803
  derived and/or modified CDS sequence (opt3) from neuraminidase__InfluenzaB__AGX23351

SEQ ID NO: 157808 - RNA, 1401 nt, Artificial Sequence; identical to SEQ ID NO: 157803
  derived and/or modified CDS sequence (opt3) from neuraminidase__InfluenzaB__AGX23362

SEQ ID NO: 157809 - RNA, 1401 nt, Artificial Sequence; identical to SEQ ID NO: 157803
  derived and/or modified CDS sequence (opt3) from neuraminidase__InfluenzaB__AGX23373

SEQ ID NO: 157810 - RNA, 1401 nt, Artificial Sequence; identical to SEQ ID NO: 157803
  derived and/or modified CDS sequence (opt3) from neuraminidase__InfluenzaB__AGX23384

SEQ ID NO: 157811 - RNA, 1401 nt, Artificial Sequence
  derived and/or modified CDS sequence (opt3) from neuraminidase__InfluenzaB__AGX23395
augcugcccagcaccauccagacacucacucuuuuccugacguccggcgggguguuguuaucucuguacgucucagccagucuaagcuaucuccuguacuccgacauucuucugaaguuuucucaaaccgagauaacagcuccuaucaugccauuggauugcgcaaacgccucgaauguucaggcggugaacagaucagcugccaaaggaguaacucuccugcugccggaacccgaguggaccuauccuaggcucagcuguccagguaguacauuccagaaggcauuacugauuucuccccaccgguuuggcgaaaccaaaggaaauuccgccccucuuaucauucgcgagccauucaucgcuugcgggcccacugaauguaagcauuuugcauugacacacuacgccgcucagccuggcgguuauuacaacgggacccgagaggaccguaauaaacugagacaucuaauaagcgugaagcucggaaagaucccaacggucgagaacuccauuuuccacauggccgcguggucaggcagugcaugccaugauggcaaagaauggacuuauguggggguugacggaccggauagcaaugcccugcuuaagaucaaauacggugaggcuuacaccgacacauaucacucuuacgccaagaacauucugaggacucaagaauccgcauguaauugcaucggcggggauuguuauuugaugauaaccgacggacccgcuucaggcauuagcgagugccgguuucucaaaauccgcgaggguagaauuaucaaggaaaucuucccuacagggagggugaagcacaccgaggaauguacgugcggauuugccaguaacaaaacuauugagugugcgugccgggauaauucuuacacagccaagcgcccauucgucaaacugaacguggaaaccgacacugcagagauacgauuaaugugcacagagaccuaucuggauacgcccagaccuaaugacggcuccaucaccggcccaugugaaagcgauggggacaagggaucggguggcauuaaagggggauuuguacaucagaggauggcuucuaagaucggccggugguacucccguacaaugucaaaaacuaagcgcauggguauggggcucuauguuaaguacgacggcgaucccuggaccgacagugaggcccuugcucugagcggagugauggucuccauggaggaaccgggcugguacucuuucggguuugaaauaaaagauaagaaaugcgacgugccuuguauuggaaucgagauggugcacgaugguggcaagacaacuuggcauagcgccgcaaccgccaucuauugcuugauggggucaggacagcuacuguggaacacagucaccggcguugacauggcucucuga

SEQ ID NO: 157812 - RNA, 1401 nt, Artificial Sequence
  derived and/or modified CDS sequence (opt3) from neuraminidase__InfluenzaB__AGX23417
augcugcccagcaccauccagacacucacucuuuuccugacguccggcgggguguuguuaucucuguacgucucagccagucuaagcuaucuccuguacuccgacauucuucugaaguuuucucaaaccgagauaacagcuccuaucaugccauuggauugcgcaaacgccucgaauguucaggcggugaacagaucagcugccaaaggaguaacuuuccuccugccggaacccgaguggaccuauccuaggcugagcuguccagguaguacauuucagaaggcacucuuaauuucuccccaccgguucggcgaaaccaaaggaaauuccgccccucugaucauucgcgagccauuuaucgcuugcgggcccacugaauguaagcauuucgcacuuacacacuacgccgcucagccuggcgguuauuacaacgggacccgagaggaccguaauaaauugagacaucugauaagcgugaagcuaggaaagaucccaacggucgagaacuccauuuuucacauggccgcguggucaggcagugcaugccaugauggcaaagaauggacuuauaucgggguggacggaccggauagcaaugcccuccugaagauuaaauacggugaggcuuacaccgacacauaucacucuuacgccaagaacauccuuaggacucaagaauccgcauguaauugcauaggcggggauuguuaucugaugauuaccgacggacccgcuucaggcaucagcgagugccgguucuugaaaauucgcgaggguagaaucaucaaggaaauuuuuccuacagggaggguuaagcacaccgaggaauguacgugcggauucgccaguaacaaaacuauagagugugcgugccgggauaauucuuacacagccaagcgcccauuugugaaacucaacgucgaaaccgacacugcagagauccgacugaugugcacagagaccuauuuagauacgcccagaccuaaugacggcuccauuaccggcccaugugaaagcgauggggacaagggaucggguggcaucaaagggggauucgugcaucagaggauggcuucuaagauaggccggugguacucccguacaaugucaaaaacuaagcgcauggguauggggcuguauguaaaguacgacggcgaucccuggaccgacagugaggcccucgcucuuagcggaguuaugguguccauggaggaaccgggcugguacucuuuuggguucgaaauuaaagauaagaaaugcgacgucccuuguaucggaaucgagauggugcacgaugguggcaagacaacuuggcauagcgccgcaaccgccauuuauugccugauggggucaggacaguugcuaugggacacagugaccggcgucgauauggcucuguga

SEQ ID NO: 157813 - RNA, 1401 nt, Artificial Sequence; identical to SEQ ID NO: 157812
  derived and/or modified CDS sequence (opt3) from neuraminidase__InfluenzaB__AGX23428

SEQ ID NO: 157814 - RNA, 1401 nt, Artificial Sequence; identical to SEQ ID NO: 157195
  derived and/or modified CDS sequence (opt3) from neuraminidase__InfluenzaB__AGX23450

SEQ ID NO: 157815 - RNA, 1401 nt, Artificial Sequence
  derived and/or modified CDS sequence (opt3) from neuraminidase__InfluenzaB__AGX23461
augcugcccagcaccauccagacacucacucuuuuccugacguccggcgggguguuguuaucucuguacgucucagccagucuaagcuaucuccuguacuccgacauucuucugaaguuuucuagaaccgagauaacagcuccuaucaugccauuggauugcgcaaacgccucgaauauucaagcgguuaacaggucagcuacuaaaggagugacccuccugcugccggaacccgaguggacauauccucggcucagcuguccagguaguaccuuccagaaggccuuacugaucucuccccaccgcuuuggcgaaacuaaaggaaauuccgcaccucuuauuauccgagagccauucauagccugcgggcccaaggaauguaaacauuuugcuuugacacacuacgcagcccagccuggcgguuauuacaacgggacccgugaggacagaaauaagcugaggcaucuaaucagcguaaagcucggaaaaauuccaacgguggagaacuccaucuuccacauggcugccuggucaggcagugcgugccaugauggccgggaauggacuuauauuggggucgacggaccggauagcaaugcacugcuuaagaucaaauacggugaggccuacaccgacacauaucacucuuacgcuaagaacauacugcgcacucaggaauccgccuguaauugcauuggcggggauuguuauuugaugaucaccgacggacccgcaucaggcauuagcgagugcagauuucucaaaaucagggagggucggaucauuaaggaaauauucccuacagggcgcgugaagcacaccgaggaauguacgugcggauuugcuaguaacaaaacuaucgagugugccugccgagauaauucuuacacagcgaagagaccauucguuaaacugaacguggaaaccgacacugccgagauuagguuaaugugcacagagaccuaucuggauacgccccggccuaaugacggcuccaucaccggcccaugugaaagcaacggggauaagggaucggguggcauaaaagggggauuuguccaucaacguauggcaucuaagauuggccgcugguacuccagaacaaugucaaaaacuaagaggauggguauggggcucuaugugaaguacgacggcgaccccuggaccgauagugaggcucuugcccugagcggaguaaugguuuccaucgaggaaccgggcugguacucuuucggguuugaaaucaaagacaagaaaugcgaugugccuuguauuggaaucgagaugguccacgacgguggcaagacaacuuggcauagcgcugccaccgcaauuuauugcuugauggggucaggacagcuacugugggauacagugaccggcguggacauggcccucuga

SEQ ID NO: 157816 - RNA, 1401 nt, Artificial Sequence; identical to SEQ ID NO: 157195
  derived and/or modified CDS sequence (opt3) from neuraminidase__InfluenzaB__AGX23472

SEQ ID NO: 157817 - RNA, 1401 nt, Artificial Sequence; identical to SEQ ID NO: 156836
  derived and/or modified CDS sequence (opt3) from neuraminidase__InfluenzaB__AGX23483

SEQ ID NO: 157818 - RNA, 1401 nt, Artificial Sequence
  derived and/or modified CDS sequence (opt3) from neuraminidase__InfluenzaB__AGX23494
augcugcccagcaccauccagacacucacucuuuuccugacguccggcgggguguuguuaucucuguacgucucagccagucuaagcuaucuccuguacuccgacauucuucugaaguuuucucaaaccgagauaacagcuccuaucaugccauuggauugcgcaaacgccucgaauguucaggcggugaacagaucagcugccaaaggaguaacucuccugcugccggaacccgaguggaccuauccuaggcucagcuguccagguaguacauuccagaaggcauuacugauuucuccccaccgguuuggcgaaaccaaaggaaauuccgccccucuuaucauucgcgagccauucaucgcuugcgggcccacugaauguaagcauuuugcauugacacacuacgccgcucagccuggcgguuauuacaacgggacccgagaggaccguaauaaacugagacaucuaauaagcgugaagcucggaaagaucccaacggucgagaacuccauuuuccacauggccgcguggucaggcagugcaugccaugauggcaaagaauggacuuauguggggguugacggaccggauagcaaugcccugcuuaagaucaaauacggugaggcuuacaccgacacauaucacucuuacgccaagaacauucugaggacucaagaauccgcauguaauugcaucggcggggauuguuauuugaugauaaccgacggacccgcuucaggcauuagcgagugccgguuucucaaaauccgcgaggguagaauuaucaaggaaaucuucccuacagggagggugaagcacaccgaggaauguacgugcggauuugccaguaacaaaacuauugagugugcgugccgggauaauucuuacacagccaagcgcccauucgucaaacugaacguggaaaccgacacugcagagauacgauuaaugugcacagagaccuaucuggauacgcccagaccuaaugacggcuccaucaccggcccaugugggagcgauggagacaaggguucgggcgggauuaaaggaggcuuuguacaucagaggauggcuucuaagaucggucggugguacucccguacaaugucaaaaacuaagcgcauggggaugggccucuauguuaaguacgacggagaucccuggaccgacagugaagcccuugcucugagcggcgugauggucuccauggaugagccggggugguacucuuucggauuugaaauaaaagacaagaaaugcgaugugccuuguauugguaucgagauggugcacgacggcgggaagacaacuuggcauagcgccgcaaccgccaucuauugcuugaugggaucaggccagcuacugugggauacagucaccgguguugacauggcucucuga

SEQ ID NO: 157819 - RNA, 1401 nt, Artificial Sequence
  derived and/or modified CDS sequence (opt3) from neuraminidase__InfluenzaB__AGX23505
augcugcccagcaccauccagacacucacucuuuuccugacguccggcgggguguuguuaucucuguacgucucagccagucuaagcuaucuccuguacuccgacauucuucugaaguuuucucaaaccgagauaacagcuccuaucaugccauuggauugcgcaaacgccucgaauguucaggcggugaacagaucagcugccaaaggaguaacucuccugcugccggaacccgaguggaccuauccuaggcucagcuguccagguaguacauuccagaaggcauuacugauuucuccccaccgguuuggcgaaaccaaaggaaauuccgccccucuuaucauucgcgagccauucaucgcuugcgggcccacugaauguaagcauuuugcauugacacacuacgccgcucagccuggcgguuauuacaacgggacccgagaggaccguaauaaacugagacaucuaauaagcgugaagcucggaaagaucccaacggucgagaacuccauuuuccacauggccgcguggucaggcagugcaugccaugauggcaaagaauggacuuauaucgggguggacggaccggauaauaacgcccugcuuaagauuaaauacggugaggcuuacaccgacacauaucacagcuacgccaagaauauccugaggacucaagaaucugcauguaacugcauaggcggggauuguuauuugaugauuaccgacggacccgcuuccggcaucucagagugccgguuucucaaaauucgcgaggguagaaucaucaaggaaauuuucccuacagggaggguuaagcacaccgaggaauguacgugcggauuugccagcaauaaaacuauagagugugcgugccgggauaacaguuacacagccaagcgcccauucgugaaacugaaugucgaaaccgacacugcagagauccgauuaaugugcacagagaccuaucuggauacgcccagaccuaacgacggcucuauuaccggcccaugugaauccgauggggacaagggaagcgguggcaucaaagggggauuugugcaucagaggauggcuucgaagauaggccggugguacucucguacaauguccaaaacuaagcgcauggguauggggcucuauguaaaguacgacggcgaucccuggaccgacucagaggcccuugcucugaguggaguuauggugagcauggaggaaccgggcugguacuccuucggguuugaaauuaaagauaagaaaugcgacgucccuuguaucggaaucgagauggugcacgaugguggcaagacaacuuggcauucugccgcaaccgccauuuauugcuugauggggagcggacagcuacugugggacacagugaccggcgucgauauggcucucuga

SEQ ID NO: 157820 - RNA, 1401 nt, Artificial Sequence
  derived and/or modified CDS sequence (opt3) from neuraminidase__InfluenzaB__AGX23516
augcugcccagcaccauccagacacucacucuuuuccugacguccggcgggguguuguuaucucuguacgucucagccagucuaagcuaucuccuguacuccgacauucuucugaaguuuucucaaaccgagauaacagcuccuaucaugccauuggauugcgcaaacgccucgaauguucaggcggugaacagaucagcugccaaaggaguaacucuccugcugccggaacccgaguggaccuauccuaggcucagcuguccagguaguacauuccagaaggcauuacugauuucuccccaccgguuuggcgaaaccaaaggaaauuccgccccucuuaucauucgcgagccauucaucgcuugcgggcccacugaauguaagcauuuugcauugacacacuacgccgcucagccuggcgguuauuacaacgggacccgagaggaccguaauaaacugagacaucuaauaagcgugaagcucggaaagaucccaacggucgagaacuccauuuuccacauggccgcguggucaggcagugcaugccaugauggcaaagaauggacuuauaucgggguggacggaccggauagcaaugcccugcuuaagauuaaauacggugaggcuuacaccgacacauaucacucuuacgccaagaacauccugaggacucaagaauccgcauguaauugcauaggcggggauuguuauuugaugauuaccgacggacccgcuucaggcguuagcgagugccgguuucucaaaauccgcgaggguagaauuaucaaggaaaucuucccuacagggagggugaagcacaccgaggaauguacgugcggauuugccaguaacaaaacuauugagugugcgugccgggauaauucuuacacagccaagcgcccauucgucaaacugaacguggaaaccgacacugcagagauacgauuaaugugcacagagaccuaucuggauacgcccagaccuaaugacggcuccaucaccggcccaugugaaagcgauggggacaagggaucggguggcauuaaagggggauuuguacaucagaggauggcuucuaagaucggccggugguacucccguacaaugucaaaagccaagcgcauggguauggggcucuauguuaaguacgacggcgaucccuggacugacagugaggcucuugcccugagcggagugauggucuccauggaggaaccgggcugguacucuuucggguuugaaauaaaagauaagaaaugcgacgugccuuguauuggaaucgagauggugcacgaugguggcaagaccacauggcauagcgcagccacugcuaucuauugcuugauggggucaggacagcuacugugggacaccgucacaggcguugauauggcgcucuga

SEQ ID NO: 157821 - RNA, 1401 nt, Artificial Sequence; identical to SEQ ID NO: 156836
  derived and/or modified CDS sequence (opt3) from neuraminidase__InfluenzaB__AGX23527

SEQ ID NO: 157822 - RNA, 1401 nt, Artificial Sequence
  derived and/or modified CDS sequence (opt3) from neuraminidase__InfluenzaB__AGX23538
augcugcccagcaccauccagacacucacucuuuuccugacguccggcgggguguuguuaucucuguacgucucagccagucuaagcuaucuccuguacuccgacauucuucugaaguuuucucaaaccgagauaacagcuccuaucaugccauuggauugcgcaaacgccucgaauguucaggcggugaacagaucagcugccaaaggaguaacucuccugcugccgaagcccgaauggaccuauccuaggcucagcuguccagguaguacauuccagaaagcauuacugauuucuccccaccgguuuggcgagaccaagggaaauuccgccccucuuaucauucgcgaaccauucaucgcuugcgggcccacugaguguaaacauuuugcauugacacacuacgccgcucagccuggcgguuauuacaacgggacccgagaagaccguaauaagcugagacaucuaauaagcgugaagcucggaaaaaucccaacggucgagaacuccauuuuccacauggccgcguggucaggcagugcaugccaugauggcaaggaguggacuuauaucgggguggacggaccggauagcaaugcccugcuuaaaauuaaguacggugaggcuuacaccgacacauaucacucuuacgccaaaaacauccugaggacucaagaauccgcauguaauugcauaggcggggauuguuauuugaugauuaccgacggacccgcuucaggcguuagcgaaugccgguuucucaagauccgcgaggguagaauuaucaaggagaucuucccuacagggagggugaaacacaccgaagaguguacgugcggauuugccaguaacaagacuauugaaugugcgugccgggauaauucuuacacagccaaacgcccauucgucaagcugaacguggagaccgacacugcagaaauacgauuaaugugcacagagaccuaucuggauacgcccagaccuaaugacggcuccaucaccggcccaugugagagcgauggggacaaaggaucggguggcauuaaagggggauuuguacaucagaggauggcuucuaagaucggccggugguacucccguacaaugucaacuaccaagcgcauggguauggggcucuauguuaaguacgacggcgaucccuggacagacagugaagcccuugcucugagcggagugauggucuccauggaggaaccgggcugguacucuuucggguuugagauaaaagauaagaaaugcgacgugccuuguauuggaaucgaaauggugcacgaugguggcaagacuaccuggcauagcgccgcaacagccaucuauugcuugauggggucaggacagcuacugugggacaccgucacuggcguugauauggcucucuga

SEQ ID NO: 157823 - RNA, 1401 nt, Artificial Sequence
  derived and/or modified CDS sequence (opt3) from neuraminidase__InfluenzaB__AGX23549
augcugcccagcaccauccagacacucacucuuuuccugacguccggcgggguguuguuaucucuguacgucucagccagucuaagcuaucuccuguacuccgacauucuucugaaguuuucucaaaccgagauaacagcuccuaucaugccauuggauugcgcaaacgccucgaauguucaggcggugaacagaucagcugccaaaggaguaacucuccugcugccggaacccgaguggaccuauccuaggcucagcuguccagguaguacauuccagaaggcauuacugauuucuccccaccgguuuggcgaaaccaaaggaaauuccgccccucuuaucauucgcgagccauucaucgcuugcgggcccacugaauguaagcauuuugcauugacacacuacgccgcucagccuggcgguuauuacaacgggacccgagaggaccguaauaaacugagacaucuaauaagcgugaagcucggaaagaucccaacggucgagaacuccauuuuccacauggccgcguggucaggcagugcaugccaugauggcaaagaauggacuuauaucgggguggacggaccggauagcaaugcccugcuuaagauuaaauacggugaggcuuacaccgacacauaucacucuuacgccaagaacauccugaggacucaagaauccgcauguaauugcauaggcggggauuguuauuugaugauuaccgacggacccgcuucaggcguuagcgagugccgguuucucaaaauccgcgaggguagaauuaucaaggaaaucuucccuacagggagggugaagcacaccgaggaauguacgugcggauuugccaguaacaaaacuauugagugugcgugccgggauaauucuuacacagccaagcgcccauucgucaaacugaacguggaaaccgacacugcagagauacgauuaaugugcacagagaccuaucuggauacgcccagaccuaaugacggcuccaucaccggcccaugugaaagcgauggggacaagggaucggguggcauuaaagggggauuuguacaucagaggauggcuucuaagaucggccggugguacucccguacaaugucaacuaccaaacgcauggguauggggcucuauguuaaguacgacggcgaucccuggacagacagugaggcccuugcucugagcggagugauggucuccauggaggaaccgggcugguacucuuucggguuugaaauaaaggauaaaaagugcgacgugccuuguauuggaaucgagauggugcacgaugguggcaaaacuaccuggcauagcgccgcaacagccaucuauugcuugauggggucaggacagcuacugugggacaccgucacuggcguugauauggcucucuga

SEQ ID NO: 157824 - RNA, 1401 nt, Artificial Sequence; identical to SEQ ID NO: 156836
  derived and/or modified CDS sequence (opt3) from neuraminidase__InfluenzaB__AGX23560

SEQ ID NO: 157825 - RNA, 1401 nt, Artificial Sequence; identical to SEQ ID NO: 157818
  derived and/or modified CDS sequence (opt3) from neuraminidase__InfluenzaB__AGX23571

SEQ ID NO: 157826 - RNA, 1401 nt, Artificial Sequence; identical to SEQ ID NO: 157818
  derived and/or modified CDS sequence (opt3) from neuraminidase__InfluenzaB__AGX23582

SEQ ID NO: 157827 - RNA, 1401 nt, Artificial Sequence
  derived and/or modified CDS sequence (opt3) from neuraminidase__InfluenzaB__AGX23593
augcugcccagcaccauccagacacucacucuuuuccugacguccggcgggguguuguuaucucuguacgucucagccagucuaagcuaucuccuguacuccgacauucuucugaaguuuucucaaaccgagauaacagcuccuaucaugccauuggauugcgcaaacgccucgaauguucaggcggugaacagaucagcugccaaaggaguaacucuccugcugccggaacccgaguggaccuauccuaggcucagcuguccagguaguacauuccagaaggcauuacugauuucuccccaccgguuuggcgaaaccaaaggaaauuccgccccucuuaucauucgcgagccauucaucgcuugcgggcccacugaauguaagcauuuugcauugacacacuacgccgcucagccuggcgguuauuacaacgggacccgagaggaccguaauaaacugagacaucuaauaagcgugaagcucggaaagaucccaacggucgagaacuccauuuuccacauggccgcguggucaggcagugcaugccaugauggcaaagaauggacuuauaucgggguggacggaccggauagcaaugcccugcuuaagauuaaauacggugaggcuuacaccgacacauaucacucuuacgccaagaacauccugaggacucaagaauccgcauguaauugcauaggcggggauuguuauuugaugauuaccgacggacccgcuucaggcaucagcgagugccgguuucucaaaauucgcgaggguagaaucaucaaggaaauuuucccuacagggaggguuaagcacaccgaggaauguacgugcggauuugccaguaacaaaacuauagagugugcgugccgggauaauucuuacacagccaagcgcccauucgugaaacugaacgucgaaaccgacacugcagagauccgauuaaugugcacagagaccuaucuggauacgcccagaccuaaugacggcuccauuaccggcccaugugaaagcgauggggacaagggaucggguggcaucaaagggggauuugugcaucagaggauggcuucuaagauaggccggugguacucccguacaaugucaaaaacuaagcgcauggguauggggcucuauguaaaguacgacggcgaucccuggaccgacagugaggcccuuacacugagcggaguuaugguguccauggaggaaccgggcugguacucuuucggguuugaaauuaaagauaagaaaugcgacgucccuuguaucggaaucgagauggugcacgaugguggcaagacuaccuggcauagcgcugccacagcaauuuauugcuugauggggucaggacagcuacugugggacaccgugacuggcgucgauauggcccucuga

SEQ ID NO: 157828 - RNA, 1401 nt, Artificial Sequence; identical to SEQ ID NO: 156836
  derived and/or modified CDS sequence (opt3) from neuraminidase__InfluenzaB__AGX23604

SEQ ID NO: 157829 - RNA, 1401 nt, Artificial Sequence
  derived and/or modified CDS sequence (opt3) from neuraminidase__InfluenzaB__AGX23615
augcugcccagcaccauccagacacucacucuuuuccugacguccggcgggguguuguuaucucuguacgucucagccagucuaagcuaucuccuguacuccgacauucuucugaaguuuucucaaaccgagauaacaacuccuaucaugccauuggauugcgcuaacgcaucgaauguucaggccgugaacagaucagcggcuaaaggaguaacccuccugcugccggaacccgaguggacauauccuaggcucagcuguccagguaguaccuuccagaaggccuuacugauuucuccccaccgguuuggcgaaacuaaaggaaauuccgcaccucuuaucauucgcgagccauucaucgccugcgggcccacagaauguaagcauuuugcuuugacccacuacgcagcccagccuggcgguuauuacaacgggacgcgagaggaccguaauaaacugagacaucuaauaagcgugaagcucggaaagaucccaacugucgagaacuccauuuuccacauggcugccuggucaggcagugcgugccaugauggcaaagaauggaccuauaucgggguggacggaccggauagcaaugcacugcuuaagauuaaauacggugaggccuacacagacacuuaucacucuuacgcuaagaacauccugaggacccaagaauccgccuguaauugcauaggcggggauuguuauuugaugauuacagacggacccgcaucaggcaucagcgagugccgguuucucaaaauucgcgaggguagaaucaucaaggaaauuuucccuaccgggaggguuaagcacacggaggaauguacuugcggauuugcuaguaacaaaacaauagagugugccugccgggauaauucuuacaccgcgaagcgcccauucgugaaacugaacgucgaaacugacacagccgagauccgauuaaugugcaccgagacguaucuggauacccccagaccuaaugacggcuccauuacaggcccaugugaaagcgauggggacaagggaucggguggcaucaaagggggauuugugcaucagaggauggcaucuaagauaggccggugguacucccguacuaugucaaaaaccaagcgcauggguauggggcucuauguaaaguacgacggcgaucccuggacagacagugaggcucuugcccugagcggaguuaugguguccauggaggaaccgggcugguacucuuucggguuugaaauuaaagauaagaaaugcgacgucccuuguaucggaaucgagauggugcacgaugguggcaagacuaccuggcauagcgcugccacagcaauuuauugcuugauggggucaggacagcuacugugggacaccgugacuggcgucgauauggcccucuga

SEQ ID NO: 157830 - RNA, 1401 nt, Artificial Sequence; identical to SEQ ID NO: 157818
  derived and/or modified CDS sequence (opt3) from neuraminidase__InfluenzaB__AGX23626

SEQ ID NO: 157831 - RNA, 1401 nt, Artificial Sequence; identical to SEQ ID NO: 157195
  derived and/or modified CDS sequence (opt3) from neuraminidase__InfluenzaB__AGX23637

SEQ ID NO: 157832 - RNA, 1401 nt, Artificial Sequence; identical to SEQ ID NO: 156836
  derived and/or modified CDS sequence (opt3) from neuraminidase__InfluenzaB__AGX23659

SEQ ID NO: 157833 - RNA, 1401 nt, Artificial Sequence; identical to SEQ ID NO: 157195
  derived and/or modified CDS sequence (opt3) from neuraminidase__InfluenzaB__AGX23670

SEQ ID NO: 157834 - RNA, 1401 nt, Artificial Sequence; identical to SEQ ID NO: 157195
  derived and/or modified CDS sequence (opt3) from neuraminidase__InfluenzaB__AGX23681

SEQ ID NO: 157835 - RNA, 1401 nt, Artificial Sequence; identical to SEQ ID NO: 157195
  derived and/or modified CDS sequence (opt3) from neuraminidase__InfluenzaB__AGX23692

SEQ ID NO: 157836 - RNA, 1401 nt, Artificial Sequence; identical to SEQ ID NO: 157195
  derived and/or modified CDS sequence (opt3) from neuraminidase__InfluenzaB__AGX23703

SEQ ID NO: 157837 - RNA, 1401 nt, Artificial Sequence
  derived and/or modified CDS sequence (opt3) from neuraminidase__InfluenzaB__AGX23714
augcugcccagcaccauccagacacucacucuuuuccugacguccggcgggguguuguuaucucuguacgucucagccagucuaagcuaucuccuguacuccgacauucuucugaaguuuucucaaaccgagauaacagcuccuaucaugccauuggauugcgcaaacgccucgaauguucaggcggugaacagaucagcugccaaaggaguaacucuccugcugccggaacccgaguggaccuauccuaggcucagcuguccagguaguacauuccagaaggcauuacugauuucuccccaccgguuuggcgaaaccaaaggaaauuccgccccucuuaucauucgcgagccauucaucgcuugcgggcccacugaauguaagcauuuugcauugacacacuacgccgcucagccuggcgguuauuacaacgggacccgagaggaccguaauaaacugagacaucuaauaagcgugaagcucggaaagaucccaacggucgagaacuccauuuuccacauggccgcguggucaggcagugcaugccaugauggcaaagaauggacuuauguggggguugacggaccggauagcaaugcccugcuuaagaucaaauacggugaggcuuacaccgacacauaucacucuuacgaaaagaacauucugaggacucaagaguccgccuguaauugcaucggcggggauuguuauuugaugauaaccgacggacccgcaucaggcauuagcgagugccgguuucucaaaauccgcgaagguagaauuaucaaggagaucuucccuacagggagggugaagcacaccgaagaguguacgugcggauuugcuaguaacaaaacuauugaaugugccugccgggauaauucuuacacagcgaagcgcccauucgucaaacugaacguggagaccgacacugccgagauacgauuaaugugcacagaaaccuaucuggauacgcccagaccuaaugacggcuccaucaccggcccaugugggagcgauggagacaaggguucgggcgggauuaaaggaggcuuuguacaucagaggauggcaucuaagaucggucggugguacucccguacaaugucaaaaacuaagcgcauggggaugggccucuauguuaaguacgacggagaucccuggaccgacagugaggcucuugcccugagcggcgugauggucuccauggaugaaccggggugguacucuuucggauuugagauaaaagacaagaaaugcgaugugccuuguauugguaucgaaauggugcacgacggcgggaagacaacuuggcauagcgcugccaccgcaaucuauugcuugaugggaucaggccagcuacugugggauacagucaccgguguugacauggcccucuga

SEQ ID NO: 157838 - RNA, 1401 nt, Artificial Sequence; identical to SEQ ID NO: 157195
  derived and/or modified CDS sequence (opt3) from neuraminidase__InfluenzaB__AGX23725

SEQ ID NO: 157839 - RNA, 1401 nt, Artificial Sequence; identical to SEQ ID NO: 157818
  derived and/or modified CDS sequence (opt3) from neuraminidase__InfluenzaB__AGX23736

SEQ ID NO: 157840 - RNA, 1401 nt, Artificial Sequence; identical to SEQ ID NO: 157195
  derived and/or modified CDS sequence (opt3) from neuraminidase__InfluenzaB__AGX23747

SEQ ID NO: 157841 - RNA, 1401 nt, Artificial Sequence; identical to SEQ ID NO: 157195
  derived and/or modified CDS sequence (opt3) from neuraminidase__InfluenzaB__AGX23758

SEQ ID NO: 157842 - RNA, 1401 nt, Artificial Sequence; identical to SEQ ID NO: 157818
  derived and/or modified CDS sequence (opt3) from neuraminidase__InfluenzaB__AGX23769

SEQ ID NO: 157843 - RNA, 1401 nt, Artificial Sequence
  derived and/or modified CDS sequence (opt3) from neuraminidase__InfluenzaB__AGX23780
augcugcccagcaccauccagacacucacucuucuguugacguccggcgggguguuacugucucuauacgucucagccagucucagcuaucugcuuuacuccgacauucuguugaaguucucucaaaccgagauaacagcuccuaucaugccacucgauugcgcaaacgccucgaauguucaggcggugaacagaucagcugccaaaggaguaacucugcugcucccggaacccgaguggaccuauccuagguuaagcuguccagguaguacauuucagaaggcacugcuuauuucuccccaccgguucggcgaaaccaaaggaaauuccgccccuuugaucauucgcgagccauuuaucgcuugcgggcccacugaauguaagcauuucgcacugacacacuacgccgcucagccuggcgguuauuacaacgggacccgagaggaccguaauaaacuaagacaucucauaagcgugaagcugggaaagaucccaacggucgagaacuccauuuuucacauggccgcguggucaggcagugcaugccaugauggcaaagaauggacuuauaucgggguggacggaccggauagcaaugcccuucugaagauuaaauacggugaggcuuacaccgacacauaucacucuuacgccaagaacaucuugaggacucaagaauccgcauguaauugcauaggcggggauuguuaucucaugauuaccgacggacccgcuucaggcguuagcgagugccgguuccugaaaauccgcgaggguagaauuaucaaggaaaucuuuccuacagggagggugaagcacaccgaggaauguacgugcggauucgccaguaacaaaacuauugagugugcgugccgggauaauucuuacacagccaagcgcccauuugucaaauuaaacguggaaaccgacacugcagagauacgacugaugugcacagagaccuaucucgauacgcccagaccuaaugacggcuccaucaccggcccaugugaaagcgauggggacaagggaucggguggcauuaaagggggauucguacaucagaggauggcuucuaagaucggccggugguacucccguacaaugucaaaaacuaagcgcauggguauggggcuuuauguuaaguacgacggcgaucccuggaccgacagugaggcccuggcuuugagcggagugauggucuccauggaggaaccgggcugguacucuuuuggguucgaaauaaaagauaagaaaugcgacgugccuuguauuggaaucgagauggugcacgaugguggcaagacaacuuggcauagcgccgcaaccgccaucuauugccuaauggggucaggacagcugcucugggacacagucaccggcguugauauggcucuguga

SEQ ID NO: 157844 - RNA, 1401 nt, Artificial Sequence
  derived and/or modified CDS sequence (opt3) from neuraminidase__InfluenzaB__AGX23791
augcugcccagcaccauccagacacucacucuuuuccugacguccggcgggguguuguuaucucuguacgucucagccagucuaagcuaucuccuguacuccgacauucuucugaaguuuucucaaaccgagauaacagcuccuaucaugccauuggauugcgcaaacgccucgaaugcgcaggcuguuaacagaucagccgcaaaaggagugacucuccugcugccggaacccgaguggaccuauccuaggcucagcuguccagguaguacauuccagaaggccuuacugauuucuccccaccgguuuggcgaaaccaaaggaaauuccgcuccucuuaucauucgcgagccauucaucgcaugcgggcccacugaauguaagcauuuugccuugacacacuacgcugcccagccuggcgguuauuacaacgggacccgagaggaccguaauaaacugagacaucuaauaagcguaaagcucggaaagaucccaacgguggagaacuccauuuuccacauggcggcauggucaggcagugccugccaugauggcaaagaauggacuuauaucggggucgacggaccggauagcaaugcucugcuuaagauuaaauacggugaggccuacaccgacacauaucacucuuacgcaaagaacauccugaggacucaagaauccgcuuguaauugcauaggcggggauuguuauuugaugauuaccgacggacccgccucaggcgugagcgagugccgguuucucaaaauccgcgaggguagaauuaucaaggaaaucuucccuacagggaggguuaagcacaccgaggaauguacgugcggauuugcgaguaacaaaacuauugagugugccugccgggauaauucuuacacagcaaagcgcccauucgugaaacugaacgucgaaaccgacacugcugagauacgauuaaugugcacagagaccuaucuggauacgcccagaccuaaugacggcuccaucaccggcccaugugaaagcgauggggacaagggaucggguggcauuaaagggggauuugugcaucagaggauggccucuaagaucggccggugguacucccguacaaugucaaaaacuaagcgcauggguauggggcucuauguaaaguacgacggcgaucccuggaccgacagugaggcucuugcccugagcggaguuaugguguccauggaggaaccgggcugguacucuuucggguuugaaauaaaagauaagaaaugcgacgucccuuguauuggaaucgagauggugcacgaugguggcaagacaacuuggcauagcgcagccaccgcuaucuauugcuugauggggucaggacagcuacugugggacacagugaccggcgucgauauggcgcucuga

SEQ ID NO: 157845 - RNA, 1401 nt, Artificial Sequence; identical to SEQ ID NO: 157818
  derived and/or modified CDS sequence (opt3) from neuraminidase__InfluenzaB__AGX23802

SEQ ID NO: 157846 - RNA, 1401 nt, Artificial Sequence; identical to SEQ ID NO: 157818
  derived and/or modified CDS sequence (opt3) from neuraminidase__InfluenzaB__AGX23813

SEQ ID NO: 157847 - RNA, 1401 nt, Artificial Sequence; identical to SEQ ID NO: 157818
  derived and/or modified CDS sequence (opt3) from neuraminidase__InfluenzaB__AGX23824

SEQ ID NO: 157848 - RNA, 1401 nt, Artificial Sequence; identical to SEQ ID NO: 157818
  derived and/or modified CDS sequence (opt3) from neuraminidase__InfluenzaB__AGX23846

SEQ ID NO: 157849 - RNA, 1401 nt, Artificial Sequence; identical to SEQ ID NO: 156836
  derived and/or modified CDS sequence (opt3) from neuraminidase__InfluenzaB__AGX23857

SEQ ID NO: 157850 - RNA, 1401 nt, Artificial Sequence; identical to SEQ ID NO: 157818
  derived and/or modified CDS sequence (opt3) from neuraminidase__InfluenzaB__AGX23868

SEQ ID NO: 157851 - RNA, 1401 nt, Artificial Sequence
  derived and/or modified CDS sequence (opt3) from neuraminidase__InfluenzaB__AGX23879
augcugcccagcaccauccagacacucacucuuuuccugacguccggcgggguguuguuaucucuguacgucucagccagucuaagcuaucuccuguacuccgacauucuucugaaguuuucucaaaccgagauaacagcuccuaucaugccauuggauugcgcaaacgccucgaauguucaggcggugaacagaucagcugccaaaggaguaacucuccugcugccggaacccgaguggaccuauccuaggcucagcuguccagguaguacauuccagaaggcauuacugauuucuccccaccgguuuggcgaaaccaaaggaaauuccgccccucuuaucauucgcgagccauucaucgcuugcgggcccacugaauguaagcauuuugcauugacacacuacgccgcucagccuggcgguuauuacaacgggacccgagaggaccguaauaaacugagacaucuaauaagcgugaagcucggaaagaucccaacggucgagacuuccauuuuccacauggccgcguggucaggcagugcaugccaugauggcaaagaauggaccuauaucgggguggacggaccggauagcaacgcccugcuuaagauuaaauacggugaggcuuacacagacacuuaucacucuuacgccaagaauauccugaggacccaagaauccgcauguaacugcauaggcggggauuguuauuugaugauuacagacggacccgcuucaggcguuagcgagugccgguuucucaaaauccgcgaggguagaauuaucaaggaaaucuucccuaccgggagggugaagcacacggaggaauguacuugcggauuugccaguaauaaaacaauugagugugcgugccgggauaacucuuacaccgccaagcgcccauucgucaaacugaauguggaaacugacacagcagagauacgauuaaugugcaccgagacguaucuggauacccccagaccuaacgacggcuccaucacaggcccaugugaaagcgauggggacaagggaucggguggcauuaaagggggauuuguacaucagaggauggcuucuaagaucggccggugguacucccguacuaugucaaaaaccaagcgcauggguauggggcucuauguuaaguacgacggcgaucccuggacagacagugaggcccuugcucugagcggagugauggucuccauggaggaaccgggcugguacucuuucggguuugaaauaaaagauaagaaaugcgacgugccuuguauuggaaucgagauggugcacgaugguggcaagacuaccuggcauagcgccgcaacagccaucuauugcuugauggggucaggacagcuacugugggacaccgucacuggcguugauauggcucucuga

SEQ ID NO: 157852 - RNA, 1401 nt, Artificial Sequence; identical to SEQ ID NO: 157818
  derived and/or modified CDS sequence (opt3) from neuraminidase__InfluenzaB__AGX23890

SEQ ID NO: 157853 - RNA, 1401 nt, Artificial Sequence; identical to SEQ ID NO: 156836
  derived and/or modified CDS sequence (opt3) from neuraminidase__InfluenzaB__AGX23901

SEQ ID NO: 157854 - RNA, 1401 nt, Artificial Sequence
  derived and/or modified CDS sequence (opt3) from neuraminidase__InfluenzaB__AGX23912
augcugcccagcaccauccagacacucacucuuuuccugacguccggcgggguguuguuaucucuguacgucucagccagucuaagcuaucuccuguacuccgacauucuucugaaguuuucucaaaccgagauaacagcuccuaucaugccauuggauugcgcaaacgccucgaauguucaggcggugaacagaucagcugccaaaggaguaacucuccugcugccggaacccgaguggaccuauccuaggcucagcuguccagguaguacauuccagaaggcauuacugauuucuccccaccgguuuggcgaaaccaaaggaaauuccgccccucuuaucauucgcgagccauucaucgcuugcgggcccacugaauguaagcauuuugcauugacacacuacgccgcucagccuggcgguuauuacaacgggacccgagaggaccguaauagacugaggcaucuaauaagcgugaaacucggaaagaucccaacggucgagaacuccauuuuccacauggccgcguggucaggcagugcaugccaugauggcaaggaauggacuuauguggggguugacggaccggauagcaaugcccugcuuaaaaucaaguacggugaggcuuacaccgacacauaucacucuuacgccaaaaacauucugcggacucaagaauccgcauguaauugcaucggcggggauuguuauuugaugauaaccgacggacccgcuucaggcauuagcgagugccgcuuucucaagaucagagaggguaggauuaucaaagaaaucuucccuacagggcgggugaagcacaccgaggaauguacgugcggauuugccaguaacaagacuauugagugugcgugccgcgauaauucuuacacagccaaacgaccauucgucaagcugaacguggaaaccgacacugcagagauaagauuaaugugcacagagaccuaucuggauacgcccaggccuaaugacggcuccaucaccggcccaugugggagcgauggagacaaagguucgggcgggauuaagggaggcuuuguacaucagcggauggcuucuaaaaucggucguugguacucccgcacaaugucaaagacuaaaagaauggggaugggccucuauguuaaguacgacggagaucccuggaccgacagugaagcccuugcucugagcggcgugauggucuccauggaugagccggggugguacucuuucggauuugaaauaaaggacaaaaagugcgaugugccuuguauugguaucgagauggugcacgacggcgggaaaacaacuuggcauagcgccgcaaccgccaucuauugcuugaugggaucaggccagcuacugugggauacagucaccgguguugacauggcucucuga

SEQ ID NO: 157855 - RNA, 1401 nt, Artificial Sequence; identical to SEQ ID NO: 157008
  derived and/or modified CDS sequence (opt3) from neuraminidase__InfluenzaB__AGX23934

SEQ ID NO: 157856 - RNA, 1401 nt, Artificial Sequence
  derived and/or modified CDS sequence (opt3) from neuraminidase__InfluenzaB__AGX23945
augcugcccagcaccauccagacacucacucuuuuccugacguccggcgggguguuguuaucucuguacgucucagccagucuaagcuaucuccuguacuccgacauucuucugaaguuuucucaaaccgagauaacagcuccuaucaugccauuggauugcgcaaacgccucgaauguucaggcggugaacagaucagcugccaaaggaguaacucuccugcugccggaacccgaguggaccuauccuaggcucagcuguccagguaguacauuccagaaggcauuacugauuucuccccaccgguuuggcgaaaccaaaggaaauuccgccccucuuaucauucgcgagccauucaucgcuugcgggcccacugaauguaagcauuuugcauugacacacuacgccgcucagccuggcgguuauuacaacgggacccgagaggaccguaauaaacugagacaucuaauaagcgugaagcucggaaagaucccaacggucgagaacuccauuuuccacauggccgcguggucaggcagugcaugccaugauggcaaagaauggacuuauguggggguugacggaccggauagcaaugcccugcuuaagaucaaauacggugaggcuuacaccgacacauaucacucuuacgccaagaacauucugaggacucaagaauccgcauguaauugcaucggcggggauuguuauuugaugauaaccgacggacccgcuucaggcauuagcgagugccgguuucucaaaauccgcgaggguagaauuaucaaggaaaucuucccuacagggaggauuaagcacaccgaggaauguacgugcggauuugccaguaacaaaacuauagagugugcgugccgggauaauucuuacacagccaagcgcccauucgugaaacugaacgucgaaaccgacacugcagagauccgauuaaugugcacagagaccuaucuggauacgcccagaccuaaugacggcuccauuaccggcccaugugggagcgauggagacaaggguucgggcgggaucaaaggaggcuuugugcaucagaggauggcuucuaagauaggucggugguacucccguacaaugucaaaaacuaagcgcauggggaugggccucuauguaaaguacgacggagaucccuggaccgacagugaagcccuugcucugagcggcguuaugguguccauggaugagccggggugguacucuuucggauuugaaauuaaagacaagaaaugcgaugucccuuguaucgguaucgagauggugcacgacggcgggaagacaacuuggcauagcgccgcaaccgccauuuauugcuugaugggaucaggccagcuacugugggauacagugaccggugucgacauggcucucuga

SEQ ID NO: 157857 - RNA, 1401 nt, Artificial Sequence
  derived and/or modified CDS sequence (opt3) from neuraminidase__InfluenzaB__AGX23956
augcugcccagcaccauccagacacucacucuuuuccugacguccggcgggguguuguuaucucuguacgucucagccagucuaagcuaucuccuguacuccgacauucuucugaaguuuucucaaaccgagauaacagcuccuaucaugccauuggauugcgcaaacgccucgaauguucaggcggugaacagaucagcugccaaaggaguaacucuccugcugccggaacccgaguggaccuauccuaggcucagcuguccagguaguacauuccagaaggcauuacugauuucuccccaccgguuuggcgaaaccaaaggaaauuccgccccucuuaucauucgcgagccauucaucgcuugcgggcccacugaauguaagcauuuugcauugacacacuacgccgcucagccuggcgguuauuacaacgggacccgagaggaccguaauaaacugagacaucuaauaagcgugaagcucggaaagaucccaacggucgagaacuccauuuuccacauggccgcguggucaggcagugcaugccaugauggcaaagaauggacuuauaucgggauugacggaccggauagcaaugcccugcuuaagaucaaauacggugaggcuuacaccgacacauaucacucuuacgccaagaacauacugaggacucaagaauccgcauguaauugcauuggcggggauuguuauuugaugaucaccgacggacccgcuucaggcgugagcgagugccgguuucucaaaauucgcgaggguagaaucaucaaggaaauuuucccuacagggaggguuaagcacaccgaggaauguacgugcggauuugccaguaacaaaacuauagagugugcgugccgggauaauucuuacacagccaagcgcccauucgugaaacugaacgucgaaaccgacacugcagagauccgauuaaugugcacagagaccuaucuggauacgcccagaccuaaugacggcuccauuaccggcccaugugaaagcgauggggacaagggaucggguggcaucaaagggggauuugugcaucagaggauggcuucuaagauaggccggugguacucccguacaaugucaaaaacuaagcgcauggguauggggcucuauguaaaguacgacggcgaucccuggaccgacagugaggcccuugcucugagcggaguuaugguguccauggaggaaccgggcugguacucuuucggguuugaaauuaaagauaagaaaugcgacgucccuuguaucggaaucgagauggugcacgaugguggcaagacaacuuggcauagcgccgcaaccgccauuuauugcuugauggggucaggacagcuacugugggacacagugaccggcgucgauauggcucucuga

SEQ ID NO: 157858 - RNA, 1401 nt, Artificial Sequence; identical to SEQ ID NO: 157195
  derived and/or modified CDS sequence (opt3) from neuraminidase__InfluenzaB__AGX23967

SEQ ID NO: 157859 - RNA, 1401 nt, Artificial Sequence; identical to SEQ ID NO: 157008
  derived and/or modified CDS sequence (opt3) from neuraminidase__InfluenzaB__AGX23978

SEQ ID NO: 157860 - RNA, 1401 nt, Artificial Sequence
  derived and/or modified CDS sequence (opt3) from neuraminidase__InfluenzaB__AGX23989
augcugcccagcaccauccagacacucacucuuuuccugacguccggcgggguguuguuaucucuguacgucucagccagucuaagcuaucuccuguacuccgacauucuucugaaguuuucucaaaccgagauaacagcuccuaucaugccauuggauugcgcaaacgccucgaauguucaggcggugaacagaucagcugccaaaggaguaacucuccugcugccggaacccgaguggaccuauccuaggcucagcuguccagguaguacauuccagaaggcauuacugauuucuccccaccgguuuggcgaaaccaaaggaaauuccgccccucuuaucauucgcgagccauucaucgcuugcgggcccacugaauguaagcauuuugcauugacacacuacgccgcucagccuggcgguuauuacaacgggacccgagaggaccguaauaaacugagacaucuaauaagcgugaagcucggaaagaucccaacggucgagaacuccauuuuccacauggccgcguggucaggcagugcaugccaugauggcaaagaauggacuuauaucgggguggacggaccggauagcaaugcccugcuuaagauuaaauacggugaggcuuacaccgacacauaucacucuuacgccaagaacauccugaggacucaagaauccgcauguaauugcauaggcggggauuguuauuugaugauuaccgacggacccgcuucaggcaucagcgagugccgguuucucaaaauucgcgaggguagaaucaucaaggaaauuuucccuacagggaggguuaagcacaccgaggaauguacgugcggauuugccaguaacaaaacuauagagugugcgugccgggauaaucgcuacacagccaagcgaccauucgugaaacugaacgucgaaaccgacaaggcagagaucagauuaaugugcacugagacauaucuggauacccccaggccuaaugacggcucuauuacgggcccaugugaauccgauggggacaaaggaagcgguggcaucaaagggggauuugugcaucagcggauggcuucgaagauaggccguugguacucucgcaccauguccaagacaaagagaauggguauggggcucuauguaaaauacgacggcgaucccuggacugacucaggagcccuugcucugaguggcguuauggugagcauugaggaaccggggugguacuccuucggauuugagaucaaggauaaaaagugcgacgucccuuguaucgguauugaaauggugcacgauggcgggaaaaccacauggcauucugccgcaacugccaucuauugcuugaugggaagcggccagcuacugugggacaccgugacaggugucgauauggcucucuga

SEQ ID NO: 157861 - RNA, 1401 nt, Artificial Sequence; identical to SEQ ID NO: 157818
  derived and/or modified CDS sequence (opt3) from neuraminidase__InfluenzaB__AGX24000

SEQ ID NO: 157862 - RNA, 1401 nt, Artificial Sequence
  derived and/or modified CDS sequence (opt3) from neuraminidase__InfluenzaB__AGX24011
augcugcccagcaccauccagacacucacucuuuuccugacguccggcgggguguuguuaucucuguacgucucagccagucuaagcuaucuccuguacuccgacauucuucugaaguuuucucaaaccgagauaacagcuccuaucaugccauuggauuaugcaaacgccucgaauguucaggcggugaaccacucagcugccaaaggaguaacucuccugcugccggaacccgaguggaccuacccuagacucagcugcccagguaguacauuccagaaggcauuacugauuucuccccauagguuuggcgaaaccaaaggcaauuccgccccucuuaucauucgggagccauucaucgcuuguggacccacugaaugcaagcacuuugcauugacacauuaugccgcucagccuggcgguuacuauaacgggacccgcgaggaccgaaauaaacugcgucaccuaauaagcgugaagcucggaaagaucccaacggucgagaacuccauuuuccauauggccgcguggucaggcagugcaugucacgauggcaaagaauggacuuacaucgggguggacggaccggauagcaaugcccugcuuaagauuaaauacggugaggcuuauaucgacaccuaccacucuuaugccaagaacauacugagaacacaagaauccgcaugcaauuguauuggcggggauugcuacuugaugaucacugacggacccgcuucaggcauuagcgaguguagguuucucaaaauccgggagggucgcaucauuaaggaaauauucccuaccgggagaguuaagcauacagaggaaugcaccuguggauuugccaguaacaaaacgaucgagugcgcguguagggauaauucuuauacugccaagcggccauucgugaaacugaacgucgaaacagacaccgcagagauucgcuuaaugugcacugagacauaccuggauacgccccgaccuaaugacggcuccaucaccggcccaugcgaaagcgauggggacaagggaucggguggcauaaaagggggauuugugcaccagagaauggcuucuaagauugggaggugguauucccggaccaugucaaaaacaaagcguauggguauggggcucuacguaaaguacgacggcgaucccuggacugacagugaggcccuugcucugagcggaguuaugguguccauggaggaaccgggcugguauucuuucggguuugaaaucaaagauaagaaaugugacgucccuugcaucggaauugagauggugcaugaugguggcaagaccacauggcacagcgccgcaacugccaucuacuguuugauggggucaggacagcuacugugggacaccgugacaggcgucgauauggcucucuga

SEQ ID NO: 157863 - RNA, 1401 nt, Artificial Sequence; identical to SEQ ID NO: 157008
  derived and/or modified CDS sequence (opt3) from neuraminidase__InfluenzaB__AGX24022

SEQ ID NO: 157864 - RNA, 1401 nt, Artificial Sequence
  derived and/or modified CDS sequence (opt3) from neuraminidase__InfluenzaB__AGX24033
augcugcccagcaccauccagacacucacucuuuuccugacguccggcgggguguuguuaucucuguacgucucagccagucuaagcuaucuccuguacuccgacauucuucugaaguuuucucaaaccgagauaacagcucagaucaugccuuuggauugcgcaaacgccucgaauguucaggcggugaacagaucagcugccaaaggaguaacucuccugcugccagaaccggaguggaccuaucccaggcucagcuguccugguaguacauuccagaaggcauuacugauuuccccacaccgguuuggcgaaaccaaaggaaauucugcuccccuuaucauucgcgagccuuucaucgccugcgggccaacugaauguaagcauuuugcauugacacacuacgccgcucaacccggcgguuauuacaacgggacccgagaggaccguaauaaacugagacaucuaauaagcgugaagcucggaaagaucccuacggucgagaacuccauuuuccacauggccgcguggucaggcagugcaugccaugauggcaaagaauggacuuauaucgggguggacggaccagauagcaaugcccugcuuaagauuaaauacggugaggcuuacaccgacacauaucacucuuacgccaagaacauccugaggacucaggaauccgcauguaauugcauaggcggggauuguuauuugaugauuaccgacggaccggcuucaggcaucagcgagugccgguuucucaaaauucgcgaggguagaaucaucaaggaaauuuuccccacagggaggguuaagcacaccgaggaauguacgugcggauuugccaguaacaaaacuauagagugugcgugccgggauaaucgcuacacagccaagcgaccuuucgugaaacugaacgucgaaaccgacaaggcagagaucagauuaaugugcacugagacauaucuggauaccccaaggcccaaugacggcucuauuacgggcccuugugaauccgauggggacaaaggaagcgguggcaucaaagggggauuugugcaucagcggauggcuucgaagauaggccguugguacucucgcaccauguccaagacaaagagaauggguauggggcucuauguaaaauacgacggcgauccauggacugacucaggagcccuugcucugaguggcguuauggugagcauugaggaacccgggugguacuccuucggauuugagaucaaggauaaaaagugcgacgucccguguaucgguauugaaauggugcacgauggcgggaaaaccacauggcauucugccgcaacugccaucuauugcuugaugggaagcggccagcuacugugggacaccgugacaggugucgauauggcucucuga

SEQ ID NO: 157865 - RNA, 1401 nt, Artificial Sequence; identical to SEQ ID NO: 157008
  derived and/or modified CDS sequence (opt3) from neuraminidase__InfluenzaB__AGX24044

SEQ ID NO: 157866 - RNA, 1401 nt, Artificial Sequence
  derived and/or modified CDS sequence (opt3) from neuraminidase__InfluenzaB__AGX24055
augcugcccagcaccauccagacacucacucuuuuccugacguccggcgggguguuguuaucucuguacgucucagccagucuaagcuaucuccuguacuccgacauucuucugaaguuuucucaaaccgagauaacagcuccuaucaugccauuggauugcgcaaacgccucgaauguucaggcggugaacagaucagcuacuaaaggaguaacccuccugcugccggaacucgaguggacauaucccagguuaagcuguccugguaguaccuuccagaaggcccugcuuauuuccccacaccgguuuggcgaaacuaaaggaaauucugcacccuugaucauucgcgagccuuucguggccugcgggccaacagaauguaagcauuuugcucugacccacuacgcagcccagcccggcgguuauuacaacgggacgcgagaggaccguaauaaacuaagacaucucaucagcgucaagcugggaaagauaccuacuguggagaacuccaucuuccacauggcugccuggucaggcagugcgugccaugauggcaaagaauggaccuauauugggguugacggaccaaauagcaacgcacuucugaagaucaaauacggugaggccuacacagauacuuaucacucuuacgcuaagaauauuuugaggacccaagaauccgccuguaacugcaucggcggggacuguuaucucaugauaacagauggaccggcaucaggcgugagcgagugccgguuucugaaaauucgcgaggguagaaucauuaaggaaaucuuccccaccgggagggucaagcacacggaggaauguacuugcggauuugcuaguaauaaaacaaucgagugugccugccgggacaacucuuacaccgcgaagcgcccuuucgugaaauuaaauguagaaacugauacagccgagauucgacugaugugcaccgagacguaucucgacaccccaagacccaacgauggcuccauaacaggcccuugugaaagcgacggggauaagggaucggguggcaucaaagggggauuuguucaucagaggauggcaucuaagauuggccggugguacucccguacuaugucaaaaaccaagcgcauggguauggggcuuuaugugaaguacgacggcgacccauggacagauagugaggcucuggccuugagcggagucaugguguccauggaggaacccggcugguacucuuucggguuugaaaucaaagacaagaaaugcgaugugccguguauaggaauugagaugguccacgacgguggcaagacuaccuggcauagcgcugccacagcaaucuauugccuaauggggucaggacagcugcucugggauaccguuacuggcguggacauggcccuguga

SEQ ID NO: 157867 - RNA, 1401 nt, Artificial Sequence; identical to SEQ ID NO: 156865
  derived and/or modified CDS sequence (opt3) from neuraminidase__InfluenzaB__AGX24066

SEQ ID NO: 157868 - RNA, 1401 nt, Artificial Sequence
  derived and/or modified CDS sequence (opt3) from neuraminidase__InfluenzaB__AGX24077
augcugcccagcaccauccagacacucacucuuuuccugacguccggcgggguguuguuaucucuguacgucucagccagucuaagcuaucuccuguacuccgacauucuucugaaguuuucucaaaccgagauaacagcuccuaucaugccauuggauugcgcaaacgccucgaauguucaggcggugaacagaucagcugccaaaggaguaacucuccugcugccggaacccgaguggaccuauccuaggcucagcuguccagguaguacauuccagaaggcauuacugauuucuccccaccgguuuggcgaaaccaaaggaaauuccgccccucuuaucauucgcgagccauucaucgcuugcgggcccacugaauguaagcauuuugcauugacacacuacgccgcucagccuggcgguuauuacaacgggacccgagaggaccguaauaaacugagacaucuaauaagcgugaagcucggaaagaucccaacggucgagaacuccauuuuccacauggccgcguggucaggcagugcaugccaugauggcaaagaauggacuuauaucgggguggacggaccggauagcaaugcccugcuuaagauuaaauacggugaggcuuacaccgacacauaucacucuuacgccaagaacauccugaggacucaagaauccgcauguaauugcauaggcgggaacuguuauuugaugauuaccgauggacccgcuucaggcaucagcgagugccgguuucucaaaauucgcgaggguagaaucaucaaggaaauuuucccuacagggaggguuaagcacaccgaggaauguacgugcggauuugccaguaauaaaacuauagagugugcgugccgggacaaccgcuacacagccaagcgaccauucgugaaacugaaugucgaaaccgauaaggcagagaucagauuaaugugcacugagacauaucuggacacccccaggccuaacgauggcucuauuacgggcccaugugaauccgacggggauaaaggaagcgguggcaucaaagggggauuugugcaucagcggauggcuucgaagauaggccguugguacucucgcaccauguccaagacaaagagaauggguauggggcucuauguaaaauacgacggcgaccccugggccgauucaggagcucuugcccugaguggcguuauggugagcauugaggaaccggggugguacuccuucggauuugagaucaaggacaaaaagugcgaugucccuuguaucgguauugaaauggugcacgacggcgggaaaacuaccuggcauucugcagccacagcuaucuauugcuugaugggaagcggccagcuacugugggauacugugaccggugucgacauggcgcucuga

SEQ ID NO: 157869 - RNA, 1401 nt, Artificial Sequence
  derived and/or modified CDS sequence (opt3) from neuraminidase__InfluenzaB__AGX24088
augcugcccagcaccauccagacacucacucuuuucauuacguccggcggggugcuguugucuuuauacgucucagccagucugagcuaucuacucuacuccgacauacugcuuaaguuuucucaaaccgagaucacagcuccuauuaugccacuggauugcgcaaacgccucgaauguucaggcggugaacagaucagcugccaaaggaguaacuuugcuccugccggaacccgaguggaccuauccuaggcugagcuguccagguaguacauuccagaaggcacucuuaaucucuccccaccgguuuggcgaaaccaaaggaaauuccgccccucugauuauccgcgagccauucauagcuugcgggcccacugaauguaagcauuuugcacuuacacacuacgccgcucagccuggcgguuauuacaacgggacccgagaggaccguaauaaauugagacaucugaucagcgugaagcuaggaaagauuccaacggucgagaacuccaucuuccacauggccgcguggucaggcagugcaugccaugauggcaaagaauggacuuauguggggguugacggaccggauagcgacgcccuccugaagauuaaauacggugaggcuuacaccgauacauaucacucuuacgccaagaauauccuuaggacucaagaauccgcauguaacugcauaggcggggacuguuaucugaugauuaccgauggacccgcuucaggcaucagcgagugccgguuuuugaaaauucgcgaggguagaaucaucaaggaaauuuucccuacagggagggugaagcacaccgaggaauguacgugcggauuugccaguaauaaaacuauagagugugcgugccgggacaacucuuacacagccaagcgcccauucgucaaacucaauguggaaaccgauacugcagagauccgacugaugugcacagagaccuauuuagacacgcccagaccuaacgauggcuccauuaccggcccaugugggagcgacggagacaaggguucgggcgggaucaaaggaggcuuuguacaucagaggauggcuucuaagauaggucggugguacucccguacaaugucaaaaacuaagcgcauggggaugggccuguauguuaaguacgauggagaccccuggaccgauagugaagcccucgcucuuagcggcgugauggucuccauggacgagccggggugguacucuuucggauuugaaauuaaagauaagaaaugcgacgugccuuguaucgguaucgagauggugcacgauggcgggaagacaacuuggcauagcgccgcaaccgccauuuauugccugaugggaucaggccaguugcuaugggacacagucaccgguguugauauggcucuguga

SEQ ID NO: 157870 - RNA, 1401 nt, Artificial Sequence; identical to SEQ ID NO: 157008
  derived and/or modified CDS sequence (opt3) from neuraminidase__InfluenzaB__AGX24099

SEQ ID NO: 157871 - RNA, 1401 nt, Artificial Sequence
  derived and/or modified CDS sequence (opt3) from neuraminidase__InfluenzaB__AGX24110
augcugcccagcaccauccagacacucacucuuuuccugacguccggcgggguguuguuaucucuguacgucucagccagucuaagcuaucuccuguacuccgacauucuucugaaguuuucucaaaccgagauaacagcuccuaucaugccauuggauugcgcaaacgccucgaauguucaggcggugaacagaucagcugccaaaggaguaacucuccugcugccggaacccgaguggaccuauccuaggcucagcuguccagguaguacauuccagaaggcauuacugauuucuccccaccgguuuggcgaaaccaaaggaaauuccgccccucuuaucauucgcgagccauucaucgcuugcgggcccacugaauguaagcauuuugcauugacacacuacgccgcucagccuggcgguuauuacaacgggacccgagaggaccguaauaaacugagacaucuaauaagcgugaagcucggaaagaucccaacggucgagaacuccauuuuccacauggccgcguggucaggcagugcaugccaugauggcaaagaauggacuuauguggggguugacggaccggauagcaaugcccugcuuaagaucaaauacggugaggcuuacaccgacacauaucacucuuacgccaagaacauucugaggacucaagaauccgcauguaauugcaucggcggggauuguuauuugaugauaaccgacggacccgcuucaggcauuagcgagugccgguuucucaaaauccgcgaggguagaauuaucaaggaaaucuucccuacagggagggugaagcacaccgaggaauguacgugcggauuugccaguaacaaaacuauugaguguacaugccgggauaauucuuacaccgcgaagcgcccauucgucaaacugaacguggaaacugacacagccgagauacgauuaaugugcaccgagacguaucuggauacccccagaccuaaugacggcuccaucacaggcccaugugggagcgauggagacaaggguucgggcgggauuaaaggaggcuuuguacaucagaggauggcaucuaagaucggucggugguacucccguacuaugucaaaaaccaagcgcauggggaugggccucuauguuaaguacgacggagaucccuggacagacagugaagcucuugcccugagcggcgugauggucuccauggaugagccggggugguacucuuucggauuugaaauaaaagacaagaaaugcgaugugccuuguauugguaucgagauggugcacgacggcgggaagacuaccuggcauagcgcugccacagcaaucuauugcuugaugggaucaggccagcuacugugggauaccgucacugguguugacauggcccucuga

SEQ ID NO: 157872 - RNA, 1401 nt, Artificial Sequence
  derived and/or modified CDS sequence (opt3) from neuraminidase__InfluenzaB__AGX24121
augcugcccagcaccauccagacacucacucuuuuccugacguccggcgggguguuguuaucucuguacgucucagccagucuaagcuaucuccuguacuccgacauucuucugaaguuuucucaaaccgagauaacagcuccuaucaugccauuggauuaugcaaacgccucgaauguucaggcggugaaccacucagcugccaaaggaguaacucuccugcugccggaacccgaguggaccuacccuagacucagcugcccagguaguacauuccagaaggcauuacugauuucuccccauagguuuggcgaaaccaaaggcaauuccgccccucuuaucauucgggagccauucaucgcuuguggacccacugaaugcaagcacuuugcauugacacauuaugccgcuaaaccuggcgguuacuauaacgggacccgcgaggaccgaaauaagcugcgucaccuaauaagcgugaagcucggaaaaaucccaacggucgagaacuccauuuuccauauggccgcguggucaggcagugcaugucacgauggcaaggaauggacuuacaucgggguggacggaccggauagcaaugcccugcuuaaaauuaaguacggugaggcuuauaccgacacauaccacucuuaugccaaaaacauccugagaacucaggaauccgcaugcaauuguauaggcggggauugcuacuugaugauuaccgacggacccgcuucaggcaucagcgaguguagguuucucaagauucgggagggucgcaucaucaaggaaauuuucccuacagggagaguuaaacauaccgaggaaugcacguguggauuugccaguaacaagacuauagagugcgcguguagggauaauucuuauacagccaaacggccauucgugaagcugaacgucgaaaccgacacugcagagauccgcuuaaugugcacagagaccuaccuggauacgccccgaccuaaugacggcuccauuaccggcccaugcgaaagcgauggggacaaaggaucggguggcaucaaagggggauuugugcaccaaagaauggcuucuaagauagggaggugguauucccggacaaugucaaagacuaagcguauggguauggggcucuacguaaaauacgacggcgaucccuggaccgacagugaggcccuugcucugagcggaguuaugguguccauggaggaaccgggcugguauucuuucggguuugaaauuaaggauaaaaagugugacgucccuugcaucggaaucgagauggugcaugaugguggcaaaacaacuuggcacagcgccgcaaccgccauuuacuguuugauggggucaggacagcuacugugggacacagugaccggcgucgauauggcucucuga

SEQ ID NO: 157873 - RNA, 1401 nt, Artificial Sequence
  derived and/or modified CDS sequence (opt3) from neuraminidase__InfluenzaB__AGX24132
augcugcccagcaccauccagacacucacucuuuuccugacguccggcgggguguuguuaucucuguacgucucagccagucuaagcuaucuccuguacuccgacauucuucugaaguuuucuagaaccgagauaacagcuccuaucaugccauuggauugcgcaaacgccucgaauguucaagcggugaacaggucagcuacuaaaggaguaacccucccgcugcccgaaccugaguggacauauccacggcugagcugucccgguaguaccuuccagaaggcccucuuaauuuccccucaccgcuuuggcgaaacuaaaggaaauucugcaccacugaucauucgagagcccuucaucgccugcgggccuaaggaauguaaacauuuugcucuuacacacuacgcagcccagccaggcgguuauuacaacgggacccgugaggacagaaauaaguugaggcaucugauaagcgugaagcuaggaaaaaucccgacggucgagaacuccauuuuccacauggcugccuggucaggcagugcgugccaugauggccgggaauggacuuauaucgggguggacggacccgauagcaaugcacuccugaagauuaaauacggugaggccuacaccgacacauaucacucuuacgcuaagaacauccuucgcacucaggaauccgccuguaauugcauaggcggggauuguuaucugaugauuaccgacggaccugcauugggcaucucagagugcagauuucucaaaauuagggagggucggaucaucaaggaaauuuucccaacagggcgcguuaagcacaccgaggaauguacgugcggauuugcuagcaacaaaacuauagagugugccugccgagauaauaguuacacagcgaagagacccuucgugaaacugaacgucgaaaccgacacugccgagaucagguuaaugugcacagagaccuaucuggauacgccucggccaaaugacggcucuauuaccggccccugugaauccaacggggauaagggaagcgguggcaucaaagggggauuugugcaucaacguauggcaucgaagauaggccgcugguacucuagaacaauguccaaaacuaagaggauggguauggggcucuauguaaaguacgacggcgacccguggaccgauucagaggcucuugcccugaguggaguuauggugagcauggaggaaccuggcugguacuccuucggguuugaaauuaaagacaagaaaugcgauguccccuguaucggaaucgagauggugcacgacgguggcaagacaacuuggcauucugcugccaccgcaauuuauugcuugauggggagcggacagcuacugugggauacagugaccggcgucaauaugacucucuga

SEQ ID NO: 157874 - RNA, 1401 nt, Artificial Sequence
  derived and/or modified CDS sequence (opt3) from neuraminidase__InfluenzaB__AGX24143
augcugcccagcaccauccagacacucacucuuuuccugacguccggcgggguguuguuaucucuguacgucucagccagucuaagcuaucuccuguacuccgacauucuucugaaguuuucucaaaccgagauaacagcuccuaucaugccauuggauugcgcaaacgccucgaauguucaggcggugaacagaucagcugccaaaggaguaacucuccugcugccggaacccgaguggaccuauccuaggcucagcuguccagguaguacauuccagaaggcauuacugauuucuccccaccgguuuggcgaaaccaaaggaaauuccgccccucuuaucauucgcgagccauucaucgcuugcgggcccacugaauguaagcauuuugcauugacacacuacgccgcucagccuggcgguuauuacaacgggacccgagaggaccguaauaaacugagacaucuaauaagcgugaagcucggaaagaucccaacggucgagaacuccauuuuccacauggccgcguggucaggcagugcaugccaugauggcaaagaauggacuuauaucgggguggacggaccggaugguaaugcccugcuuaagauuaaauacggcgaggcuuacaccgacacauaucacagcuacgccaagaacauccugaggacucaagaaucugcauguaauugcauagggggagauuguuauuugaugauuaccgacggccccgcuuccgguaucucagagugccgguuucucaaaauucgcgaggggagaaucaucaaggaaauuuucccuacaggaaggguuaagcacaccgaggaauguacgugcggcuuugccagcaacaaaacuauagagugugcgugccgggauaauaguuacacagccaagcgcccauucgugaaacugaacgucgaaaccgacacugcagagauccgauuaaugugcacagagaccuaucuggauacgcccagaccuaaugacggcucuauuaccgggccaugugaauccgauggagacaaggguagcggcgggaucaaaggaggcuuugugcaucagaggauggcuucgaagauaggucggugguacucucguacaauguccaaaacuaagcgcauggggaugggccucuauguaaaguacgacggagaucccuggaccgacucagaggcccuugcucugaguggcguuauggugagcauggaggaaccggggugguacuccuucggauuugaaauuaaagauaagaaaugcgacgucccuuguaucgguaucgagauggugcacgauggcgggaagacaacuuggcauucugccgcaaccgccauuuauugcuugaugggaagcggccagcuacugugggacacagugaccggugucgauauggcucucuga

SEQ ID NO: 157875 - RNA, 1401 nt, Artificial Sequence; identical to SEQ ID NO: 157008
  derived and/or modified CDS sequence (opt3) from neuraminidase__InfluenzaB__AGX24154

SEQ ID NO: 157876 - RNA, 1401 nt, Artificial Sequence
  derived and/or modified CDS sequence (opt3) from neuraminidase__InfluenzaB__AGX24165
augcugcccagcaccauccagacacucacucuuuuccugacguccggcgggguguuguuaucucuguacgucucagccagucuaagcuaucuccuguacuccgacauucuucugaaguuuucucaaaccgagauaacagcuccuaucaugccauuggauuaugcaaacgccucgaauguucaggcggugaaccacucagcugccaaaggaguaacucuccugcugccggaacccgaguggaccuacccuagacucagcugcccagguaguacauuccagaaggcauuacugauuucuccccauagguuuggcgaaaccaaaggcaauuccgccccucuuaucauucgggagccauucaucgcuuguggacccacugaaugcaagcacuuugcauugacacauuaugccgcucagccuggcgguuacuauaacgggacccgcgaggaccgaaauaaacugcgucaccuaauaagcgugaagcucggaaagaucccaacggucgagaacuccauuuuccauauggccgcguggucaggcagugcaugucacgauggcaaagaauggacuuacaucgggguggacggaccggauagcaaugcccugcuuaagauuaaauacggugaggcuuauaccgacacauaccacucuuaugccaagaacauccugagaacucaagaauccgcaugcaauuguauaggcggggauugcuacuugaugauuaccgacggacccgcuucaggcaucagcgaguguagguuucucaaaauucgggagggucgcaucaucaaggaaauuuucccuacagggagaguuaagcauaccgaggaaugcacguguggauuugccaguaacaaaacuauagagugcgcguguagggauaauucuuauacagccaagcggccauucgugaaacugaacgucgaaaccgacacugcagagauccgcuuaaugugcacagagaccuaccuggauacgccccgaccuaaugacggcuccauuaccggcccaugcgaaagcgauggggacaagggaucggguggcaucaaagggggauuugugcaccagagaauggcuucuaagauagggaggugguauucccggacaaugucaaaaacuaagcguauggguauggggcucuacguaaaguacgacggcgaucccuggaccgacagugaggcccuugcucugaacggaguuauggugagcauggaggaaccgggcugguauuccuucggguuugaaauuaaagauaagaaaugugacgucccuugcaucggaaucgagauggugcaugaugguggcaagacaacuuggcacucugccgcaaccgccauuuacuguuugauggggagcggacagcuacugugggacacagugaccggcgucgauauggcucucuga

SEQ ID NO: 157877 - RNA, 1401 nt, Artificial Sequence; identical to SEQ ID NO: 156865
  derived and/or modified CDS sequence (opt3) from neuraminidase__InfluenzaB__AGX24176

SEQ ID NO: 157878 - RNA, 1401 nt, Artificial Sequence; identical to SEQ ID NO: 156865
  derived and/or modified CDS sequence (opt3) from neuraminidase__InfluenzaB__AGX24187

SEQ ID NO: 157879 - RNA, 1401 nt, Artificial Sequence; identical to SEQ ID NO: 156865
  derived and/or modified CDS sequence (opt3) from neuraminidase__InfluenzaB__AGX24198

SEQ ID NO: 157880 - RNA, 1401 nt, Artificial Sequence; identical to SEQ ID NO: 157195
  derived and/or modified CDS sequence (opt3) from neuraminidase__InfluenzaB__AGX24231

SEQ ID NO: 157881 - RNA, 1401 nt, Artificial Sequence; identical to SEQ ID NO: 156865
  derived and/or modified CDS sequence (opt3) from neuraminidase__InfluenzaB__AGX24242

SEQ ID NO: 157882 - RNA, 1401 nt, Artificial Sequence
  derived and/or modified CDS sequence (opt3) from neuraminidase__InfluenzaB__AGX24275
augcugcccagcaccauccagacacucacucuuuuccugacguccggcgggguguuguuaucucuguacgucucagccagucuaagcuaucuccuguacuccgacauucuucugaaguuuucucaaaccgagauaacagcuccuaucaugccauuggauugcgcaaacgccucgaauguucaggcggugaacagaucagcugccaaaggaguaacucuccugcugccggaacccgaguggaccuauccuaggcucagcuguccagguaguacauuccagaaggcauuacugauuucuccccaccgguuuggcgaaaccaaaggaaauuccgccccucuuaucauucgcgagccauucaucgcuugcgggcccacugaauguaagcauuuugcauugacacacuacgccgcucagccuggcgguuauuacaacgggacccgagaggaccguaauaaacugagacaucuaauaagcgugaagcucggaaagaucccaacggucgagaacuccauuuuccacauggccgcguggucaggcagugcaugccaugauggcaaagaauggacuuauaucgggguggacggaccggauagcaaugcccugcuuaagauuaaauacggugaggcuuacaccgacacauaucacucuuacgccaagaacauccugaggacucaagaauccgcauguaauugcauaggcggggauuguuauuugaugauuaccgacggacccgcuucaggcaucagcgagugccgguuucucaaaauucgcgaggguagaaucaucaaggaaauuuucccuacagggaggguuaagcacaccgaggaauguacgugcggauuugccaguaaccggacuauagagugugcgugccgcgauaauucuuacacagccaaacgaccauucgugaagcugaacgucgaaaccgacacugcagagaucagauuaaugugcacagagaccuaucuggauacgcccaggccuaaugacggcuccauuaccggcccaugugaaagcgauggggacaaaggaucggguggcaucaaagggggauuugugcaucagcggauggcuucuaagauaggccguugguacucccgcacaaugucaaagacuagaaggauggguauggggcucuauguaaaauacgacggcgaucccuggaccgacagugaggcccuugcucugagcggaguuaugguguccauggaggaaccgggcugguacucuuucggguuugaaauuaaggauaagaaaugcgacgucccuuguaucggaaucgagauggugcacgaugguggcaagacaacuuggcauagcgccgcaaccgccauuuauugcuugauggggucaggacagcuacugugggacacagugaccggcgucgauauggcucucuga

SEQ ID NO: 157883 - RNA, 1401 nt, Artificial Sequence; identical to SEQ ID NO: 157460
  derived and/or modified CDS sequence (opt3) from neuraminidase__InfluenzaB__AGX24286

SEQ ID NO: 157884 - RNA, 1401 nt, Artificial Sequence
  derived and/or modified CDS sequence (opt3) from neuraminidase__InfluenzaB__AGX24297
augcugcccagcaccauccagacacucacucuuuuccugacguccggcgggguguuguuaucucuguacgucucagccagucuaagcuaucuccuguacuccgacauucuucugaaguuuucucaaaccgagauaacagcuccuaucaugccauuggauugcgcaaacgccucgaauguucaggcggugaacagaucagcugccaaaggaguaacucuccugcugccggaacccgaguggaccuauccuaggcucagcuguccagguaguacauuccagaaggcauuacugauuucuccccaccgguuuggcgaaacccgcggaaauuccgccccucuuaucauucgagagccauucaucgcuugcgggcccacugaauguaaacauuuugcauugacacacuacgccgcucagccuggcgguuauuacaacgggacccgugaggacagaaauaagcugaggcaucuaauaagcgugaaacucggaaagaucccaacggucgagaacuccauuuuccacauggccgcguggucaggcagugcaugccaugauggcaaggaauggacuuauaucgggguggacggaccggauagcaaugcccugcuuaaaauuaaguacggugaggcuuacaccgacacauaucacucuuacgccaaaaacauccugcggacucaagaauccgcauguaauugcauaggcggggauuguuauuugaugauuaccgacggacccgcuucaggcaucagcgagugccgcuuucucaagauuagagaggguaggaucaucaaagaaauuuucccuacagggcggguuaagcacaccgaggaauguacgugcggauuugccaguaacaagacuauagagugugcgugccgcgauaauucuuacacagccaaacgaccauucgugaagcugaacgucgaaaccgacacugcagagaucagauuaaugugcacagagaccuaucuggauacgcccaggccuaaugacggcuccauuaccggcccaugugaaagcgauggggacaaaggaucggguggcaucaaagggggauuugugcaucagcggauggcuucuaagauaggccguugguacucccgcacaaugucaaagacuaaaagaauggguauggggcucuauguaaaguacgacggcgaucccuggaccgacagugaggcccuugcucugagcggaguuaugguguccauggaggaaccgggcugguacucuuucggguuugaaauuaaggauaaaaagugcgacgucccuuguaucggaaucgagauggugcacgaugguggcaaaacaacuuggcauagcgccgcaaccgccauuuauugcuugauggggucaggacagcuacugugggacacagugaccggcgucgauauggcucucuga

SEQ ID NO: 157885 - RNA, 1401 nt, Artificial Sequence; identical to SEQ ID NO: 157460
  derived and/or modified CDS sequence (opt3) from neuraminidase__InfluenzaB__AGX24319

SEQ ID NO: 157886 - RNA, 1401 nt, Artificial Sequence
  derived and/or modified CDS sequence (opt3) from neuraminidase__InfluenzaB__AGX24330
augcugcccagcaccauccagacacucacucuuuuccugacguccggcgggguguuguuaucucuguacgucucagccagucuaagcuaucuccuguacuccgacauucuucugaaguuuucucaaaccgagauaacagcuccuaucaugccauuggauuaugcaaacgccucgaauguucaggcggugaaccacucagcugccaaaggaguaacucuccugcugccggaacccgaguggaccuacccuagacucagcugcccagguaguacauuccagaaggcauuacugauuucuccccauagguuuggcgaaaccaaaggcaauuccgccccucuuaucauucgggagccauucaucgcuuguggacccacugaaugcaagcacuuugcauugacacauuaugccgcucagccuggcgguuacuauaacgggacccgcgaggaccgaaauaaacugcgucaccuaauaagcgugaagcucggaaagaucccaacggucgagaacuccauuuuccauauggccgcguggucaggcagugcaugucacgauggcaaagaauggacuuacaucgggguggacggaccggauagcaaugcccugcuuaagauuaaauacggugaggcuuauaccgacacauaccacucuuaugccaagaacauccugagaacucaagaauccgcaugcaauuguauaggcggggauugcuacuugaugauuaccgacggacccgcuucaggcaucagcgaguguagguuucucaaaauucgggagggucgcaucaucaaggaaauuuucccuacagggagaguuaagcauaccgaggaaugcacguguggauuugccaguaacaaaacuauagagugcacauguagggauaauucuuauaccgcgaagcggccauucgugaaacugaacgucgaaacugacacagccgagauccgcuuaaugugcaccgagacguaccuggauacaccccgaccuaaugacggcuccauuaccggcccaugcgaaagcgauggggacaagggaucggguggcaucaaagggggauuugugcaccagagaauggcaucuaagauagggaggugguauucccggacuaugucaaaaaccaagcguauggguauggggcucuacguaaaguacgacggcgaucccuggacagacagugaggcucuugcccugagcggaguuaugauuuccauggaggaaccgggcugguauucuuucggguuugaaaucaaagauaagaaaugugacgugccuugcaucggaauugagaugguccaugaugguggcaagacuaccugguacagcgcugccacagcaaucuauuguuugauggggucaggacagcuacugugggacaccgugacuggcguggauauggcccucuga

SEQ ID NO: 157887 - RNA, 1401 nt, Artificial Sequence
  derived and/or modified CDS sequence (opt3) from neuraminidase__InfluenzaB__AGX24341
augcugcccagcaccauccagacacucacucuuuuccugacguccggcgggguguuguuaucucuguacgucucagccagucuaagcuaucuccuguacuccgacauucuucugaaguuuucuagaaccgagauaacagcuccuaucaugccauuggauugcgcaaacgccucgaauguucaagcggugaacaggucagcuacuaaaggaguaacccuccugcugccggaacccgaguggacauauccucggcucagcuguccagguaguaccuuccagaaggccuuacugauuucuccccaccgcuuuggcgaaacuaaaggaaauuccgcaccucuuaucauucgagagccauucaucgccugcgggcccaaggaauguaaacauuuugcuuugacacacuacgcagcccagccuggcgguuauuacaacgggacccgugaggacagaaauaagcugaggcaucuaauaagcgugaagcucggaaaaaucccaacggucgagaacuccauuuuccacauggcugccuggucaggcagugcgugccaugauggccgggaauggacuuauaucgggguggacggaccggauagcaaugcacugcuuaagauuaaauacggugaggccuacaccgacacauaucacucuuacgcuaagaacauccugcgcacucaggaauccgccuguaauugcauaggcggggauuguuauuugaugauuaccgacggacccgcaucaggcaucagcgagugcagauuucucaaaauuagggagggucggaucaucaaggaaauuuucccuacagggcgcguuaagcacaccgaggaauguacgugcggauuugcuaguaacaaaacuauagagugugccugccgagauaauucuuacacagcgaagagaccauucgugaaacugaacgucgaaaccgacacugccgagaucagguuaaugugcacagagaccuaucuggauacgccccggccuaaugacggcuccauuaccggcccaugugaaagcaacggggauaagggaucggguggcaucaaagggggauuugugcaucaacguauggcaucuaagauaggccgcugguacuccagaacaaugucaaaaacuaagaggauggguauggggcucuauguaaaguacgacggcgaccccuggaccgauagugaggcucuuacacugagcggaguuaugguguccauggaggaaccgggcugguacucuuucggguuugaaauuaaagacaagaaaugcgaugucccuuguaucggaaucgagauggugcacgacgguggcaagacuaccuggcauagcgccgcuacagccauuuauugcuugauggggucaggacagcuacugugggauaccgugacuggcgucaauaugacgcucuga

SEQ ID NO: 157888 - RNA, 1401 nt, Artificial Sequence
  derived and/or modified CDS sequence (opt3) from neuraminidase__InfluenzaB__AGX24352
augcugcccagcaccauccagacacucacucuuuuccugacguccggcgggguguuguuaucucuguacgucucagccagucuaagcuaucuccuguacuccgacauucuucugaaguuuucuagaaccgagauaacagcuccuaucaugccauuggauugcgcaaacgccucgaauguucaagcggugaacaggucagcuacuaaaggaguaacccuccugcugccggaacccgaguggacauauccucggcucagcuguccagguaguaccuuccagaaggccuuacugauuucuccccaccgcuuuggcgaaacuaaaggaaauuccgcaccucuuaucauucgagagccauucaucgccugcgggcccaaggaauguaaacauuuugcuuugacacacuacgcagcccagccuggcgguuauuacaacgggacccgugaggacagaaauaagcugaggcaucuaauaagcgugaagcucggaaaaaucccaacggucgagaacuccauuuuccacauggcugccuggucaggcagugcgugccaugauggccgggaauggacuuauaucgggguggacggaccggauaauaacgcacugcuuaagauuaaauacggugaggccuacaccgacacauaucacagcuacgcuaagaauauccugcgcacucaggaaucugccuguaacugcauaggcggggauuguuauuugaugauuaccgacggacccgcauccggcaucucagagugcagauuucucaaaauuagggagggucggaucaucaaggaaauuuucccuacagggcgcguuaagcacaccgaggaauguacgugcggauuugcuagcaauaaaacuauagagugugccugccgagauaacaguuacacagcgaagagaccauucgugaaacugaaugucgaaaccgacacugccgagaucagguuaaugugcacagagaccuaucuggauacgccccggccuaacgacggcucuauuaccggcccaugugaauccaauggggauaagggaagcgguggcaucaaagggggauuugugcaucaacguauggcaucgaagauaggccgcugguacucuagaacaauguccaaaacuaagaggauggguauggggcucuauguaaaguacgacggcgaccccuggaccgauucagaggcucuugcccugaguggaguuauggugagcauggaggaaccgggcugguacuccuucggguuugaaauuaaagacaagaaaugcgaugucccuuguaucggaaucgagauggugcacgacgguggcaagacaacuuggcauucugcugccaccgcaauuuauugcuugauggggagcggacagcuacugugggauacagugaccggcgucaacaugacucucuga

SEQ ID NO: 157889 - RNA, 1401 nt, Artificial Sequence; identical to SEQ ID NO: 157884
  derived and/or modified CDS sequence (opt3) from neuraminidase__InfluenzaB__AGX24363

SEQ ID NO: 157890 - RNA, 1401 nt, Artificial Sequence; identical to SEQ ID NO: 157888
  derived and/or modified CDS sequence (opt3) from neuraminidase__InfluenzaB__AGX24374

SEQ ID NO: 157891 - RNA, 1401 nt, Artificial Sequence
  derived and/or modified CDS sequence (opt3) from neuraminidase__InfluenzaB__AGX24385
augcugcccagcaccauccagacacucacucuuuuccugacguccggcgggguguuguuaucucuguacgucucagccagucuaagcuaucuccuguacuccgacauucuucugaaguuuucuagaaccgagauaacagcuccuacuaugccauuggauugcgcaaacgccucgaauguucaagcggugaacaggucagcuaccaaaggaguaacacuccugcugccggaacccgaguggaccuauccucggcucagcuguccagguaguacuuuccagaaggccuuacugaucucuccccaccgcuuuggcgaaacaaaaggaaauuccgcaccucuuauuauccgagagccauucauugccugcgggcccaaggaauguaaacauuuugcuuugacccacuacgcagcccagccuggcgguuauuacaacgggacgcgugaggacagaaauaagcugaggcaucuaaucagcgugaagcucggaaaaauaccaacugucgagaacuccaucuuccacauggcugccuggucaggcagugcgugccaugauggccgggaauggaccuauauugggguggacggaccggauagcaaugcacugcuuaagaucaaauacggugaggccuacacagacacuuaucacucuuacgcuaagaacauucugcgcacccaggaauccgccuguaauugcaucggcggggauuguuauuugaugauaacagacggacccgcaucaggcauuagcgagugcagauuucucaaaaucagggagggucggauuaucaaggaaaucuucccuaccgggcgcguuaagcacacggaggaauguacuugcggauuugcuaguaacaaaacaauugagugugccugccgagauaauucuuacaccgcgaagagaccauucgugaaacugaacgucgaaacugacacagccgagauaagguuaaugugcaccgagacguaucuggauacaccccggccuaaugacggcuccaucaccggcccaugugaaagcaacggggauaagggaucggguggcauuaaagggggauuugugcaucaacguauggcaucuaagaucggccgcugguacuccagaacuaugucaaaaaccaagaggauggguauggggcucuauguaaaguacgacggcgaccccuggacagauagugaggcucuugcccugagcggaguuaugguguccauggaggaaccgggcugguacucuuucggguuugaaauaaaagacaagaaaugcgaugucccuuguauuggaaucgagauggugcacgacgguggcaagacuaccuggcauagcgcugccacagcaaucuauugcuugauggggucaggacagcuacugugggauaccgugacuggcgucaauaugacgcucuga

SEQ ID NO: 157892 - RNA, 1401 nt, Artificial Sequence
  derived and/or modified CDS sequence (opt3) from neuraminidase__InfluenzaB__AGX24396
augcugcccagcaccauccagacacucacucuuuuccugacguccggcgggguguuguuaucucuguacgucucagccagucuaagcuaucuccuguacuccgacauucuucugaaguuuucucaaaccgagauaacagcuccuaucaugccauuggauugcgcaaacgccucgaauguucaggcggugaacagaucagcugccaaaggaguaacucuccugcugccggaacccgaguggaccuauccuaggcucagcuguccagguaguacauuccagaaggcauuacugauuucuccccaccgguuuggcgaaaccaaaggaaauuccgccccucuuaucauucgcgagccauucaucgcuugcgggcccacugaauguaagcauuuugcauugacacacuacgccgcucagccuggcgguuauuacaacgggacccgagaggaccguaauaaacugagacaucuaauaagcgugaagcucggaaagaucccaacggucgagaacuccauuuuccacauggccgcguggucaggcagugcaugccaugauggcaaagaauggacuuauaucgggguggacggaccggauagcaaugcccugcuuaagauuaaauacggugaggcuuacaccgacacauaucacucuuacgccaagaacauccugaggacucaagaauccgcauguaauugcauaggcggggauuguuauuugaugauuaccgacggacccgcuucaggcaucagcgagugccgguuucucaaaauucgcgaggguagaaucaucaaggaaauuuucccuacagggaggguuaagcacaccgaggaauguacgugcggauuugccaguaacaaaacuauagagugugcgugccgggauaaucgcuacacagccaagcgaccauucgugaaacugaacgucgaaaccgacacugcagagaucagauuaaugugcacagagaccuaucuggauacgcccaggccuaaugacggcucuauuaccggcccaugugaauccgauggggacaagggaagcgguggcaucaaagggggauuugugcaucagcggauggcuucgaagauaggccguugguacucucgcacaauguccaaaacuaagagaauggguauggggcucuauguaaaguacgacggcgaucccuggaccgacucaggagcccuugcucugaguggcguuauggugagcauugaggaaccggggugguacuccuucggauuugagaucaaagauaagaaaugcgacgucccuuguaucgguauugaaauggugcacgauggcgggaagacaacuuggcauucugccgcaaccgccaucuauugcuugaugggaagcggccagcuacugugggacacagugaccggugucgauauggcucucuga

SEQ ID NO: 157893 - RNA, 1401 nt, Artificial Sequence; identical to SEQ ID NO: 157892
  derived and/or modified CDS sequence (opt3) from neuraminidase__InfluenzaB__AGX24407

SEQ ID NO: 157894 - RNA, 1401 nt, Artificial Sequence; identical to SEQ ID NO: 156865
  derived and/or modified CDS sequence (opt3) from neuraminidase__InfluenzaB__AGX24418

SEQ ID NO: 157895 - RNA, 1401 nt, Artificial Sequence; identical to SEQ ID NO: 156836
  derived and/or modified CDS sequence (opt3) from neuraminidase__InfluenzaB__AGX24429

SEQ ID NO: 157896 - RNA, 1401 nt, Artificial Sequence
  derived and/or modified CDS sequence (opt3) from neuraminidase__InfluenzaB__AGX24440
augcugcccagcaccauccagacacucacucuuuuccugacguccggcgggguguuguuaucucuguacgucucagccagucuaagcuaucuccuguacuccgacauucuucugaaguuuucucaaaccgagauaacagcuccuaucaugccauuggauugcgcaaacgccucgaauguucaggcggugaacagaucagcugccaaaggaguaacucuccugcugccggaacccgaguggaccuauccuaggcucagcuguccagguaguacauuccagaaggcauuacugauuucuccccaccgguuuggcgaaaccaaaggaaauuccgccccucuuaucauucgcgagccauucaucgcuugcgggacuacagaauguaagcauuuugcauugacccacuacgccgcucagcccggcgguuauuacaacgggacgcgagaggaccguaauaaacugagacaucuaauaagcgugaagcucggaaagaucccuacugucgagaacuccauuuuccacauggccgcguggucaggcagugcaugccaugauggcaaagaauggaccuauaucgggguggacggaccagauagcaaugcccugcuuaagauuaaauacggugaggcuuacacagacacuuaucacucuuacgccaagaacauccugaggacccaagaauccgcauguaauugcauaggcggggauuguuauuugaugauuacagacggaccggcuucaggcaucagcgagugccgguuucucaaaauucgcgaggguagaaucaucaaggaaauuuuccccaccgggaggguuaagcacacggaggaauguacuugcggauuugccaguaacaaaacaauagagugugcgugccgggauaaucgcuacaccgccaagcgaccuuucgugaaacugaacgucgaaacugacacagcagagaucagauuaaugugcaccgagacguaucuggauaccccaaggcccaaugacggcucuauuacaggcccuugugaauccgauggggacaagggaagcgguggcaucaaagggggauuugugcaucagcggauggcuucgaagauaggccguugguacucucgcacuauguccaaaaccaagagaauggguauggggcucuauguaaaguacgacggcgauccauggacagacucaggagcccuugcucugaguggcguuauggugagcauugaggaacccgggugguacuccuucggauuugagaucaaagauaagaaaugcgacgucccguguaucgguauugaaauggugcacgauggcgggaagacuaccuggcauucugccgcaacaaccaucuauugcuugaugggaagcggccagcuacugugggacacugugacgggugucgauauggcccucuga

SEQ ID NO: 157897 - RNA, 1401 nt, Artificial Sequence; identical to SEQ ID NO: 157460
  derived and/or modified CDS sequence (opt3) from neuraminidase__InfluenzaB__AGX24451

SEQ ID NO: 157898 - RNA, 1401 nt, Artificial Sequence
  derived and/or modified CDS sequence (opt3) from neuraminidase__InfluenzaB__AGX24462
augcugcccagcaccauccagacacucacucuuuuccugacguccggcgggguguuguuaucucuguacgucucagccagucuaagcuaucuccuguacuccgacauucuucugaaguuuucucaaaccgagauaacagcuccuaucaugccauuggauuaugcaaacgccucgaauguucaggcggugaaccacucagcugccaaaggaguaacucuccugcugccggaacccgaguggaccuacccuagacucagcugcccagguaguacauuccagaaggcauuacugauuucuccccauagguuuggcgaaaccaaaggcaauuccgccccucuuaucauucgggagccauucaucgcuuguggacccacugaaugcaagcacuuugcauugacacauuaugccgcucagccuggcgguuacuauaacgggacccgcgaggaccgaaauaaacugcgucaccuaauaagcgugaagcucggaaagaucccaacggucgagaacuccauuuuccauauggccgcguggucaggcagugcaugucacgauggcaaagaauggacuuacaucgggguggacggaccggauagcaaugcccugcuuaagauuaaauacggugaggcuuauaccgacacauaccacucuuaugccaagaacauccugagaacucaagaauccgcaugcaauuguauaggcggggauugcuacuugaugauuaccgacggacccgcuucaggcaucagcgaguguagguuucucaaaauucgggagggucgcaucaucaaggaaauuuucccuacagggagaguuaagcauaccgaggaaugcacguguggauuugccaguaacaaaacuauagagugcgcguguagggauaauucuuauacagccaagcggccauucgugaaacugaacgucgaaaccgacacugcagagauccgcuuaaugugcacagagaccuaccuggauacgccccgaccuaaugacggcuccauuaccggcccaugcgaaagcgauggggacaagggaucggguggcaucaaagggggauuugugcaccagagaauggcuucuaagauagggaggugguauucccggacaaugucaaaaacuaagcguauggguauggggcucuacguaaaguacgacggcgaucccuggaccgacagugaggcccuugcucugagcggaguuaugauuuccauggaggaaccgggcugguauucuuucggguuugaaaucaaagauaagaaaugugacgugccuugcaucggaauugagaugguccaugaugguggcaagacaacuuggcacagcgccgcaaccgccaucuacuguuugauggggucaggacagcuacugugggacacagugaccggcguggauauggcucucuga

SEQ ID NO: 157899 - RNA, 1401 nt, Artificial Sequence; identical to SEQ ID NO: 157898
  derived and/or modified CDS sequence (opt3) from neuraminidase__InfluenzaB__AGX24473

SEQ ID NO: 157900 - RNA, 1401 nt, Artificial Sequence
  derived and/or modified CDS sequence (opt3) from neuraminidase__InfluenzaB__AGX24484
augcugcccagcaccauccagacacucacucuuuuccugacguccggcgggguguuguuaucucuguacgucucagccagucuaagcuaucuccuguacuccgacauucuucugaaguuuucucaaaccgagauaacagcuccuaucaugccauuggauugcgcaaacgccucgaauguucaggcggugaacagaucagcugccaaaggaguaacucuccugcugccggaacccgaguggaccuauccuaggcucagcuguccagguaguacauuccagaaggcauuacugauuucuccccaccgguuuggcgaaaccaaaggaaauuccgccccucuuaucauucgcgagccauucaucgcuugcgggcccacugaauguaagcauuuugcauugacacacuacgccgcucagccuggcgguuauuacaacgggacccgagaggaccguaauaaacugagacaucuaauaagcgugaagcucggaaagaucccaacggucgagaacuccauuuuccacauggccgcguggucaggcagugcaugccaugauggcaaagaauggacuuauaucgggguggacggaccggauagcaaugcccugcuuaagauuaaauacggugaggcuuacaccgacacauaucacucuuacgccaagaacauccugaggacucaagaauccgcauguaauugcauaggcggggauuguuauuugaugauuaccgacggacccgcuucaggcaucagcgagugccgguuucucaaaauucgcgaggguagaaucaucaaggaaauuuucccuacagggaggguuaagcacaccgaggaauguacgugcggauuugccaguaacaaaacuauagagugugcgugccgggauaauggcuacacagccaagcgcccauucgugaaacugaacgucgaaaccgacacugcagagauccgauuaaugugcacagagaccuaucuggauacgcccagaccuaaugacggcucuauuaccgggccaugugaauccgauggagacaaggguagcggcgggaucaaaggaggcuuugugcaucagaggauggcuucgaagauaggucggugguacucucguacaauguccaaaacucgcagaauggggaugggccucuauguaaaguacgacggagaucccuggaccgacucagaggcccuugcucugaguggcguuauggugagcauggaggaaccggggugguacuccuucggauuugaaauuaaggauaaaaagugcgacgucccuuguaucgguaucgagauggugcacgauggcgggaaaacaacuuggcauucugccgcaaccgccauuuauugcuugaugggaagcggccagcuacugugggacacagugaccggugucgauauggcucucuga

SEQ ID NO: 157901 - RNA, 1401 nt, Artificial Sequence
  derived and/or modified CDS sequence (opt3) from neuraminidase__InfluenzaB__AGX24495
augcugcccagcaccauccagacacucacucuuuuccugacguccggcgggguguuguuaucucuguacgucucagccagucuaagcuaucuccuguacuccgacauucuucugaaguuuucucaaaccgagauaacagcuccuaucaugccauuggauugcgcaaacgccucgaauguucaggugguaaacagaucagcggcuaaaggagugacucuccugcugccggaacccgaguggaccuauccuaggcucagcuguccagguaguacauuccagaaggccuuacugauuucuccccaccgguuuggcgaaaccaaaggaaauuccgcaccucuuaucauucgcgagccauucaucgccugcgggcccacugaauguaagcauuuugcuuugacacacuacgcagcccagccuggcgguuauuacaacgggacccgagaggaccguaauaaacugagacaucuaauaagcgucaagcucggaaagaucccaacgguggagaacuccauuuuccacauggcugccuggucaggcagugcgugccaugauggcaaagaauggacuuauaucgggguugacggaccggauagcaaugcacugcuuaagauuaaauacggugaggccuacaccgacacauaucacucuuacgcuaagaacauccugaggacucaagaauccgccuguaauugcauaggcggggauuguuauuugaugauuaccgacggacccgcaucaggcaucagcgagugccgguuucucaaaauucgcgaggguagaaucaucaaggaaauuuucccuacagggagggugaagcacaccgaggaauguacgugcggauuugcuaguaacaaaacuauagagugugccugccgggauaauucuuacacagcgaagcgcccauucgucaaacugaacguggaaaccgacacugccgagauccgauuaaugugcacagagaccuaucuggauacgcccagaccuaaugacggcuccauuaccggcccaugugaaagcgauggggacaagggaucggguggcaucaaagggggauuuguacaucagaggauggcaucuaagauaggccggugguacucccguacaaugucaaaaacucgcagaauggguauggggcucuauguuaaguacgacggcgaucccuggaccgacagugaggcucuugcccugagcggagugauggucuccauggaggaaccgggcugguacucuuucggguuugaaauuaaggauaaaaagugcgacgugccuuguaucggaaucgagauggugcacgaugguggcaaaacaacuuggcauagcgcugccaccgcaauuuauugcuugauggggucaggacagcuacugugggacacagucaccggcguugauauggcccucuga

SEQ ID NO: 157902 - RNA, 1401 nt, Artificial Sequence; identical to SEQ ID NO: 157460
  derived and/or modified CDS sequence (opt3) from neuraminidase__InfluenzaB__AGX24506

SEQ ID NO: 157903 - RNA, 1401 nt, Artificial Sequence
  derived and/or modified CDS sequence (opt3) from neuraminidase__InfluenzaB__AGX24517
augcugcccagcaccauccagacacucacucuuuuccugacguccggcgggguguuguuaucucuguacgucucagccagucuaagcuaucuccuguacuccgacauucuucugaaguuuucucaaaccgagauaacagcuccuaucaugccauuggauugcgcaaacgccucgaauguucaggcggugaaccacucagcugccaaaggaguaacucuccugcugccggaacccgaguggaccuauccuagacucagcuguccagguaguacauuccagaaggcauuacugauuucuccccauagguuuggcgaaaccaaaggcaauuccgccccucuuaucauucgggagccauucaucgcuugcggacccacugaauguaagcacuuugcauugacacauuacgccgcucagccuggcgguuauuacaacgggacccgcgaggaccgaaauaaacugcgucaccuaauaagcgugaagcucggaaagaucccaacggucgagaacuccauuuuccauauggccgcguggucaggcagugcaugccacgauggcaaagaauggacuuauaucgggguggacggaccggauagcaaugcccugcuuaagauuaaauacggugaggcuuacaccgacacauaucacucuuacgccaagaacauccugagaacucaagaauccgcauguaauugcauaggcggggauuguuauuugaugauuaccgacggacccgcuucaggcguuagcgagugcagguuucucaaaauccgggagggucgcauuaucaaggaaaucuucccuacagggagagugaagcauaccgaggaauguacgugcggauuugccaguaacaaaacuauugagugugcgugcagggauaauucuuacacagccaagcggccauucgucaaacugaacguggaaaccgacacugcagagauacgcuuaaugugcacagagaccuaucuggauacgccccgaccuaaugacggcuccaucaccggcccaugugaaagcgauggggacaagggaucggguggcauuaaagggggauuuguacaccagagaauggcuucuaagaucgggaggugguacucccggacaaugucaaaaacuaagcguauggguauggggcucuauguuaaguacgacggcgaucccuggaccgacagugaggcccuugcucugagcggagugauggucuccauggaggaaccgggcugguacucuuucggguuugaaauaaaagauaagaaaugcgacgugccuuguauuggaaucgagauggugcaugaugguggcaagacaacuuggcacagcgccgcaaccgccaucuauugcuugauggggucaggacagcuacugugggacacagucaccggcguugauauggcucucuga

SEQ ID NO: 157904 - RNA, 1401 nt, Artificial Sequence; identical to SEQ ID NO: 157460
  derived and/or modified CDS sequence (opt3) from neuraminidase__InfluenzaB__AGX24528

SEQ ID NO: 157905 - RNA, 1401 nt, Artificial Sequence; identical to SEQ ID NO: 157888
  derived and/or modified CDS sequence (opt3) from neuraminidase__InfluenzaB__AGX24539

SEQ ID NO: 157906 - RNA, 1401 nt, Artificial Sequence
  derived and/or modified CDS sequence (opt3) from neuraminidase__InfluenzaB__AGX24550
augcugcccagcaccauccagacacucacucuuuuccugacguccggcgggguguuguuaucucuguacgucucagccagucuaagcuaucuccuguacuccgacauucuucugaaguuuucucaaaccgagauaacagcuccuaucaugccauuggauugcgcaaacgccucgaauguucaggcggugaacagaucagcugccaaaggaguaacucuccugauuccggaacccgaguggaccuauccuaggcugagcuguccagguaguacauuccagaaggcacucuuaaucucuccccaccgguuuggcgaaaccaaaggaaauuccgccccucugauuauccgcgagccauucauagcuugcgggcccacugaauguaagcauuuugcacuuacacacuacgccgcucagccuggcgguuauuacaacgggacccgagaggaccguaauaaauugagacaucugaucagcgugaagcuaggaaagauuccaacggucgagaacuccaucuuccacauggccgcguggucaggcagugcaugccaugauggcaaagaauggacuuauauugggguggacggaccggauagcaaugcccuccugaagaucaaauacggugaggcuuacaccgacacauaucacucuuacgccaagaacauacuuaggacucaagaauccgcauguaauugcauuggcggggauuguuaucugaugaucaccgacggacccgcuucaggcauuagcgagugccgguuuuugaaaauccgcgaggguagaaucauuaaggaaauauucccuacagggaggguuaagcacaccgaggaauguacgugcggauuugccaguaacaaaacuaucgagugugcgugccgggauaauucuuacacagccaagcgcccauucgugaaacucaacgucgaaaccgacacugcagagauucgacugaugugcacagagaccuauuuagauacgcccagaccuaaugacggcuccaucaccggcccaugugaaagcgauggggacaagggaucggguggcauaaaagggggauuugugcaucagaggauggcuucuaagauuggccggugguacucccguacaaugucaaaaacuaagcgcauggguauggggcuguauguaaaguacgacggcgaucccuggaccgacagugaggcccucgcucuuagcggaguuaugguguccauggaggaaccgggcugguacucuuucggguuugaaaucaaagauaagaaaugcgacgucccuuguaucggaauugagauggugcacgaugguggcaagacaacuuggcauagcgccgcaaccgccaucuauugccugauggggucaggacaguugcuaugggacacagugaccggcgucgauauggcucuguga

SEQ ID NO: 157907 - RNA, 1401 nt, Artificial Sequence; identical to SEQ ID NO: 157898
  derived and/or modified CDS sequence (opt3) from neuraminidase__InfluenzaB__AGX24561

SEQ ID NO: 157908 - RNA, 1401 nt, Artificial Sequence; identical to SEQ ID NO: 156865
  derived and/or modified CDS sequence (opt3) from neuraminidase__InfluenzaB__AGX24572

SEQ ID NO: 157909 - RNA, 1401 nt, Artificial Sequence
  derived and/or modified CDS sequence (opt3) from neuraminidase__InfluenzaB__AGX24583
augcugcccagcaccauccagacacucacucuuuuccugacguccggcgggguguuguuaucucuguacgucucagccagucuaagcuaucuccuguacuccgacauucuucugaaguuuucucaaaccgagauaacagcuccuaucaugccauuggauugcgcaaacgccucgaauguucaggcggugaacagaucagcugccaaaggaguaacucuccugcugccggaacccgaguggaccuauccuaggcucagcuguccagguaguacauuccagaaggcauuacugauuucuccccaccgguuuggcgaaaccaaaggaaauuccgccccucuuaucauucgcgagccauucaucgcuugcgggcccacugaauguaagcauuuugcauugacacacuacgccgcucagccuggcgguuauuacaacgggacccgagaggaccguaauaaacugagacaucuaauaagcgugaagcucggaaagaucccaacggucgagaacuccauuuuccacauggccgcguggucaggcagugcaugccaugauggcaaagaauggacuuauaucgggguggacggaccggauagcaaugcccugcuuaagauuaaauacggugaggcuuacaccgacacauaucacucuuacgccaagaacauccugaggacucaagaauccgcauguaauugcauaggcggggauuguuauuugaugauuaccgacggacccgcuucaggcaucagcgagugccgguuucucaaaauucgcgaggguagaaucaucaaggaaauuuucccuacagggaggguuaagcacaccgaggaauguacgugcggauuugccaguaacaaaacuauagagugugcgugccgggauaauucuuacacagccaagcgcccauucgugaaacugaacgucgaaaccgacacugcagagauccgauuaaugugcacagagaccuaucuggauacgcccagaccuaaugacggcuccauuaccggcccaugugaaagcgauggggacaagggaucggguggcaucaaagggggauuugugcaucagaggauggcuucuaagauaggccggugguacucccguacaaugucaaaaacucgcagaauggguauggggcucuauguaaaguacgacggcgaucccuggaccgacaguggagcccuugcucugagcggcguuaugguguccauugaggaaccggggugguacucuuucggauuugagaucaaggauaaaaagugcgacgucccuuguaucgguauugaaauggugcacgauggcgggaaaacaacuuggcauagcgccgcaaccgccaucuauugcuugaugggaucaggccagcuacugugggacacagugaccggugucgauauggcucucuga

SEQ ID NO: 157910 - RNA, 1401 nt, Artificial Sequence; identical to SEQ ID NO: 157460
  derived and/or modified CDS sequence (opt3) from neuraminidase__InfluenzaB__AGX24594

SEQ ID NO: 157911 - RNA, 1401 nt, Artificial Sequence; identical to SEQ ID NO: 157460
  derived and/or modified CDS sequence (opt3) from neuraminidase__InfluenzaB__AGX24605

SEQ ID NO: 157912 - RNA, 1401 nt, Artificial Sequence; identical to SEQ ID NO: 157460
  derived and/or modified CDS sequence (opt3) from neuraminidase__InfluenzaB__AGX24616

SEQ ID NO: 157913 - RNA, 1401 nt, Artificial Sequence; identical to SEQ ID NO: 157884
  derived and/or modified CDS sequence (opt3) from neuraminidase__InfluenzaB__AGX24627

SEQ ID NO: 157914 - RNA, 1401 nt, Artificial Sequence; identical to SEQ ID NO: 157460
  derived and/or modified CDS sequence (opt3) from neuraminidase__InfluenzaB__AGX24638

SEQ ID NO: 157915 - RNA, 1401 nt, Artificial Sequence
  derived and/or modified CDS sequence (opt3) from neuraminidase__InfluenzaB__AGX24660
augcugcccagcaccauccagacacucacucuuuuccugacguccggcgggguguuguuaucucuguacgucucagccagucuaagcuaucuccuguacuccgacauucuucugaaguuuucuagaaccgagauaacagcuccuaucaugccauuggauugcgcaaacgccucgaauguucaagcggugaacaggucagcuacuaaaggaguaacccuccugcugccggaacccgaguggacauauccucggcucagcuguccagguaguaccuuccagaaggccuuacugauuucuccccaccgcuuuggcgaaacuaaaggaaauuccgcaccucuuaucauucgagagccauucaucgccugcgggcccaaggaauguaaacauuuugcuuugacauacuaugcagcccagccuggcgguuacuauaacgggacccgugaggacagaaauaagcugaggcaccuaauaagcgugaagcucggaaaaaucccaacggucgagaacuccauuuuccauauggcugccuggucaggcagugcgugccacgauggccgggaauggacuuacaucgggguggacggaccggauagcaaugcacugcuuaagauuaaauacggugaggccuauaccgacacauaccauucuuaugcuaagaacauccugcgcacucaggaauccgccuguaauugcauaggcggggauuguuacuugaugauuaccgacggacccgcaucaggcaucagcgagugcagauuucucaaaauuagggagggucggaucaucaaggaaauuuucccuacagggcgcguuaagcacaccgaggaauguacgugcggauuugcuaguaacaaaacuauagagugugccugccgagauaauucuuauacagcgaagagaccauucgugaaacugaacgucgaaaccgacacugccgagaucagguuaaugugcacagagaccuaccuggauacgccccggccuaaugacggcuccauuaccggcccaugugaaagcaacggggauaagggaucggguggcaucaaagggggauuugugcaccaacguauggcaucuaagauaggccgcugguauuccagaacaaugucaaaaacuaagaggauggguauggggcucuacguaaaguacgacggcgaccccuggaccgauagugaggcucuugcccugagcggaguuaugguguccauggaggaaccgggcugguauucuuucggguuugaaauuaaagacaagaaaugcgaugucccuuguaucggaaucgagauggugcaugacgguggcaagacaacuuggcacagcgcugccaccgcaauuuacugcuugauggggucaggacagcuacugugggauacagugaccggcgucaauaugacucucuga

SEQ ID NO: 157916 - RNA, 1401 nt, Artificial Sequence
  derived and/or modified CDS sequence (opt3) from neuraminidase__InfluenzaB__AGX24671
augcugcccagcaccauccagacacucacucuuuuccugacguccggcgggguguuguuacugcuauacgucucugccucacucaguuaucugcuuuacagcgacauucuguugaaguuuucccaaaccgagauaacagcuccuaucaugccacucgauugcgcaaacgccucuaauguucaggcggugaacagaucggcugccaaaggaguaacucugcugcucccggaacccgaguggaccuauccuagguuaucauguccagguagcacauuccagaaggcacugcuuauuaguccccaccgguuuggcgaaaccaaaggaaauuccgccccuuugaucauucgcgagccauucaucgcuugcgggcccacugaauguaagcauuuugcacugacacacuacgccgcucagccuggcgguuauuacaacgggacccgagaggaccguaauaaacuaagacaucucauaucugugaagcugggaaagaucccaacggucgagaacagcauuuuccacauggccgcgugguccggcucagcaugccaugauggcaaagaauggacuuauaucgggguggacggaccggauaguaaugcccuucugaagauuaaauacggugaggcuuacaccgacacauaucacagcuacgccaagaacaucuugaggacucaagaaucugcauguaauugcauaggcggggauuguuaucucaugauuaccgacggacccgcuuccggcaucucagagugccgguuucugaaaauucgcgaggguagaaucaucaaggaaauuuucccuacagggaggguuaagcacaccgaggaauguacgugcggauuugccagcaacaaaacuauagagugugcgugccgggauaauaguuacacagccaagcgcccauucgugaaauuaaacgucgaaaccgacacugcagagauccgacugaugugcacagagaccuaucucgauacgcccagaccuaaugacggcucuauuaccggcccaugugaauccgauggggacaagggaagcgguggcaucaaagggggauuugugcaucagaggauggcuucgaagauaggccggugguacucucguacaauguccaaaacuaagcgcauggguauggggcuuuauguaaaguacgacggcgaucccuggaccgacucagaggcccuggcuuugaguggaguuauggugagcauggaggaaccgggcugguacuccuucggguuugaaauuaaagauaagaaaugcgacaucccuuguaucggaauugagaugguccacgaugguggcaagacaacuuggcauucugccgcaaccgccaucuauugccuaauggggagcggacagcugcucugggacacagugaccggcguggauauggcucuguga

SEQ ID NO: 157917 - RNA, 1401 nt, Artificial Sequence
  derived and/or modified CDS sequence (opt3) from neuraminidase__InfluenzaB__AGX24682
augcugcccagcaccauccagacacucacucuuuuccugacguccggcgggguguuguuaucucuguacgucucagccagucuaagcuaucuccuguacuccgacauucuucugaaguuuucuagaaccgagauaacagcuccuaucaugccauuggauugcgcaaacgccucgaauguucaagcggugaacaggucagcuacuaaaggaguaacccuccugcugccggaacccgaguggacauauccucggcucagcuguccagguaguaccuuccagaaggccuuacugauuucuccccaccgcuuuggcgaaacuaaaggaaauuccgcaccucuuaucauucgagagccauucaucgccugcgggcccaaggaauguaaacauuuugcuuugacacacuacgcagcccagccuggcgguuauuacaacgggacccgugaggacagaaauaagcugaggcaucuaauaagcgugaagcucggaaaaaucccaacggucgagaacuccauuuuccacauggcugccuggucaggcagugcgugccaugauggccgggaauggacuuauaucgggguggacggaccggauagcaaugcacugcuuaagauuaaauacggugaggccuacaccgacacauaucacucuuacgcuaagaacauccugcgcacucaggaauccgccuguaauugcauaggcggggauuguuauuugaugauuaccgacggacccgcaucaggcaucagcgagugcagauuucucaaaauuagggagggucggaucaucaaggaaauuuucccuacagggcgcguuaagcacaccgaggaauguacgugcggauuugcuaguaacaaaacuauagagugugccugccgagauaauucuuacacagcgaagagaccauucgugaaacugaacgucgaaaccgacacugccgagaucagguuaaugugcacagagaccuaucuggauacgccccggccuaaugacggcuccauuaccggcccaugugaaagcaacggggauaagggaucggguggcaucaaagggggauuugugcaucaacguauggcaucuaagauaggccgcugguacuccagaacaaugucaaaaacuaagaggauggguauggggcucuauguaaaguacgacggcgaccccuggaccgauagugaggcucuuguucugagcggagugauggucuccauggaggaaccgggcugguacucuuucggguuugaaauuaaagacaagaaaugcgaugugccuuguaucggaaucgagauggugcacgacgguggcaagacaacuuggcauagcgccgcuaccgccauuuauugcuugauggggucaggacagcuacugugggauacagucaccggcguuaauaugacucucuga

SEQ ID NO: 157918 - RNA, 1401 nt, Artificial Sequence; identical to SEQ ID NO: 157460
  derived and/or modified CDS sequence (opt3) from neuraminidase__InfluenzaB__AGX24693

SEQ ID NO: 157919 - RNA, 1401 nt, Artificial Sequence; identical to SEQ ID NO: 157460
  derived and/or modified CDS sequence (opt3) from neuraminidase__InfluenzaB__AGX24704

SEQ ID NO: 157920 - RNA, 1401 nt, Artificial Sequence; identical to SEQ ID NO: 157460
  derived and/or modified CDS sequence (opt3) from neuraminidase__InfluenzaB__AGX24715

SEQ ID NO: 157921 - RNA, 1401 nt, Artificial Sequence
  derived and/or modified CDS sequence (opt3) from neuraminidase__InfluenzaB__AGX24737
augcugcccagcaccauccagacacucacucuuuuccugacguccggcgggguguuguuaucucuguacgucucagccagucuaagcuaucuccuguacuccgacauucuucugaaguuuucucaaaccgagauaacagcuccuaucaugccauuggauugcgcaaacgccucgaauguucaggcggugaacagaucagcugccaaaggaguaacucuccugcugccggaacccgaguggaccuauccuaggcucagcuguccagguaguacauuccagaaggcauuacugauuucuccccaccgguuuggcgaaaccaaaggaaauuccgccccucuuaucauucgcgagccauucaucgcuugcgggacuacagaauguaagcauuuugcauugacccacuacgccgcucagcccggcgguuauuacaacgggacgcgagaggaccguaauaaacugagacaucuaauaagcgugaagcucggaaagaucccuacugucgagaacuccauuuuccacauggccgcguggucaggcagugcaugccaugauggcaaagaauggaccuauaucgggguggacggaccagauagcaaugcccugcuuaagauuaaauacggugaggcuuacacagacacuuaucacucuuacgccaagaacauccugaggacccaagaauccgcauguaauugcauaggcggggauuguuauuugaugauuacagacggaccggcuucaggcaucagcgagugccgguuucucaaaauucgcgaggguagaaucaucaaggaaauuuuccccaccgggaggguuaagcacacggaggaauguacuugcggauuugccaguaacaaaacaauagagugugcgugccgggauaaucgcuacaccgccaagcgaccuuucgugaaacugaacgucgaaacugacacagcagagaucagauuaaugugcaccgagacguaucuggauaccccaaggcccaaugacggcucuauuacaggcccuugugaauccgauggggacaagggaagcgguggcaucaaagggggauuugugcaucagcggauggcuucgaagauaggccguugguacucucgcacuauguccaaaaccaagagaauggguauggggcucuauguaaaguacgacggcgauccauggacagacucaggagcccuugcucugaguggcguuauggugagcauugaggaacccgggugguacuccuucggauuugagaucaaagauaagaaaugcgacgucccguguaucgguauugaaauggugcacgauggcgggaagacuaccuggcauucugccgcaacagccaucuauugcuugaugggaagcggccagcuacugugggacaccgugacuggugucgauauggcucucuga

SEQ ID NO: 157922 - RNA, 1401 nt, Artificial Sequence
  derived and/or modified CDS sequence (opt3) from neuraminidase__InfluenzaB__AGX24748
augcugcccagcaccauccagacacucacucuuuuccugacguccggcgggguguuguuaucucuguacgucucagccagucuaagcuaucuccuguacuccgacauucuucugaaguuuucucaaaccgagauaacagcuccuaucaugccauuggauugcgcaaacgccucgaauguucaggcggugaacagaucagcugccaaaggaguaacucuccugcugccggaacccgaguggaccuauccuaggcucagcuguccagguaguacauuccagaaggcauuacugauuucuccccaccgguuuggcgaaaccaaaggaaauuccgccccucuuaucauucgcgagccauucaucgcuugcgggcccacugaauguaagcauuuugcauugacacacuacgccgcucagccuggccgauauuacaacgguacccgugaggacagaaauaaacugaggcaucuaauaagcgugaagcucgggaagaucccaacggucgagaacuccauuuuccacauggccgcguggucaggaagugcaugccaugauggcaaagaauggacuuauaucggcguggacgggccggauagcaaugcccugcuuaagauuaaauacggagaggcuuacaccgacacauaucacucuuacgccaagaacauccugcggacucaagaauccgcauguaauugcauagguggcgauuguuauuugaugauuaccgacgggcccgcuucaggaaucagcgagugccgcuuucucaaaauuagagagggcaggaucaucaaggaaauuuucccuacaggucggguuaagcacaccgaggaauguacgugcggguuugccaguaacaaaacuauagagugugcgugccgcgauaauucuuacacagccaagcgaccauucgugaaacugaacgucgaaaccgacacugcagagaucagauuaaugugcacagagaccuaucuggauacgcccaggccuaaugacggauccauuaccggcccaugugaaagcgauggcgacaaggggucgggagguaucaaaggcggguuugugcaucagcggauggcuucuaagauaggacguugguacucccgcacaaugucaaaaacuaagagaaugggcaugggucucuauguaaaguacgacggggaucccuggaccgacagugaggcccuugcucugagcggcguuaugguguccauggaggaaccgggaugguacucuuucggcuuugaaauuaaagauaagaaaugcgacgucccuuguaucgggaucgagauggugcacgauggagguaagacaacuuggcauagcgccgcaaccgccguguauugcuugaugggcucagggcagcuacugugggacacagucaccggaguugauauggcucucuga

SEQ ID NO: 157923 - RNA, 1401 nt, Artificial Sequence
  derived and/or modified CDS sequence (opt3) from neuraminidase__InfluenzaB__AGX24759
augcugcccagcaccauccagacacucacucuuuuccugacguccggcgggguguuguuaucucuguacgucucagccagucuaagcuaucuccuguacuccgacauucuucugaaguuuucucaaaccgagauaacagcuccuaucaugccauuggauugcgcaaacgccucgaauguucaggcggugaacagaucagcugccaaaggaguaacucuccugcugccggaacccgaguggaccuauccuaggcucagcuguccagguaguacauuccagaaggcauuacugauuucuccccaccgguuuggcgaaaccaaaggaaauuccgccccucuuaucauucgcgagccauucaucgcuugcgggcccacugaauguaagcauuuugcauugacacacuacgccgcucagccuggcgguuauuacaacgggacccgagaggaccguaauaaacugagacaucuaauaagcgugaagcucggaaagaucccaacggucgagaacuccauuuuccacauggccgcguggucaggcagugcaugccaugauggcaaagaauggacuuauaucgggguggacggaccggauagcaaugcccugcuuaagauuaaauacggugaggcuuacaccgacacauaucacucuuacgccaagaacauccugaggacucaagaauccgcauguaauugcauaggcggggauuguuauuugaugauuaccgacggacccgcuucaggcaucagcgagugccgguuucucaaaauucgcgaggguagaaucaucaaggaaauuuucccuacagggaggguuaagcacaccgaggaauguacgugcggauuugccaguaacaaaacuauagagugugcgugccgggauaauucuuacacagccaagcgcccauucgugaaacugaacgucgaaaccgacacugcagagauccgauuaaugugcacagagaccuaucuggauacgcccagaccuaaugacggcuccauuaccggcccaugugaaagcgauggggacaagggaucggguggcaucaaagggggauuugugcaucagaggauggcuucuaagauaggccggugguacucccguacaaugucaaaaacuaagcgcauggguauggggcucuauguaaaguacgacggcgaucccuggaccgacagugaggcccuugcucugagcggaguuaugguguccauggaggaaccgggcugguacucuuucggguuugaaauuaaagauaagaaaugcgacaucccuuguaucggaauugagaugguccacgaugguggcaagacaacuuggcauagcgccgcaaccgccaucuauugcuugauggggucaggacagcuacugugggacacagugaccggcguggauauggcucucuga

SEQ ID NO: 157924 - RNA, 1401 nt, Artificial Sequence; identical to SEQ ID NO: 157460
  derived and/or modified CDS sequence (opt3) from neuraminidase__InfluenzaB__AGX24770

SEQ ID NO: 157925 - RNA, 1401 nt, Artificial Sequence; identical to SEQ ID NO: 157922
  derived and/or modified CDS sequence (opt3) from neuraminidase__InfluenzaB__AGX24781

SEQ ID NO: 157926 - RNA, 1401 nt, Artificial Sequence; identical to SEQ ID NO: 156836
  derived and/or modified CDS sequence (opt3) from neuraminidase__InfluenzaB__AGX24792

SEQ ID NO: 157927 - RNA, 1401 nt, Artificial Sequence; identical to SEQ ID NO: 157884
  derived and/or modified CDS sequence (opt3) from neuraminidase__InfluenzaB__AGX24803

SEQ ID NO: 157928 - RNA, 1401 nt, Artificial Sequence; identical to SEQ ID NO: 157460
  derived and/or modified CDS sequence (opt3) from neuraminidase__InfluenzaB__AGX24814

SEQ ID NO: 157929 - RNA, 1401 nt, Artificial Sequence
  derived and/or modified CDS sequence (opt3) from neuraminidase__InfluenzaB__AGX24825
augcugcccagcaccauccagacacucacucuuuuccugacguccggcgggguguuguuaucucuguacgucucagccagucuaagcuaucuccuguacuccgacauucuucugaaguuuucucaaaccgagauaacagcuccuaucaugccauuggauugcgcaaacgccucgaauguucaggcggugaacagaucagcugccaaaggaguaacucuccugcugccggaacccgaguggaccuauccuaggcucagcuguccagguaguacauuccagaaggcauuacugauuucuccccaccgguuuggcgaaaccaaaggaaauuccgccccucuuaucauucgcgagccauucaucgcuugcgggcccacugaauguaagcauuuugcauugacacacuacgccgcucagccuggcgaguauuacaacgguacccgagaggaccguaauaaacugagacaucuaauaagcgugaagcucgggaagaucccaacggucgaaaacuccauuuuccacauggccgcguggucaggaagugcaugccaugauggcaaagaguggacuuauaucggcguggacgggccggauagcaaugcccugcuuaagauuaaauacggagaggcuuacaccgacacauaucacucuuacgccaagaacauccugaggacucaagaauccgcauguaauugcauagguggcgauuguuauuugaugauuaccgacgggcccgcuucaggaaucagcgagugccgguuucucaaaauucgcgaaggcagaaucaucaaggagauuuucccuacagguaggguuaagcacaccgaagaguguacgugcggguuugccaguaacaaaacuauagaaugugcgugccgggauaauucuuacacagccaagcgcccauucgugaaacugaacgucgagaccgacacugcagagauccgauuaaugugcacagaaaccuaucuggauacgcccagaccuaaugacggauccauuaccggcccaugugagagcgauggcgacaaggggucgggagguaucaaaggcggguuugugcaucagaggauggcuucuaagauaggacggugguacucccguacaaugucaaaaacucgcagaaugggcaugggucucuauguaaaguacgacggggaucccuggaccgacagugaagcccuugcucugagcggcguuaugguguccauggaggaaccgggaugguacucuuucggcuuugagauuaaggauaaaaagugcgacgucccuuguaucgggaucgagauggugcacgauggagguaaaacaacuuggcauagcgccgcaaccgccauuuauugcuugaugggcucagggcagcuacugugggacacagugaccggagucgauauggcucucuga

SEQ ID NO: 157930 - RNA, 1401 nt, Artificial Sequence; identical to SEQ ID NO: 157460
  derived and/or modified CDS sequence (opt3) from neuraminidase__InfluenzaB__AGX24836

SEQ ID NO: 157931 - RNA, 1401 nt, Artificial Sequence
  derived and/or modified CDS sequence (opt3) from neuraminidase__InfluenzaB__AGX24847
augcugcccagcaccauccagacacucacucuuuuccugacguccggcgggguguuguuaucucuguacgucucagccagucuaagcuaucuccuguacuccgacauucuucugaaguuuucuagaaccgagauaacagcuccuaucaugccauuggauugcgcaaacgccucgaauguucaagcggugaacaggucagcuacuaaaggaguaacccuccugcugccggaacccgaguggacauauccucggcucagcuguccagguaguaccuuccagaaggccuuacugauuucuccccaccgcuuuggcgaaacuaaaggaaauuccgcaccucuuaucauucgagagccauucaucgccugcgggcccaaggaauguaaacauuuugcuuugacacacuacgcagcccagccuggcgguuauuacaacgggacccgugaggacagaaauaagcugaggcaucuaauaagcgugaagcucggaaaaaucccaacggucgagaacuccauuuuccacauggcugccuggucaggcagugcgugccaugauggccgggaauggacuuauaucgggguggacggaccggauagcaaugcacugcuuaagauuaaauacggugaggccuacaccgacacauaucacucuuacgcuaagaacauccugcgcacucaggaauccgccuguaauugcauaggcggggauuguuauuugaugauuaccgacggacccgcaucaggcaucagcgagugcagauuucucaaaauuagggagggucggaucaucaaggaaauuuucccuacagggcgcguuaagcacaccgaggaauguacgugcggauuugcuaguaacaaaacuauagagugugccugccgagauaauucuuacacagcgaagagaccauucgugaaacugaacgucgaaaccgacacugccgagaucagguuaaugugcacagagaccuaucuggauacgccccggccuaaugacggcuccauuaccggcccaugugaaagcaacggggauaagggaucggguggcaucaaagggggauuugugcaucaacguauggcaucuaagauaggccgcugguacuccagaacaaugucaaaaacuaagaggauggguauggggcucuauguaaaguacgacggcgaccccuggaccgauagugaggcucuugcccugagcggaguuaugguguccauggaggaaccgggcugguacucuuucggguuugaaauuaaagacaagaaaugcgaugucccuuguaucggaaucgagauggugcacgacgguggcaagacaacuuggcauagcgcugccaccgcaguguauugcuugauggggucaggacagcuacugugggauacagucaccggcguuaauaugacucucuga

SEQ ID NO: 157932 - RNA, 1401 nt, Artificial Sequence; identical to SEQ ID NO: 156944
  derived and/or modified CDS sequence (opt3) from neuraminidase__InfluenzaB__AGX24858

SEQ ID NO: 157933 - RNA, 1401 nt, Artificial Sequence
  derived and/or modified CDS sequence (opt3) from neuraminidase__InfluenzaB__AGX24869
augcugcccagcaccauccagacacucacucuuuuccugacguccggcgggguguuguuaucucuguacgucucagccagucuaagcuaucuccuguacuccgacauucuucugaaguuuucuagaaccgagaugacagcuccuauaaugccauugggaugcgcaaacgccucgaauguucaagcggugaacaggucagcuacuaaagguguaacccuccugcugccggaacccgaguggacauauccucggcucagcuguccaggcaguaccuuccagaaggccuuacugaucucuccccaccgcuuuggggaaacuaaaggaaauuccgcaccucuuauuauccgagagccauucauugccugcggccccaaggaauguaaacauuuugcuuugacacacuacgcagcccagccugguggguauuacaacggaacccgugaggauagaaauaagcugaggcaucuaaucagcgugaagcucggcaaaauaccaacggucgagaacuccaucuuccacauggcugccuggucaggcagugcgugccaugacgggcgggaauggacuuauauuggaguggaugguccggacagcaaugcacugcuuaagaucaaauacggcgaggccuacaccgauacauaucacucuuacgcuaagaacauucugcgcacucaggaauccgccuguaauugcaucgggggagacuguuauuugaugauaaccgauggccccgcaucagguauuagcgagugcagauuucucaaaaucagggaggggcggauuaucaaggaaaucuucccuacaggacgcguuaagcacaccgaggaauguacgugcggcuuugcuaguaacaaaacuauugagugugccugccgagacaauucuuacacagcgaagagaccauucgugaaacugaacgucgaaaccgauacugccgagauaagguuaaugugcacagagaccuaucuggacacgccccggccuaaugauggcuccaucaccgggccaugugaaagcaacggagacaaggguucgggcgggauuaaaggaggcuuugugcaucaacguauggcaucuaagaucggucgcugguacuccagaacaaugucaaaaacuaagaggauggggaugggccucuauguaaaguacgauggagaccccuggaccgacagugaggcucuugcccugagcggcguuaugguguccauggaggaaccggggugguacucuuucggauuugaaauaaaagauaagaaaugcgacgucccuuguauugguaucgagauggugcacgauggcgggaagacaacuuggcauagcgcugccaccgcaaucuauugcuugaugggaucaggccagcuacugugggacacagugaccggugucaauaugacucucuga

SEQ ID NO: 157934 - RNA, 1401 nt, Artificial Sequence
  derived and/or modified CDS sequence (opt3) from neuraminidase__InfluenzaB__AGX24880
augcugcccagcaccauccagaugcucacacuuuuccugacuuccggcgggguguuguuaucucuguacgucucagccagucuaagcuaucuccuguacuccgacauucuucugaaguuuucuagaacggagauaaccgcuccuaucaugccauuggauugcgcaaacgccucgaauguucaagcggugaacaggucagcuacaaaaggaguaacucuccugcugccggaacccgaguggaccuauccucggcucagcuguccagguaguacauuccagaaggccuuacugauuucuccccaccgcuuuggcgaaaccaaaggaaauuccgcaccucuuaucauucgagagccauucaucgccugcgggcccaaggaauguaaacauuuugcuuugacucacuacgcagcccagccuggcgguuauuacaacgggacacgugaggacagaaauaagcugaggcaucuaauaagcgugaagcucggaaaaaucccaaccgucgagaacuccauuuuccacauggcugccuggucaggcagugcgugccaugauggccgggaauggacguauaucgggguggacggaccggauagcaaugcacugcuuaagauuaaauacggugaggccuacacugacaccuaucacucuuacgcuaagaacauccugcgcacacaggaauccgccuguaauugcauaggcggggauuguuauuugaugauuacugacggacccgcaucaggcaucagcgagugcagauuucucaaaauuagggagggucggaucaucaaggaaauuuucccuaccgggcgcguuaagcacacagaggaauguaccugcggauuugcuaguaacaaaacgauagagugugccugccgagauaauucuuacacugcgaagagaccauucgugaaacugaacgucgaaacagacaccgccgagaucagguuaaugugcacugagacauaucuggauacgccccggccuaaugacggcuccauuaccggcccaugugaaagcaacggggauaagggaucggguggcaucaaagggggauuugugcaucaacguauggcaucuaagauaggccgcugguacuccagaaccaugucaaaaacaaagaggauggguauggggcucuauguaaaguacgacggcgaccccuggacugauagugaggcucuugcccugagcggaguuaugguguccauggaggaaccgggcugguacucuuucggguuugaaauuaaagacaagaaaugcgaugucccuuguaucggaaucgagauggugcacgacgguggcaagaccacauggcauagcgcugccacugcaauuuauugcuugauggggucaggacagcuacugugggauaccgugacaggcgucaauaugacccucuga

SEQ ID NO: 157935 - RNA, 1401 nt, Artificial Sequence
  derived and/or modified CDS sequence (opt3) from neuraminidase__InfluenzaB__AGX24902
augcugcccagcaccauccagacacucacucuuuuccugacguccggcgggguguuguuaucucuguacgucucagcccuacucaguuaucugcuuuacagcgacauucuguugaaguuuuccagaaccgagauaacagcuccuaucaugccacucgauugcgcaaacgccucuaauguucaagcggugaacaggucggcuacuaaaggaguaacccugcugcucccggaacccgaguggacauauccucgguuaucauguccagguagcaccuuccagaaggcccugcuuauuaguccccaccgcuuuggcgaaaauaaagggaacuccgcaccuuugaucauucgagagccauucaucgccugcggacccaaggaauguaaacauuuugcucugacucacuacgcagcccagccuggcgguuauuacaaugggacacgugaggacagaaacaagcuaaggcaucucauaucugugaagcugggaaaaaucccaaccgucgagaauagcauuuuccacauggcugccugguccggcucagcgugccaugauggccgggaauggacguauaucgggguggacggaccggauaguaacgcacuucugaagauuaaauacggugaggccuacacugacaccuaucacagcuacgcuaagaauaucuugcgcacacaggaaucugccuguaacugcauaggcggggauuguuaucucaugauuacugacggacccgcauccggcaucucagagugcagauuucugaaaauuagggagggucggaucaucaaggaaauuuucccuaccgggcgcguuaagcacacagaggaauguaccugcggauuugcuagcaauaaaacgauagagugugccugccgagauaacaauuacacugcgaagagaccauucgugaaauuaaacgucgaaacagacaccgccgagaucaggcugaugugcacugagacauaucucgauacgccccggccuaaugacggcaguauuaccggcccaugugaaucuaacggggauaagggauccgguggcaucaaagggggauuugugcaucaacguauggcaagcaagauaggccgcugguacucgagaaccaugucuaaaacaaagaggauggguauggggcuuuauguaaaguacgacggcgaccccuggacugauuccgaggcucuggccuugucaggaguuauggugaguauggaggaaccgggcugguacagcuucggguuugaaauuaaagacaagaaaugcgaugucccuuguaucggaaucgagauggugcacgacgguggcaagaccacauggcauuccgcugccacugcaauuuauugccuaauggggucuggacagcugcucugggauaccgugacaggcgucaacaugacccuguga

SEQ ID NO: 157936 - RNA, 1401 nt, Artificial Sequence; identical to SEQ ID NO: 156949
  derived and/or modified CDS sequence (opt3) from neuraminidase__InfluenzaB__AGX84846

SEQ ID NO: 157937 - RNA, 1401 nt, Artificial Sequence; identical to SEQ ID NO: 157004
  derived and/or modified CDS sequence (opt3) from neuraminidase__InfluenzaB__AGX84858

SEQ ID NO: 157938 - RNA, 1401 nt, Artificial Sequence; identical to SEQ ID NO: 156949
  derived and/or modified CDS sequence (opt3) from neuraminidase__InfluenzaB__AGX84869

SEQ ID NO: 157939 - RNA, 1401 nt, Artificial Sequence
  derived and/or modified CDS sequence (opt3) from neuraminidase__InfluenzaB__AGX84880
augcugcccagcaccauccagacacucacucuuuuccugacguccggcgggguguuguuaucucuguacgucucagccagucuaagcuaucuccuguacuccgacauucuucugaaguuuucuccuaccgagauaacagcuccaacuaugucguuggauugcgcaaacgccucaaauguucaagcggugaacagaagcgcuaccaaaggaguaaucuuccuccugccggaacccgaguggacauauccuaggcugaguuguccagguuccaccuuucagaaggcccucuuaauuucuccccaccgguucggcgaaacuaaagggaauagcgcaccucugaucauucgcgagccauuuaucgccugcggacccaacgaauguaagcauuucgcucuuacacacuacgcagcccagccuggcgguuauuacaaugggacccgaggagaccguaacaaauugagacaucugauauccgugaagcuaggcaagaucccaacggucgaaaauucaauuuuucacauggcugccuggaguggcagcgcgugccaugaugggaaagaguggacuuauaucggaguggacgguccggauaacgacgcacuccugaagguuaaauacggcgaggccuacaccgauacauaucacucuuacgcuaauaagauucuuaggacucaggaguccgccuguaacugcaucgggggaaauuguuaucugaugauaaccgacggcucagcaagcggugugagugaaugccgguucuugaaaauucgcgaggggagaaucauuaaggagaucuuucccacaggaagggucaagcacaccgaagaguguacgugcggcuucgcuucuaacaaaacuaucgaaugugccugccgggauaauuccuacacagcgaagcgcccuuuugugaaacucaacguagagaccgacacugccgaaauucgacugaugugcacagauaccuauuuagacacgccaagacccgaugacggcagcauaaccgggccuugugagucgaauggagacaaggguucuggcgggaucaaaggaggcuucguucaucaaaggauggaguccaagauuggucggugguacucacguacaaugaguaaaacugaacgcauggggaugggccuguaugugaaguacgauggagacccaugggcagauagcgacgcucucgccuuuuccggcgucauggugucuaugaaggagcccgggugguacagcuucggauucgaaaucaaagauaagaaaugcgacgugccguguauagguauugagaugguccacgauggcgggaaggaaaccuggcauucagcugccacagcaaucuauugccuuaugggaaguggccagcuguugugggacacuguuaccgguguggauauggcccuauga

SEQ ID NO: 157940 - RNA, 1401 nt, Artificial Sequence; identical to SEQ ID NO: 156949
  derived and/or modified CDS sequence (opt3) from neuraminidase__InfluenzaB__AGX84891

SEQ ID NO: 157941 - RNA, 1401 nt, Artificial Sequence; identical to SEQ ID NO: 157004
  derived and/or modified CDS sequence (opt3) from neuraminidase__InfluenzaB__AGX84902

SEQ ID NO: 157942 - RNA, 1401 nt, Artificial Sequence
  derived and/or modified CDS sequence (opt3) from neuraminidase__InfluenzaB__AGX84924
augcugcccagcaccauccagacacucacucuuuuccugacguccggcgggguguuguuaucucuguacgucucagcccuacucaguuaucugcuuuacagcgacauucuguugaaguuuuccccuaccgagauaacagcuccaacuaugucucucgauuaugcaaacgccucgaauguucaagcggugaacagaucagcuaccaaaggaguaacauuccugcugccggaacccgaguggaccuacccuaggcucagcugcccagguaguacuuuucagaaggccuuacugaucucuccccaccgguucggcgaaacaaaaggaaauuccgcaccucuuauuauccgcgagccauuuauugccugugggcccaacgaaugcaagcauuucgcuuugacccacuaugcagcccagccuggcgguuacuauaaugggacgcgaggagaccguaacaaacugagacaucuaaucagcgugaagcucggcaagauaccaacugucgaaaauuccaucuuucacauggcugccuggucaggcagugcgugucaugaugggaaagaguggaccuacauuggaguggacgguccggauaacgacgcacugcuuaagguuaaauacggcgaggccuauacagauacuuaccacagcuaugcuaauaagauccugaggacccaggagucugccugcaacuguauugggggaaauugcuacuugaugaucacagacggcuccgcaucaggugugagcgaaugucgguuccucaaaauacgcgaggggagaauuaucaaggagauuuuucccaccggaagggucaagcacacggaagagugcacuuguggcuucgcuaguaacaaaacaaucgaaugcgccugucgggauaauucuuauaccgcgaagcgcccuuuugugaaacugaacguagagacugacacagccgaaauccgauuaaugugcaccgauacguaccuggacaccccaagacccgaugacggcuccauuacagggccuugcgagagcaauggagacaaggguucgggcgggauaaaaggaggcuucguucaucaaaggauggagucuaagaucggucggugguauucccguacuaugucaaaaaccgaacgcauggggaugggccucuacgugaaguacgauggagacccaugggcagauagugacgcucuugccuuuagcggcgucaugguguccaugaaggagcccgggugguauucuuucggauucgaaauuaaagauaagaaaugugacgugccgugcaucgguauagagaugguccacgauggcgggaaggaaacauggcauagcgcugccacugcaauuuacugucugaugggaucaggccaguugcuaugggacaccguuacagguguggauauggcccuguga

SEQ ID NO: 157943 - RNA, 1401 nt, Artificial Sequence
  derived and/or modified CDS sequence (opt3) from neuraminidase__InfluenzaB__AGY46393
augcugcccagcaccauccagacacucacucuuuuccugacguccggcgggguguuguuaucucuguacgucucagccagucuaagcuaucuccuguacuccgacauucuucugaaguuuccuucuaccgagauaacagcuccaacuaugccguuggauugcgcaaacgccaccaauguucaagcggugaacagaucggcuacaaaaggaguaacccuccugcugcccgaaccugaguggacuuauccaaggcucucaugucccgguagcacauuccagaaggccuuacugaucaguccucaccgguuuggcgaaauuaaaggaaauuccgcaccacuuaucauucgcgagcccuucaucgccugcgggccuaacgaauguaagcauuuugcuuugacccacuacgcagcccagccaggcgguuauuacaaugggacgcgagaggaccguaacaaacugagacaucuaauaucugugaagcucggaaagaucccgacugucgagaauagcauuuuccacauggcugccugguccggcucagcgugccaugauggcagggaauggaccuauaucgggguggacggacccgauaguaacgcacugcuuaaaauuaaguacggugaggccuacacagacacuuaucacagcuacgcuaaaaauauccugcggacccaggaaucugccuguaacugcauaggcggggauuguuauuugaugauuacagacggaccugcauccggcaucucagagugccgcuuucucaagauuagagaggguaggaucaucaaagaaauuuucccaaccgggcggguuaagcacacggaggaauguacuugcggauuugcuagcaauaagacaauagagugugccugccgcgauaacaguuacaccgcgaaacgacccuucgugaagcugaaugucgaaacugacacagccgagaucagauuaaugugcaccgagacguaucuggauaccccuaggccaaacgacggcucuauuacaggccccugugaauccaauggggauaaaggaagcgguggcaucaaagggggauuugugcaucaacggauggcaucgaagauaggccguugguacucucgcacuauguccaagaccgagagaauggguauggggcucuauguaaaauacgacggcgacccgugggcugauucagacgcccuugcuuucaguggaguuauggugagcauggaggaaccuggcugguacuccuuuggguucgaaauuaaggauaagaaaugcgacguccccuguaucggaaucgagauggugcacgaugguggcaaggagacauggcauucugccgcaacugccauuuauugccugauggggagcggacaguugcuaugggacaccgugacaggcgucaacauggcucuguga

SEQ ID NO: 157944 - RNA, 1401 nt, Artificial Sequence
  derived and/or modified CDS sequence (opt3) from neuraminidase__InfluenzaB__AGY46397
augcugcccagcaccauccagacacucacucuuuuccugacguccggcgggguguuguuaucucuguacgucucagccagucuaagcuaucuccuguacuccgacauucuucugaaguuuucuagaaccgagauaacagcuccuaucaugccauuggauugcgcaaacgccucgaauguucaagcggugaacaggucagcuacuaaaggaguaacccuccugcugccggaacccgaguggacauauccucggcucagcuguccagguaguaccuuccagaaggccuuacugauuucuccccaccgcuuuggcgaaacuaaaggaaauuccgcaccucuuaucauucgagagccauucaucgccugcgggcccaacgaauguaagcauuuugcuuugacacacuacgcagcccagccuggcgguuauuacaaugggacccguggagacagaaacaaacugaggcaucuaauaagcgugaagcucggcaagaucccaacggucgaaaauuccauuuuccacauggcugccuggucaggcagugcgugccaugaugggaaagaguggacuuauaucggaguggacgguccggauaacaaugcacugcuuaagguuaaauacggcgaggccuacaccgacacauaucacagcuacgcuaacaagauucugcggacucaggagucugccuguaauugcaucgggggaaacuguuauuugaugauaaccgauggcuccgcaucaggugugagcgaaugccgcuuucucaaaauuagagaggggaggaucauuaaggagaucuuccccacaggacgggucaagcacaccgaagaguguacgugcggcuuugcuaguaauaaaacuaucgaaugugccugccgcgacaacucuuacacagcgaagcgaccuuucgugaaacugaauguagagaccgauacugccgaaauuagauuaaugugcacagacaccuaucuggauacgccaaggcccaacgacggcuccauaaccgggccuugugagagcgauggagacaaggguucgggcgggaucaaaggaggcuuuguucaucaacggauggagucuaagauuggucguugguacucccgcacaaugucaaaaacugaaagaauggggaugggccucuaugugaaguacgacggagauccaugggcagacagugaugcucuugccuucagcggcgucaugguguccaugaaggagcccgggugguacucuuuuggauucgaaaucaaagacaagaaaugcgaugugccguguauagguauugagaugguccacgacggcgggaagaccacauggcauagcgcugccacugcaaucuauugccugaugggaucaggccaguugcuaugggauaccguuacaggugugaacaugacccuguga

SEQ ID NO: 157945 - RNA, 1401 nt, Artificial Sequence
  derived and/or modified CDS sequence (opt3) from neuraminidase__InfluenzaB__AGY46399
augcugcccagcaccauccagacacucacucuuuuccugacguccggcgggguguuguuaucucuguacgucucagccagucuaagcuaucuccuguacuccgacauucuucugaaguuuucuccuaccgagauaaucgcuccaacaacuccguuggauugcgcaaacgccucgaauguucaagcggugaacagaucagcuaccaaaggaguaacacuccugcugcccgaaccugaguggaccuauccaaggcucagcugucccgguaguacuuuccagaaggccuuacugauuuccccucaccgguuuggcgaaacaaaaggaaauucugcaccacuuaucauucgcgagcccuucaucgccugcgggccuaaggaauguaaacauuuugcuuugacccacuacgcagcccagccaggcgguuauuacaacgggacgcgagaggaccguaauaagcugagacaucuaauaagcgugaagcucggaaaaaucccgacugucgagaacuccauuuuccacauggcugccuggucaggcagugcgugccaugauggcagggaauggaccuauaucgggguggacggacccgauagcaaugcacugcuuaagauuaaauacggugaggccuacacagacacuuaucacucuuacgcuaagaacauccugcggacccaggaauccgccuguaauugcauaggcggggauuguuauuugaugauuacagacggaccugcaucaggcaucagcgagugccgcuuucucaaaauuagagaggguaggaucaucaaggaaauuuucccaaccgggcggguuaagcacacggaggaauguacuugcggauuugcuaguaacaaaacaauagagugugccugccgcgauaauucuuacaccgcgaagcgacccuucgugaaacugaacgucgaaacugacacagccgagaucagauuaaugugcaccgagacguaucuggauaccccuaggccaaaugacggcuccauuacaggccccugugaaagcaacggggauaagggaucggguggcaucaaagggggauuugugcaucaacggauggcaucuaagauaggccguugguacucccgcacuaugucaaaaaccaagagaauggguauggggcucuauguaaaguacgacggcgacccgugggcugauagugaggcccuugcucugagcggaguuaugguguccauggaggaaccuggcugguacucuuucggguuugaaauuaaagacaagaaaugcgauguccccuguaucggaaucgagauggugcacgacgguggcaaggagacauggcauagcgccgcaacugccauuuauugcuugauggggucaggacagcuacugugggauaccgugacaggcgucgacauggcucucuga

SEQ ID NO: 157946 - RNA, 1401 nt, Artificial Sequence
  derived and/or modified CDS sequence (opt3) from neuraminidase__InfluenzaB__AGY46401
augcugcccagcaccauccagacacucacucuuuuccugacguccggcgggguguuguuaucucuguacgucucagccagucuaagcuaucuccuguacuccgacauucuucugaaguuuucuccuaccgagauaacagcuccaacuaugccguuggauugcgcaaacgccucgaauguucaagcggugaacagaucagcuaccaaaggaguaacacuccugcugcccgaaccugaguggaccuauccaaggcucagcugucccgguaguacuuuccagaaggccuuacugaucuccccucaccgguuuggcgaaacaaaaggaaauucugcaccacuuauuauccgcgagcccuucauugccugcgggccuaaggaauguaaacauuuugcuuugacccacuacgcagcccagccaggcgguuauuacaacgggacgcgagaggaccguaauaagcugagacaucuaaucagcgugaagcucggaaaaauaccgacugucgagaacuccaucuuccacauggcugccuggucaggcagugcgugccaugauggcagggaauggaccuauauugggguggacggacccgauagcaaugcacugcuuaagaucaaauacggugaggccuacacagacacuuaucacucuuacgcuaagaacauucugcggacccaggaauccgccuguaauugcaucggcggggauuguuauuugaugauaacagacggaccugcaucaggcauuagcgagugccgcuuucucaaaaucagagaggguaggauuaucaaggaaaucuucccaaccgggcggguuaagcacacggaggaauguacuugcggauuugcuaguaacaaaacaauugagugugccugccgcgauaauucuuacaccgcgaagcgacccuucgugaaacugaacgucgaaacugacacagccgagauaagauuaaugugcaccgagacguaucuggauaccccuaggccaaaugacggcuccaucacaggccccugugaaagcaacggggauaagggaucggguggcauuaaagggggauuugugcaucaacggauggcaucuaagaucggccguugguacucccgcacuaugucaaaaaccaagagaauggguauggggcucuauguaaaguacgacggcgacccgugggcugauagugacgcccuugcuuucagcggaguuaugguguccaugaaagagccuggcugguacucuuuuggguucgaaauaaaggauaaaaagugcgacguccccuguauuggaaucgagauggugcacgaugguggcaaagaaacauggcauagcgccgcaacugccaucuauugccugauggggucaggacaguugcuaugggacaccgugacaggcgucgauauggcucuguga

SEQ ID NO: 157947 - RNA, 1401 nt, Artificial Sequence; identical to SEQ ID NO: 156664
  derived and/or modified CDS sequence (opt3) from neuraminidase__InfluenzaB__AGZ59825

SEQ ID NO: 157948 - RNA, 1401 nt, Artificial Sequence; identical to SEQ ID NO: 156730
  derived and/or modified CDS sequence (opt3) from neuraminidase__InfluenzaB__AGZ59836

SEQ ID NO: 157949 - RNA, 1401 nt, Artificial Sequence; identical to SEQ ID NO: 157419
  derived and/or modified CDS sequence (opt3) from neuraminidase__InfluenzaB__AGZ59847

SEQ ID NO: 157950 - RNA, 1401 nt, Artificial Sequence
  derived and/or modified CDS sequence (opt3) from neuraminidase__InfluenzaB__AGZ59858
augcugcccagcaccauccagacacucacucuuuuccugacguccggcgggguguuguuaucucuguacgucucagccagucuaagcuaucuccuguacuccgacauucuucugaaguuuucuccuaccgagauaacagcuccaacuaugccguuggauugcgcaaacgccucgaauguucacgcggugaacagaucagcuaccaaaggaguaacacuccugcugcccgaaccugaguggaccuauccaaggcucagcugucccgguaguacuuuccaaaaggccuuacugaucuccccucaucgguuuggcgaaacaaaaggaaauucugcaccacuuauuauccgcgagcccuucauugccugcgggccuaacgaauguaagcacuuugcuuugacccauuacgcagcccagccaggcgguuauuacaaugggaaacgaggagaccguaacaagcugagacaccuaaucagcgugaagcucggcaaaauaccgacggucgaaaauuccaucuuccauauggcugccuggucaggcagugcgugccacgaugggaaggaguggacuuauauuggaguggacggucccgauaacaaugcacugcuuaaaaucaaguacggcgaggccuacaccgacacauaucacagcuacgcuaacaauauucugaggacucaggagucugccuguaacugcaucgggggaaauuguuauuugaugauaaccgauggcuccgcaucagguguuagcgaaugccgguuucucaaaauucgcgaggggagaaucauuaaggagaucuucccuacaggaagggugaagcauaccgaagaguguacgugcggcuuugcuaguaacaaaacuaucgaaugugccugccgggacaauucuuacacagcgaagcgcccauucgucaaacugaacguggagaccgauacugccgaaauucgauuaaugugcacagacaccuaucuggauacgcccagaccugacgauggcuccauaaccgggccaugugagagcaacggagacaaggguucgggcgggaucaaaggaggcuuuguacaccagaggauggcaucuaagauuggucggugguacucccguacaaugucaaaaacugagcgcauggggaugggccucuauguuaaguacgacggagaucccugggcugacagugaugcccuugcuuucagcggcgugauggucuccaugaaggaaccggggugguacucuuuuggauucgagaucaaagacaagaaaugcgaugugccuuguauagguauugaaauggugcaugacggcgggaaggagaccuggcacagcgccgcaacagccaucuauugccugaugggaucaggccaauugcuaugggauacugucaccgguguugacauggcucuguga

SEQ ID NO: 157951 - RNA, 1401 nt, Artificial Sequence
  derived and/or modified CDS sequence (opt3) from neuraminidase__InfluenzaB__AGZ59869
augcugcccagcaccauccagacacucacucuuuuccugacguccggcgggguguuguuaucucuguacgucucagccagucuaagcuaucuccuguacuccgacauucuucugaaguuuucuccuaccgagauaacagcuccaacuaugccguuggauugcgcaaacgccucgaauguucaagcggugaacagaucagcuaccaaaggaguaacacuccugcugcccgaaccugaguggaccuauccaaggcucagcugucccgguaguacuuuccagaaggccguguuaaucuccccucaccgguuuggcgaaacaaaaggaaauucugcaccacugauuauccgcgagcccuucauugccugcgggccuaacgaauguaagcauuuugcucuuacccacuacgcagcccagccaggcgguuauuacaaugggacgcgaggagaccguaacaaauugagacaucugaucagcgucaagcuaggcaagauaccgacuguggaaaauuccaucuuccacauggcugccuggucaggcagugcgugccaugaugggaaagaguggaccuauauuggaguugacggucccgauaacaaugcacuccugaagaucaaauacggcgaggccuacacagacacuuaucacagcuacgcuaacaagauucuuaggacccaggagucugccuguaauugcaucgggggaaacuguuaucugaugauaacagauggcuccgcaucaggugugagcgaaugccgguuuuugaaaauucgcgaggggagaaucauuaaggagaucuucccuaccggaagggucaagcacacggaagaguguacuugcggcuuugcuaguaauaaaacaaucgaaugugccugccgggacaacucuuacaccgcgaagcgcccauucgugaaacucaauguagagacugauacagccgaaauucgacugaugugcaccgacacguauuuagauacccccagaccugacgauggcuccauaacagggccaugugagagcaacggagacaaggguucgggcgggaucaaaggaggcuuuguucaucaaaggauggcaucuaagauuggucggugguacucccguacuaugucaaaaaccgagcgcauggggaugggccuguaugugaaguacgacggagaucccugggcugacagugaugcccucgcuuucagcggcgucaugguguccaugaaggaaccggggugguacucuuuuggauucgagaucaaagacaagaaaugcgaugugccuuguauagguauugaaaugguccacgacggcgggaaggagacauggcauagcgccgcaacugccaucuauugccuuaugggaucaggccagcuguugugggauaccguuacagguguggacauggcucuauga

SEQ ID NO: 157952 - RNA, 1401 nt, Artificial Sequence; identical to SEQ ID NO: 157448
  derived and/or modified CDS sequence (opt3) from neuraminidase__InfluenzaB__AGZ59880

SEQ ID NO: 157953 - RNA, 1401 nt, Artificial Sequence; identical to SEQ ID NO: 157892
  derived and/or modified CDS sequence (opt3) from neuraminidase__InfluenzaB__AGZ59891

SEQ ID NO: 157954 - RNA, 1401 nt, Artificial Sequence; identical to SEQ ID NO: 157009
  derived and/or modified CDS sequence (opt3) from neuraminidase__InfluenzaB__AGZ59902

SEQ ID NO: 157955 - RNA, 1401 nt, Artificial Sequence; identical to SEQ ID NO: 157009
  derived and/or modified CDS sequence (opt3) from neuraminidase__InfluenzaB__AGZ59913

SEQ ID NO: 157956 - RNA, 1401 nt, Artificial Sequence; identical to SEQ ID NO: 157009
  derived and/or modified CDS sequence (opt3) from neuraminidase__InfluenzaB__AGZ59924

SEQ ID NO: 157957 - RNA, 1401 nt, Artificial Sequence; identical to SEQ ID NO: 157009
  derived and/or modified CDS sequence (opt3) from neuraminidase__InfluenzaB__AGZ59935

SEQ ID NO: 157958 - RNA, 1401 nt, Artificial Sequence; identical to SEQ ID NO: 157009
  derived and/or modified CDS sequence (opt3) from neuraminidase__InfluenzaB__AGZ59946

SEQ ID NO: 157959 - RNA, 1401 nt, Artificial Sequence
  derived and/or modified CDS sequence (opt3) from neuraminidase__InfluenzaB__AGZ59957
augcugcccagcaccauccagacacucacucuuuuccugacguccggcgggguguuguuaucucuguacgucucagccagucuaagcuaucuccuguacuccgacauucuucugaaguuuucuccuaccgagauaacagcuccaacuaugccguuggauugcgcaaacgccucgaauguucaagcggugaacagaucagcuaccaaaggaguaacacuccugcugcccgaaccugaguggaccuauccaaggcucagcugucccgguaguacuuuccagaaggccuuacugaucuccccucaccgguuuggcgaaacaaaaggaaauucugcaccacuuauuauccgcgagcccuucauugccugcgggccuaacgaauguaagcauuuugcuuugacccacuacgcagcccagccaggcgguuauuacaaugggacgcgaggagaccguaacaaacugagacaucuaaucagcgugaagcucggcaagauaccgacugucgaaaauuccaucuuccacauggcugccuggucaggcagugcgugccaugaugggaaagaguggaccuauauuggaguggacggucccgauaacaaugcacugcuuaagguuaaauacggcgaggccuacacagacacuuaucacagcuacgcuaacaagauccugaggacccaggagucugccuguaauugcauugggggaaacuguuauuugaugaucacagauggcuccgcaucaggugugagcgaaugccgguuucucaaaauacgcgaggggagaauuaucaaggagauuuucccuaccggaagggucaagcacacggaagaguguacuugcggcuuugcuaguaauaaaacaaucgaaugugccugccgggacaacucuuacaccgcgaagcgcccauucgugaaacugaauguagagacugauacagccgaaauccgauuaaugugcaccgacacguaucuggauacccccagaccuaacgacggcuccauuacagggccaugugagagcaacggagauaaggguucgggcgggauaaaaggaggcuuuguucaucaaaggauggagucuaagaucggucggugguacucccguacuaugucaaaaaccgaacgcauggggaugggccucuaugugaaguacgacggagaccccugggcagauagugacgcucuugccuucagcggcgucaugguguccaugaaggagccggggugguacucuuuuggauucgaaauuaaagauaagaaaugcgacgugccuuguaucgguauagagaugguccacgauggcgggaagggaacauggcauagcgcugccacugcaauuuauugccugaugggcucaggucaguugcuaugggacaccguuacagggguggauauggcccuguga

SEQ ID NO: 157960 - RNA, 1401 nt, Artificial Sequence; identical to SEQ ID NO: 157009
  derived and/or modified CDS sequence (opt3) from neuraminidase__InfluenzaB__AGZ59969

SEQ ID NO: 157961 - RNA, 1401 nt, Artificial Sequence; identical to SEQ ID NO: 157009
  derived and/or modified CDS sequence (opt3) from neuraminidase__InfluenzaB__AGZ59980

SEQ ID NO: 157962 - RNA, 1401 nt, Artificial Sequence; identical to SEQ ID NO: 157009
  derived and/or modified CDS sequence (opt3) from neuraminidase__InfluenzaB__AGZ59991

SEQ ID NO: 157963 - RNA, 1401 nt, Artificial Sequence; identical to SEQ ID NO: 157009
  derived and/or modified CDS sequence (opt3) from neuraminidase__InfluenzaB__AGZ60003

SEQ ID NO: 157964 - RNA, 1401 nt, Artificial Sequence
  derived and/or modified CDS sequence (opt3) from neuraminidase__InfluenzaB__AGZ60014
augcugcccagcaccauccagacacucacucuuuuccugacguccggcgggguguuguuaucucuguacgucucagcccuacucaguuaucugcuuuacagcgacauucuguugaaguuuuccccuaccgagauaacagcuccaacuaugucucucgauugcgcaaacgccucgaauguucaagcggugaacagaucagcuaccaaaggaguaacauuccugcugccggaacccgaguggaccuauccuaggcucagcuguccagguaguacuuuucagcgggccuuacugaucucuccccaccgcuucggcgaagcaaagggaaauuccgccccucuuauuauccgagagccauuuauugcuugcgggcccaacgaauguaaacauuucgcauugacacacuacgccgcucagccuggcgguuauuacaaugggacccguggagacagaaacaagcugaggcaucuaaucagcgugaaacucggcaagauaccaacggucgaaaauuccaucuuucacauggccgcguggucaggcagugcaugccaugaugggaaggaguggacuuauauuggaguggacgguccggauaacgacgcccugcuuaaaguuaaguacggcgaggcuuacaccgauacauaucacagcuacgccaauaaaauccugcggacucaggagucugcauguaacugcauugggggaaauuguuauuugaugaucaccgacggcuccgcuucaggugugagcgaaugccgcuuccucaagauaagagaggggcaaauuaucaaagagauuuuucccacaggaagggucaagcacaccgaagaguguacgugcggcuucgccaguaacaagacuaucgaaugugcgugccgggauaauucuuacacagccaaacgcccuuuugugaagcugaacguagagaccgacacugcagaaauccgauuaaugugcacagauaccuaucuggacacgccaagacccgaugacggcuccauuaccgggccuugugagagcaauggagacaaagguucgggcgggauaaagggaggcuucguucaucagaggauggagucuaaaaucggucggugguacucccguacaaugucaaagacugaacgcauggggaugggccucuaugugaaauacgauggagacccaugggcugauagugacgcccuugcuuuuagcggcgucaugguguccaugaaggagcccgggugguacucuuucggauucgaaauuaaggauaaaaagugcgacgugccguguaucgguauagagaugguccacgauggcgggaaagaaaccuggcauagcgccgcaacagccauuuauugccugaugggaucaggccaguugcuaugggacacuguuaccgguguggauauggcucuguga

SEQ ID NO: 157965 - RNA, 1401 nt, Artificial Sequence; identical to SEQ ID NO: 156943
  derived and/or modified CDS sequence (opt3) from neuraminidase__InfluenzaB__AGZ60025

SEQ ID NO: 157966 - RNA, 1401 nt, Artificial Sequence
  derived and/or modified CDS sequence (opt3) from neuraminidase__InfluenzaB__AGZ60037
augcugcccagcaccauccagacacucacucuuuuccugacguccggcgggguguuguuaucucuguacgucucagcccuacucaguuaucugcuuuacagcgacauucuguugaaguuuuccccuaccgagauaacagcuccaacuaugucucucgauugcgcaaacgccucgaauguucaagcggugaacagaucagcuaccaaaggaguaacauuccugcugccggaacccgaguggaccuauccuaggcucagcuguccagguaguacuuuucagaaggccuuacugaucucuccccaccgguucggcgaaacaaaaggaaauuccgcaccucuuauuauccgcgagccauuuauugccugcgggcccaacgaauguaagcauuucgcuuugacccacuacgcagcccagccuggcgguuauuacaaugggacgcgaggagaccguaacaaacugagacaucuaaucagcgugaagcucggcaagauaccaacugucgaaaauuccaucuuucacauggcugccuggucaggcagugcgugccaugaugggaaagaguggaccuauauuggaguggacgguccggauaacgacgcacugcuuaagguuaaauacggcgaggccuacacagauacuuaucacagcuacgcuaauaagauccugaggacccaggagucugccuguaacugcauugggggaaauuguuauuugaugaucacagacggcuccgcaucaggugugagcgaaugccgguuccucaaaauacgcgaggggagaauuaucaaggagauuuuucccaccggaagggucaagcacacggaagaguguacuugcggcuucgcuaguaacaaaacaaucgaaugugccugccgggauaauucuuacaccgcgaagcgcccuuuugugaaacugaacguagagacugacacagccgaaauccgauuaaugugcaccgauacguaucuggacaccccaagacccgaugacggcuccauuacagggccuugugagagcaauggagacaaggguucgggcgggauaaaaggaggcuucguucaucaaaggauggagucuaagaucggucggugguacucccguacuaugucaaaaaccgaacgcauggggaugggccucuaugugaaguacgauggagacccaugggcagagagugaugcucuugccuuuagcggcgucaugguguccaugaaggaacccgggugguacucuuucggauucgagauuaaagacaagaaaugcgaugugccguguaucgguauagaaaugguccacgacggcgggaaggagacauggcauagcgcugccacugcaauuuauugccugaugggaucaggccaguugcuaugggauaccguuacagguguggacaucgcccuguga

SEQ ID NO: 157967 - RNA, 1401 nt, Artificial Sequence; identical to SEQ ID NO: 157179
  derived and/or modified CDS sequence (opt3) from neuraminidase__InfluenzaB__AGZ60048

SEQ ID NO: 157968 - RNA, 1401 nt, Artificial Sequence; identical to SEQ ID NO: 157179
  derived and/or modified CDS sequence (opt3) from neuraminidase__InfluenzaB__AGZ60059

SEQ ID NO: 157969 - RNA, 1401 nt, Artificial Sequence
  derived and/or modified CDS sequence (opt3) from neuraminidase__InfluenzaB__AGZ60070
augcugcccagcaccauccagacacucacucuuuuccugacguccggcgggguguuguuaucucuguacgucucagccagucuaagcuaucuccuguacuccgacauucuucugaaguuuucuaccacagagauaacugcuccuaccaugccauuggauugcgcaaacgccucgaauguucaagcggugaaccacucagcugccaaaggaguaacacuccugcugccggaacccgaguggaccuauccuagacucagcuguccagguaguacuuuccagaaggcauuacugaucucuccccauagguuuggcgaaacaaaaggcaauuccgccccucuuauuauccgggagccauucauugcuugcggacccaaggaauguaaacacuuugcauugacccauuacgccgcucagccuggcgguuauuacaacgggacgcgcgaggaccgaaauaagcugcgucaccuaaucagcgugaagcucggaaaaauaccaacugucgagaacuccaucuuccauauggccgcguggucaggcagugcaugccacgauggcaaggaauggaccuauauugggguggacggaccggauagcaaugcccugcuuaaaaucaaguacggugaggcuuacacagacacuuaucacucuuacgcccauaacauucugagaacccaggaauccgcauguaauugcaucggcgggaacuguuauuugaugauaacagauggaucagcuagcggcauuagugagugcagguuucucaaaauccgggagggucgcauuaucaaggaaaucuuccccaccgggagaguuaagcacacggaggaauguacuugcggauuugccaauaacaaaacaauugagugugcgugcagggacaauucuuacaccgccaagcggccuuucgugaaacugaacgucgaaacugauacagcagagauacgcuuaaugugcaccgagacguaucuggacaccccacgacccgaugacggcuccaucacaggcccuugugaaagcaaugggaacaagggaucggguggcauuaaagggggauuugugcaucaaagaauggcuucuaagaucgggaggugguacucccggacuaugucaaaaaccaagcguauggguauggggcucuauguaaaguacgauggcgacccauggacagacagugaugcccuuguuuucagcggagugaugauauccgucgaggaacccggcugguacucuuuuggguucgagauuaaagacaagaaaugcgaugugccguguaucggaaucgaaauggugcacgacgguggcaaggagacuuggcacagcgcugccaccgcaauuuauugccugauggggucaggacaguugcuaugggauacagucaccggcguuaacaugacucuguga

SEQ ID NO: 157970 - RNA, 1401 nt, Artificial Sequence; identical to SEQ ID NO: 156675
  derived and/or modified CDS sequence (opt3) from neuraminidase__InfluenzaB__AGZ60081

SEQ ID NO: 157971 - RNA, 1401 nt, Artificial Sequence; identical to SEQ ID NO: 157195
  derived and/or modified CDS sequence (opt3) from neuraminidase__InfluenzaB__AGZ60092

SEQ ID NO: 157972 - RNA, 1401 nt, Artificial Sequence; identical to SEQ ID NO: 157818
  derived and/or modified CDS sequence (opt3) from neuraminidase__InfluenzaB__AGZ60103

SEQ ID NO: 157973 - RNA, 1401 nt, Artificial Sequence; identical to SEQ ID NO: 156836
  derived and/or modified CDS sequence (opt3) from neuraminidase__InfluenzaB__AGZ60135

SEQ ID NO: 157974 - RNA, 1401 nt, Artificial Sequence; identical to SEQ ID NO: 157008
  derived and/or modified CDS sequence (opt3) from neuraminidase__InfluenzaB__AGZ60154

SEQ ID NO: 157975 - RNA, 1401 nt, Artificial Sequence
  derived and/or modified CDS sequence (opt3) from neuraminidase__InfluenzaB__AGZ60164
augcugcccagcaccacacagacucucacgcuuuuccugaccuccggcgggguguuguuaucucuguacgucucagccagucuaagcuaucuccuguacuccgacauccuucugaaguuuucucaaacagagauuacugcuccuauaaugccauuggauugcgcaaacgccucgaauguucaggcggugaacagaucagcugccaaaggaguaacccuccugcugccggaacccgaguggacauauccuaggcucagcuguccagguaguaccuuccagaaggcauuacugaucaauccccaccgguuuggcgaaacuaaagggaacuccgccccucuuauuauccgcgagccauucauugcuugcggacccacagaauguaagcauuuugcauugacccacuacgccgcucagccuggcgguuauuacaaugggacgcgagaggaccguaacaaacugagacaucuaaucucugugaagcucggaaagauaccaacugucgagaauagcaucuuccacauggccgcgugguccggcucagcaugccaugauggcaaagaauggaccuauauugggguggacggaccggauaguaacgcccugcuuaagaucaaauacggugaggcuuacacagacacuuaucacagcuacgccaagaauauucugaggacccaagaaucugcauguaacugcaucggcggggauuguuauuugaugauaacagacggacccgcuuccggcauuucagagugccgguuucucaaaauccgcgaggguagaauuaucaaggaaaucuucccuaccgggaggguuaagcacacggaggaauguacuugcggauuugccagcaauaaaacaauugagugugcgugccgggauaacaguuacaccgccaagcgcccauucgugaaacugaaugucgaaacugacacagcagagauacgauuaaugugcaccgagacguaucuggauacccccagaccuaacgacggcucuaucacaggcccaugugaauccgauggggacaagggaagcgguggcauuaaagggggauuugugcaucagaggauggcuucgaagaucggccggugguacucucguacuauguccaaaaccaagcgcauggguauggggcucuauguaaaguacgacggcgaucccuggacagacucagaggcccuugcucugaguggaguuauggugagcauggaggaaccgggcugguacuccuucggguuugaaauaaaagauaagaaaugcgacgucccuuguauuggaaucgagauggugcacgaugguggcaagacuaccuggcauucugccgcaacagccaucuauugcuugauggggagcggacagcuacugugggacaccgugacuggcgucgauauggcucucuga

SEQ ID NO: 157976 - RNA, 1401 nt, Artificial Sequence; identical to SEQ ID NO: 157888
  derived and/or modified CDS sequence (opt3) from neuraminidase__InfluenzaB__AGZ60176

SEQ ID NO: 157977 - RNA, 1401 nt, Artificial Sequence; identical to SEQ ID NO: 156865
  derived and/or modified CDS sequence (opt3) from neuraminidase__InfluenzaB__AGZ60187

SEQ ID NO: 157978 - RNA, 1401 nt, Artificial Sequence; identical to SEQ ID NO: 156865
  derived and/or modified CDS sequence (opt3) from neuraminidase__InfluenzaB__AGZ60198

SEQ ID NO: 157979 - RNA, 1401 nt, Artificial Sequence; identical to SEQ ID NO: 156865
  derived and/or modified CDS sequence (opt3) from neuraminidase__InfluenzaB__AGZ60210

SEQ ID NO: 157980 - RNA, 1401 nt, Artificial Sequence
  derived and/or modified CDS sequence (opt3) from neuraminidase__InfluenzaB__AGZ60221
augcugcccaccacaauccagacucucacgcuuuuccugaccagcggcgggguguuguuaucccuguacgucucugccucacuaaguuaucuccuguacagcgacauucuucugaaguuuuccagaacagagauaacugcuccuaucaugccauuggauugcgcaaacgccucuaauguucaagcggugaacaggucggcuaccaaaggaguaacacuccugcugccggaacccgaguggaccuauccucggcucucauguccagguagcacuuuccagaaggccuuacugauuaguccccaccgcuuuggcgaaacaaaaggaaauuccgcaccucuuaucauucgagagccauucaucgccugcgggcccaaggaauguaaacauuuugcuuugacccacuacgcagcccagccuggcgguuauuacaacgggacgcgugaggacagaaauaagcugaggcaucuaauaucugugaagcucggaaaaaucccaacugucgagaacagcauuuuccacauggcugccugguccggcucagcgugccaugauggccgggaauggaccuauaucgggguggacggaccggauaguaaugcacugcuuaagauuaaauacggugaggccuacacagacacuuaucacagcuacgcuaagaacauccugcgcacccaggaaucugccuguaauugcauaggcggggauuguuauuugaugauuacagacggacccgcauccggcaucucagagugcagauuucucaaaauuagggagggucggaucaucaaggaaauuuucccuaccgggcgcguuaagcacacggaggaauguacuugcggauuugcuagcaacaaaacaauagagugugccugccgagauaauaguuacaccgcgaagagaccauucgugaaacugaacgucgaaacugacacagccgagaucagguuaaugugcaccgagacguaucuggauacaccccggccuaaugacggcucuauuaccggcccaugugaauccaacggggauaagggaagcgguggcaucaaagggggauuugugcaucaacguauggcaucgaagauaggccgcugguacucuagaacuauguccaaaaccaagaggauggguauggggcucuauguaaaguacgacggcgaccccuggacagauucagaggcucuugcccugaguggaguuauggugagcauggaggaaccgggcugguacuccuucggguuugaaauuaaagacaagaaaugcgaugucccuuguaucggaaucgagauggugcacgacgguggcaagacuaccuggcauucugcugccacagcaauuuauugcuugauggggagcggacagcuacugugggauaccgugacuggcgucaauaugacgcucuga

SEQ ID NO: 157981 - RNA, 1401 nt, Artificial Sequence
  derived and/or modified CDS sequence (opt3) from neuraminidase__InfluenzaB__AGZ60272
augcugcccagcaccauccagacacucacucuuuuccugacguccggcgggguguuguuaucucuguacgucucagccagucuaagcuaucuccuguacuccgacauucuucugaaguuuucucaaaccgagauaacagcuccuaucaugccauuggauugcgcaaacgccucgaauguucaggcggugaacagaucagcugccaaaggaguaacucuccugcugccgaagcccgaauggaccuauccuaggcucagcuguccagguaguacauuccagaaagcauuacugauuucuccccaccgguuuggcgagaccaagggaaauuccgccccucuuaucauucgcgaaccauucaucgcuugcgggcccacugaguguaaacauuuugcauugacacacuacgccgcucagccuggcgguuauuacaacgggacccgagaagaccguaauaagcugagacaucuaauaagcgugaagcucggaaaaaucccaacggucgagaacuccauuuuccacauggccgcguggucaggcagugcaugccaugauggcaaggaguggacuuauaucgggguggacggaccggauagcaaugcccugcuuaaaauuaaguacggugaggcuuacaccgacacauaucacucuuacgccaaaaacauccugaggacucaagaauccgcauguaauugcauaggcggggauuguuauuugaugauuaccgacggacccgcuucaggcaucagcgaaugccgguuucucaagauucgcgaggguagaaucaucaaggagauuuucccuacagggaggguuaaacacaccgaagaguguacgugcggauuugccaguaacaagacuauagaaugugcgugccgggauaauucuuacacagccaaacgcccauucgugaagcugaacgucgagaccgacacugcagaaauccgauuaaugugcacagagaccuaucuggauacgcccagaccuaaugacggcuccauuaccggcccaugugagagcgauggggacaaaggaucggguggcaucaaagggggauuugugcaucagaggauggcuucuaagauaggccggugguacucccguacaaugucaaagacuaagcgcauggguauggggcucuauguaaaauacgacggcgaucccuggaccgacagugaagcccuugcucugagcggaguuaugguguccauggaggaaccgggcugguacucuuucggguuugagauuaaggauaaaaagugcgacgucccuuguaucggaaucgaaauggugcacgaugguggcaaaacaacuuggcauagcgccgcaaccgccauuuauugcuugauggggucaggacagcuacugugggacacagugaccggcgucgauauggcucucuga

SEQ ID NO: 157982 - RNA, 1398 nt, Artificial Sequence
  derived and/or modified CDS sequence (opt3) from neuraminidase__InfluenzaB__AHL91182
augcugcccagcaccauccagacacucacucuuuuccugacguccggcgggguguuguuaucucuguacgucucagcccuacucaguuaucugcuuuacagcgacauucuguugaaguuuuccccuaaaauaaucgcuccaaccaugucucucgauugcgcaaacgccucgaauguucaagcggugaaccacucagcuacaaaggagaugaaauuccugccgcccgaaccugaguggacuuauccaagacugagcugucagggaaguaccuuucagaaggcccucuuaauuucuccccauagguucggugaagcaaaaggcaauuccgccccucugaucauucgggagccauuuaucgcuugcgggcccaaggaauguaagcacuucgcacuuacacauuacgccgcucagccuggaggcuauuacaacgguacccgcgaggaccgaaauaaauugcgucaccugauaagcguaaaccuagggaagaucccaacuguggaaaauuccauuuuucauauggccgcguggucaggaagugcaugccacgauggcagagaauggacauauaucggcgucgacgggccggauagcaacgcccucauuaaaaucaaguacggagaggcuuacaccgacacguaucacucuuacgccaauaacauacugaggacucaagaauccgcauguaauugcauugguggcgauuguuaucuuaugaucaccgacgggucagcuagcggaauuaguaaaugccgguuccugaagauccgcgagggcagaaucauuaaggagauauuucccacagguaggguggaacauacugaggaauguaccugcggguucgccucuaacaaaacaaucgagugugcgugccgggauaauuccuacaccgccaagcgcccuuuuguuaaauugaacguggaaacggacacugcagagauucgacucaugugcacagagaccuaucuggauacuccaagacccgacgauggaagcaucacaggcccuugugaaucgaauggcgacaaggggaggggaggugucaaaggcggguucgugcaccagcggauggcuucuaagauaggacguugguacucccgcaccaugucaaaaacgaagagaaugggcauggaguuauauguaaaguacgacggugauccauggaccgacagugaugcccuggcucccagcgggguuaugguguccauggaggagccgggcugguacucuuuuggauucgaaauuaaagacaagaaaugcgaugucccuuguaucggcaucgagauggugcaugacgggggaaagaggacauggcacagcgccgcaacugccauuuauugccucauggguucaggccagcuucugugggauaccgugacaggggucgacauggcuuuguga

SEQ ID NO: 157983 - RNA, 1398 nt, Artificial Sequence
  derived and/or modified CDS sequence (opt3) from neuraminidase__InfluenzaB__AHL91193
augcugcccagcaccauccagacacucacucuuuuccugacguccggcgggguguuguuaucucuguacgucucagcccuacucaguuaucugcuuuacagcgacauucuguugaaguuuuccccuaaaauaaucgcuccaaccaugucucucgauugcgcaaacgccucgaauguucaagcggugaaccacucagcuacaaaggagaugaaauuccugccgagcgaacccgaguggacuuauccuagacugaguugucagggauccaccuuucagaaggcccucuuaauuucuccacauagguucggugaagcaaaaggcaauagcgcuccccugaucauucgggagccuuuuaucgccugcgggccaaaggaauguaagcacuucgcacuuacacauuacgccgcucagcccggaggcuauuacaacgguacccgcgaggaccgaaauaaauugcgucaccugauauccguaaaccuagggaagaucccuacuguggaaaauucaauuuuucauauggccgcguggaguggaagcgcaugccacgauggcagagaauggacauauaucggcgucgacgggccagauucuaacgcccucauuaaaaucaaguacggagaggcuuacaccgacacguaucacuccuacgccaauaacauacugaggacucaagaaucagcauguaauugcauugguggcgauuguuaucuuaugaucaccgacgggagcgcuaguggaauuucuaaaugccgguuccugaagauccgcgagggcagaaucauuaaggagauauuuccgacagguaggguggaacauacugaggaauguaccugcggguucgccuccaacaaaacaaucgagugugcgugccgggauaauagcuacaccgccaagcgccccuuuguuaaauugaacguggaaacggacacugcagagauucgacucaugugcacagagaccuaucuggauacuccuagaccagacgauggaucgaucacaggccccugugaaucuaauggcgacaaggggaggggaggugucaaaggcggguucgugcaccagcggauggcuuccaagauaggacguugguacucacgcaccaugaguaaaacgaagagaaugggcauggaguuauauguaaaguacgacggugauccuuggaccgacagcgaugcccuggcuccauccgggguuauggugucuauggaggagcccggcugguacagcuuuggauucgaaauuaaagacaagaaaugcgaugucccguguaucggcaucgagauggugcaugacgggggaaagaggacauggcacucagccgcaacugccauuuauugccucauggguaguggccagcuucugugggauaccgugacaggggucgacauggcuuuguga

SEQ ID NO: 157984 - RNA, 1398 nt, Artificial Sequence
  derived and/or modified CDS sequence (opt3) from neuraminidase__InfluenzaB__AHL91204
augcugcccagcaccauccagacacucacucuuuuccugacguccggcgggguguuguuaucucuguacgucucagcccuacucaguuaucugcuuuacagcgacguucuguugaaguuuuccccuaaaauuauagcuccaaccaugucucucgauugcgcaaacgccucgaaugugcaagcgguaaaccacucagcuacagaggaaaugacuuuccugcugccggagcccgaauggaccuauccuagacucagcugucagggaaguacauuucagaaggccuuacugaucuccccacauagguucggugaggcaaaaggcaauucugcuccccuuauuauccgggaaccuuuuauugcuugcgggccaaaggaguguaaacacuucgcauugacccauuacgccgcucagcccggaggcuauuacaacgguacucgcgaggaccgaaauaagcugcgucaccuaaucagcgugaaccucgggaagauaccuacagucgaaaauuccaucuuucauauggccgcguggucaggaagugcaugccacgauggcagagaguggaccuauauuggcguggacgggccagauagcaacgcccugaucaaaauuaaguacggagaagccuacacggacacuuaucacucuuacgccaauaacauccuuaggacccaagaguccgcauguaauugcauagguggcgauuguuaucugaugauuacagacgggucagcuagcggaaucaguaaaugccgguucuugaagauucgcgagggcagaaucaucaaagaaauuuuuccgacugguaggguugagcauaccgaagaguguacaugcggguucgccucuaacaagaccauagaaugugcgugccgggauaauaucuacacggccaagcgccccuuugugaaacucaacgucgagacugacacagcagagauucgacugaugugcaccgaaacuuauuuagauacaccuagaccagacgauggauccaucaccggccccugugagagcaauggcgacaaggggcacggagguauaaaaggcggguucgugcaucagaggauggcuucgaagauuggacggugguacucucguacgauguccaaaaccaagcgcaugggcauggaacuguauguaaaauacgacggugauccuuggacagacucagaugcccucgcuccaagugggguuauggugagcauggaggaacccggcugguacuccuuuggauucgagaucaaggacaagaaaugcgaugucccguguaucggcauugagauggugcacgacgggggaaagaaaacuuggcacucugccgcaaccgccaucuauugccuuauggguagcggccagcuguugugggauacagugacuggggucgacauggcucuauga

SEQ ID NO: 157985 - RNA, 1398 nt, Artificial Sequence
  derived and/or modified CDS sequence (opt3) from neuraminidase__InfluenzaB__AHL91215
augcugcccagcaccauccagacacucacucuuuuccugacguccggcgggguguuguuaucucuguacgucucaacccuacucaguuaucugcuuuacagcgacauucuguugaaguuuuccccuaaaauaaucgccccaacaacuucucucgauugcgcuaacgcaucgaauguucaagccgugaaccacucagcgaccaaggagaugaaauuccugccgacagaacccgaguggaccuauccuagacugagcugucagggaaguacuuuucagaaggcucucuuaauuuccccacauagguucggugaagccaaaggcaauucugcaccccugaucauucgggagccuuuuaucgccugcgggccaaaggaauguaagcacuucgcucuuacacauuacgcagcccagcccggaggcuauuacaacgguacccgcgaggaccgaaauaaauugcgucaccugauaagcguaaaccuagggaagaucccuacgguggaaaauuccauuuuucauauggcugccuggucaggaagugcgugccacgauggcagagaauggacuuauaucggcgucgacgggccagauagcaacgcacucauuaaaaucaaguacggagaggccuacaccgacacauaucacucuuacgcuaauaacauacugaggacucaagaauccgccuguaauugcauugguggcgauuguuaucuuaugaucaccgacgggucagcaagcggaauuaguaaaugccgguuccugaagauccgcgagggcagaaucauuaaggagauauuuccgacagguaggguggaacauaccgaggaauguacgugcggguucgcuucuaacaaaacuaucgagugugccugccgggauaauuccuacacagcgaagcgccccuuuguuaaauugaacguggaaaccgacacugccgagauucgacucaugugcacagagaccuaucuggauacgccuagaccagacgauggaagcaucaccggccccugugaaucgaauggcgacaaggggucuggaggugucaaaggcggguucgugcaccagaggaugacauccaagauaggacggugguacucacguacuaugaguaaaaccaagcgcaugggcauggaguuauauguaaaguacgacggugauccuuggacagacagcgaugcacuggcuccauccgggguuauggugucuauggaggagcccggcugguacagcuuuggauucgaaauuaaagacaagaaaugcgaugucccguguaucggcaucgagauggugcaugacgggggaaagagaacuuggcacucagccgcuaccgccauuuauugccucauggguaguggccagcuucugugggauacagugaccggggucgacauggcauuguga

SEQ ID NO: 157986 - RNA, 1401 nt, Artificial Sequence; identical to SEQ ID NO: 156757
  derived and/or modified CDS sequence (opt3) from neuraminidase__InfluenzaB__AHL91226

SEQ ID NO: 157987 - RNA, 1401 nt, Artificial Sequence; identical to SEQ ID NO: 156758
  derived and/or modified CDS sequence (opt3) from neuraminidase__InfluenzaB__AHL91237

SEQ ID NO: 157988 - RNA, 1401 nt, Artificial Sequence; identical to SEQ ID NO: 156758
  derived and/or modified CDS sequence (opt3) from neuraminidase__InfluenzaB__AHL91248

SEQ ID NO: 157989 - RNA, 1401 nt, Artificial Sequence; identical to SEQ ID NO: 156757
  derived and/or modified CDS sequence (opt3) from neuraminidase__InfluenzaB__AHL91259

SEQ ID NO: 157990 - RNA, 1401 nt, Artificial Sequence; identical to SEQ ID NO: 156757
  derived and/or modified CDS sequence (opt3) from neuraminidase__InfluenzaB__AHL91270

SEQ ID NO: 157991 - RNA, 1398 nt, Artificial Sequence; identical to SEQ ID NO: 156729
  derived and/or modified CDS sequence (opt3) from neuraminidase__InfluenzaB__AHL91281

SEQ ID NO: 157992 - RNA, 1401 nt, Artificial Sequence
  derived and/or modified CDS sequence (opt3) from neuraminidase__InfluenzaB__AHL91303
augcugcccagcaccauccagacacucacucuuuuccugacguccggcgggguguuguuaucucuguacgucucagccagucuaagcuaucuccuguacuccgacauucuucugaaguuuucuccuaccgagauaacagcuccaacuaugccguuggauugcgcaaacgccucgaauguucaagcggugaacagaucagcuaccaaaggaguaacacuccugcugcccgaaccugaguggaccuauccaaggcucagcugucccgguaguacuuuccagaaggccuuacugaucuccccucaccgguuuggcgaaacaaaaggaaauucugcaccacuuauuauccgcgagcccuucauugccugcgggccuaaggaauguaaacauuuugcuuugacccacuacgcagcccagccaggcgguuauuacaacgggacgcgagaggaccguaauaagcugagacaucuaaucagcgugaagcucggaaaaauaccgacugucgagaacuccaucuuccacauggcugccuggucaggcagugcgugccaugauggcagggaauggaccuauauugggguggacggacccgauagcaaugcacugcuuaagaucaaauacggugaggccuacacagacacuuaucacucuuacgcuaacaauauucugcggacccaggaauccgccuguaacugcaucggcggggauuguuauuugaugauaacagacggaucagcaagcggcauuaaugagugccgcuuucucaagaucagagaggguaggauuaucaaagaaaucuucccuaccgggcggguugagcacacggaagaguguacuugcggauuugcuaguaacaagacaauugaaugugccugccgcgauaauucuuacaccgcgaagcgaccauucgugaaacugaacgucgagacugacacagccgagauaagauuaaugugcaccgaaacguaucuggauacccccaggccugacgauggcuccaucacaggcccaugugagagcaauggggacaagggaucggguggcauuaaagggggauuugugcaucaacggauggcaucuaagaucggccguugguacucccgcacuaugucaaaaaccagaaggauggguauggggcucuauguaaaguacgacggcgaucccuggacagacagugaugcucuugcccugagcggaguuaugguguccauggaggaaccgggcugguacucuuucggguuugaaauaaaagacaagaagugcgaugucccuuguauuggaaucgagauggugcacgacgguggcaaaaagacuuggcauagcgcugccaccgcaaucuauugcuugauggggucaggacagcuacugugggauacagugaccggcgucgacauggcccucuga

SEQ ID NO: 157993 - RNA, 1401 nt, Artificial Sequence; identical to SEQ ID NO: 156758
  derived and/or modified CDS sequence (opt3) from neuraminidase__InfluenzaB__AHL91314

SEQ ID NO: 157994 - RNA, 1401 nt, Artificial Sequence; identical to SEQ ID NO: 156758
  derived and/or modified CDS sequence (opt3) from neuraminidase__InfluenzaB__AHL91325

SEQ ID NO: 157995 - RNA, 1401 nt, Artificial Sequence
  derived and/or modified CDS sequence (opt3) from neuraminidase__InfluenzaB__AHL91347
augcugcccagcaccauccagacacucacucuuuuccugacguccggcgggguguuguuaucucuguacgucucagccagucuaagcuaucuccuguacuccgacguucuucugaaguuuucuccuaccgagauuacagcuccaacuaugccguuggauugcgcaaacgccucgaaugugcaagcgguaaacagaucagcuaccaaaggagugacacuccugcugcccgaaccugaguggaccuauccaaggcucagcugucccgguaguacuuuccagaaggccuuacugauauccccucaccgguuuggcgaaacaaaaggaaauucugcaccacuuaucauucgcgagcccuucaucgccugcgggccuaaggaauguaaacauuuugcuuugacccacuacgcagcccagccaggcgguuauuacaacgggacgcgagaggaccguaauaagcugagacaucuaauuagcgucaagcucggaaaaaucccgacuguggagaacuccauauuccacauggcugccuggucaggcagugcgugccaugauggcagggaauggaccuauaucgggguugacggacccgauagcaaugcacugcuuaagauuaaauacggugaggccuacacagacacuuaucacucuuacgcuaacaauauccugcggacccaggaauccgccuguaacugcauuggcggggauuguuauuugaugaucacagacggaucagcaagcggcauaagugagugccgcuuucucaagauuagagaggguaggaucgugaaagaaauuuucccuaccgggcgggucgagcacacggaagaguguacuugcggauuugcuucuaauaagacaaucgaaugugccugccgcgauaacuccuacaccgcgaagcgaccauucgugaaacugaauguagagacugacacagccgagaucagauuaaugugcaccgaaacguaucuggauacccccaggccugaggacggcagcauuacaggcccaugugaaucgaacggggauaagggaucugguggcauaaaagggggauuuguucaucaacggauggcauccaagaucggccguugguacucacgcacuaugaguaaaaccaagagaauggguauggggcucuaugugaaauacgacggcgaccccuggacagauagcgacgcucuugcccuguccggagucauggugucuauggaggaaccgggcugguacagcuucggguuugagauuaaggauaagaaaugcgacgugccuuguaucggaauagagaugguccacgaugguggcaaggaaacuuggcauucagcugccaccgcaauuuauugcuugauggggaguggacagcuacugugggacacaguuaccggcguggauauggcccucuga

SEQ ID NO: 157996 - RNA, 1401 nt, Artificial Sequence; identical to SEQ ID NO: 157995
  derived and/or modified CDS sequence (opt3) from neuraminidase__InfluenzaB__AHL91358

SEQ ID NO: 157997 - RNA, 1401 nt, Artificial Sequence; identical to SEQ ID NO: 156733
  derived and/or modified CDS sequence (opt3) from neuraminidase__InfluenzaB__AHL91369

SEQ ID NO: 157998 - RNA, 1401 nt, Artificial Sequence; identical to SEQ ID NO: 156733
  derived and/or modified CDS sequence (opt3) from neuraminidase__InfluenzaB__AHL91380

SEQ ID NO: 157999 - RNA, 1401 nt, Artificial Sequence
  derived and/or modified CDS sequence (opt3) from neuraminidase__InfluenzaB__AHL91391
augcugcccagcaccauccagacacucacucuuuuccugacguccggcgggguguuguuaucucuguacgucucagccagucuaagcuaucuccuguacuccgacauucuucugaaguuuucuccuaaagagauaaccgcuccaacaaugccguugaacugcgcaaaugccucgaacguucaagcggugaauagaucagcuacuaagggaguaacccucccccugccugaaccagaguggacauaucccaggcugagcuguccugguaguaccuuccagaaagcccucuuaaucuccccacaccgguuuggcgaaacuaaggggaacucugcaccccugauuauccgcgagccuuucauugccugcggaccaaaagaauguaagcauuuugcucuuacacacuacgcagcccagccgggcgguuauuacaaugggacccgagaggaucguaacaaguugagacaucugaucagcgugaaacuaggaaagauacccacggucgaaaauuccaucuuccacauggcugccuggucaggcagugcgugccaugacggcagggaauggacuuauauugggguggauggaccugacaacaaugcacuccugaaaaucaaguacggugaggccuacaccgauacauaucacagcuacgcuaacaauauucuucggacucaggaaucugccuguaacugcaucggcggggacuguuaucugaugauaaccgauggauccgcaucaggcauuagcgagugccgcuuuuugaaaaucagagaggguaggauuaucaaggaaaucuucccaacagggcggguugagcacaccgaagaguguacgugcggauuugcuaguaauaagacuauugaaugugccugccgcgacaacucuuacacagcgaaacgacccuucgugaagcucaaugucgagaccgauacugccgagauaagacugaugugcacagaaaccuauuuagacacgccuaggccagaugacggcuccaucaccggccccugugagagcaacggggauaaaggaucggguggcauuaaagggggauuugugcaucaacggauggcaucuaagaucggccguugguacucccgcacaaugucaaagacuaaaagaauggguauggggcuguauguaaaguacgacggcgacccguggauagauagugacgcucucacccuuagcggaguuaugguguccauggaggagccuggcugguacucuuucggguuugaaauuaaggauaaaaagugcgacguccccuguaucggaaucgagauggugcacgaugguggcaaaacaacuuggcauagcgccgcuaccgccauuuauugccugauggggucaggacaguugcuaugggacacagugaccggcgucgauauggcacuguga

SEQ ID NO: 158000 - RNA, 1401 nt, Artificial Sequence
  derived and/or modified CDS sequence (opt3) from neuraminidase__InfluenzaB__AHL91413
augcugcccagcaccauccagacacucacucuuuuccugacguccggcgggguguuguuaucucuguacgucucagccagucuaagcuaucuccuguacuccgacauucuucugaaguuuaccccuacagagauaacugcuccaaccaugccguuggauugcgcaaacgccucuaauguucaagcggugaaccucucggcuacaaaaggaguaacccugcugcuccccgaaccugaguggacuuauccaagauuaucaugucccgguagcacauuccagaaggcccugcuuaucaguccucacagguuuggcgaaaccaaaggcaauuccgcaccauugauuauccgggagcccuucauugccugcggaccuaaggaauguaaacauuuugcucugacgcacuacgcagcccagccaggcgguuauuacaacgggacucgcgaggaccgaaauaagcuacgucaucucaucucugugaagcugggaaaaauaccgaccgucgagaacagcaucuuccacauggcugccugguccggcucagcgugccaugauggcaaggaauggacauauauugggguggacggacccgauaguaaugcacuucugaaaaucaaguacggugaggccuacacugacaccuaucacagcuacgcuaacaauauuuugagaacacaggaaucugccuguaacugcaucggcgggaauuguuaucucaugauaaccgauggauccgcaucaggcauuagcgagugcagguuucugaaaauccgggagggucgcauuaucaaggaaaucuucccuacggggagaguuaagcacacugaggaauguacaugcggauuugcuaguaacaaaaccauugagugugccugcagggacaauucuuacacugcgaagcggccauucgugaaauuaaacgucgaaacagauaccgccgagauacgccugaugugcacggagaccuaucucgacacaccccgaccugaugacggcuccaucacuggcccaugugaaagcaaugggaacaagggaucggguggcauuaaagggggauuugugcaucaaagaauggcaucuaagaucgggaggugguacucccggaccaugucaaaaacaaagcguauggguauggggcuuuauguaaaguacgauggcgaccccuggacugacagugaugcucuggccuugagcggaguuaugguguccauggaggaaccgggcugguacucuuucggguuugagauaaaagacaagaaaugcgaugucccuuguauuggaaucgaaauggugcacgacgguggcaaggagaccuggcauagcgcugccacagcaaucuauugccuaauggggucaggacagcugcucugggauaccgugacuggcgucgacauggcccuguga

SEQ ID NO: 158001 - RNA, 1401 nt, Artificial Sequence
  derived and/or modified CDS sequence (opt3) from neuraminidase__InfluenzaB__AHL91446
augcugcccagcaccauccagacacucacucuuuuccugacguccggcgggguguuguuaucucuguacgucucagccagucuaagcuaucuccuguacuccgacauucuucugaaguuuucuccuaccgagauaacagcuccaacuaugccguuggauugcgcaaacgccucgaauguucaagcggugaacagaucagcuaccaaaggaaugacacuccugcugcccgaaccugaguggaccuauccaaggcucagcugucccgguaguacuuuccagaaggccuuacugaucuccccucaccgguuuggcgaaacaaaaggaaauucugcaccacuuauuauccgcgagcccuucauugccugcgggccuaaggaauguaaacauuuugcuuugacccacuacgcagcccagccaggcgguuauuacaacgggacgcgagaggaccguaauaagcugagacaucuaaucagcguaaagcucggaaaaauaccgacuguggagaacuccaucuuccacauggcugccuggucaggcagugcgugccaugauggcaaggaauggaccuauauuggggucgacggacccgauagcaaugcacugcuuaaaaucaaguacggugaggccuacacagacacuuaucacucuuacgcuaacaauauucugaggacccaggaauccgccuguaacugcaucggcgggaauuguuauuugaugauaacagauggaucagcaagcggcauuagugagugccgguuucucaaaauccgcgaggguagaauuaucaaggaaaucuucccuaccgggaggguggagcacacggaagaguguacuugcggauuugcuucuaacaagacaauugaaugugccugccgggacaauuccuacaccgcgaaacgcccauucguuaagcugaacguggagacugauacagccgagauacgauuaaugugcaccgaaacguaucuggacacccccagaccugaugacggcagcaucacaggcccaugugagucgaaugggggaaaagguucuggcgggauuaagggaggcuuuguccaucaaaggauggaauccaaaaucggucggugguacucacguacuaugaguaagaccaaacgcauggggaugggccucuaugugaaguacgauggagaccccuggacagacagcgaugcacuugcucuguccggcguaaugguuucuauggaggaaccggggugguacagcuucggauuugagauaaaggacaaagagugcgaugugccuuguauugguaucgaaaugguccacgacggcgggaaggagacuuggcauucagccgcuaccgccaucuauugcuugaugggaaguggccagcuacugugggauacagugaccggugugaacauggcacucuga

SEQ ID NO: 158002 - RNA, 1401 nt, Artificial Sequence
  derived and/or modified CDS sequence (opt3) from neuraminidase__InfluenzaB__AHL91457
augcugcccagcaccauccagacacucacucuuuuccugacguccggcgggguguuguuaucucuguacgucucagccagucuaagcuaucuccuguacuccgacauucuucugaaguuuucuccuaccgagauaacagcuccaaucaugccguuggauugcgcaaacgccucgaauguucaagcggugaacagaucagcuacuaaaggaguaacccuccugcugcccgaaccugaguggacauauccaaggcucagcugucccgguaguaccuuccagaaggccuuacugauuuccccucaccgguuuggcgaaacuaaaggaaauucugcaccacuuaucauucgcgagcccuucaucgccugcgggccuaaggaauguaaacauuuugcuuugacacacuacgcagcccagccaggcgguuauuacaacgggacccgaggagaccguaauaagcugagacaucuaauaagcgugaagcucggcaaaaucccgacggucgagaacuccauuuuccacauggcugccuggucaggcagugcgugccaugaugggaaggaguggacuuauaucggaguggacggucccgauaauaacgcacugcuuaaaauuaaguacggcgaagccuacaccgacacauaucacagcuacgcuaauaacacucugaggacccaggagucugccuguaauugcaucgggggaaacuguuauuugaugauaacagauggcuccgcaucagguauuagcgaaugccgguuucucaaaauccgcgaggggagaauuaucaaggagaucuucccuaccggaaggguuaagcacacggaagaguguacuugcggcuuugcuaguaauaaaacaauugaaugugccugccgggacaacucuuacaccgcgaagcgcccauucgugaaacugaaugucgagacugauacagccgaaauacgauuaaugugcaccgagacguaucuggacacccccagaccugaugacggcuccaucacagggccaugugagagcaacggaaacaaggguucgggcgggauuaaaggaggcuuugugcaucaaaggauggcaucuaagaucggucggugguacucccguacuaugucaaaaaccaagcgcauggggaugggccucuauguaaaguacgauggagaccccuggacagacagugaugcucuugcccugagcggcguuaugguguccauggaggaaccggggugguacucuuucggauuugaaauaaaagacaagaaaugcgaugucccuuguauugguaucgagauggugcacgacggcgggaaggaaacuuggcauagcgcugccaccgcaaucuauugcuugaugggaucaggccagcuacugugggauacagugaccggugucgacauggcccucuga

SEQ ID NO: 158003 - RNA, 1401 nt, Artificial Sequence
  derived and/or modified CDS sequence (opt3) from neuraminidase__InfluenzaB__AHL91468
augcugcccagcaccauccagacacucacucuuuuccugacguccggcgggguguuguuaucucuguacgucucagccagucuaagcuaucuccuguacuccgacauucuucugaaguuuucuccuaccgagauaacagcuccaacuaugccguuggauugcgcaaacgccucgaauguucaagcggugaacagaucagcuaccaaaggaguaacacuccugcugcccgaaccugaguggaccuauccaaggcucagcugucccgguaguacuuuccagaaggccuuacugaucuccccucaccgguuuggcgaaacaaaaggaaauucugcaccacuuauuauccgcgagcccuucauugccugcgggccuaaggaauguaaacauuuugcuuugacccacuacgcagcccagccaggcgguuauuacaacgggacgcgagaggaccguaauaagcugagacaucuaaucagcgugaagcucggaaaaauaccgacugucgagaacuccaucuuccacauggcugccuggucaggcagugcgugccaugauggcaaggaauggaccuauauugggguggacggacccgauagcaaugcacugcuuaaaaucaaguacggugaggccuacacagacacuuaucacucuuacgcuaacaauauucugaggacccaggaauccgccuguaacugcaucggcgggaauuguuauuugaugauaacagauggaucagcaagcggcauuagugagugccgguuucucaaaauccgcgaggguagaauuaucaaggaaaucuucccuaccgggaggguuaagcacacggaggaauguacuugcggauuugcuucuaacaaaacaauugagugugccugccgggacaauuccuacaccgcgaagcgcccauucgugaaacugaacgucgaaacugauacagccgagauacgauuaaugugcaccgagacguaucuggacacccccagaccugaugacggcagcaucacaggcccaugugaaucgaauggggauaagggaucugguggcauuaaagggggauuugugcaucaaaggauggcauccaagaucggccggugguacucacguacuaugaguaaaaccaagcgcauggguauggggcucuauguaaaguacgacggcgaccccuggacagauagcgacgcucuugcccuguccggaguuauggugucugucggcgagccggggugguacagcuucggauuugaaauaaaagauaagaaaugcgacgugccuuguauugguaucgagauggugcacgauggcgggaaggaaacuuggcauucagcugccaccgcaaucuauugcuugaugggaaguggccagcuacugugggacacagucaccgguguugauauggcccucuga

SEQ ID NO: 158004 - RNA, 1401 nt, Artificial Sequence
  derived and/or modified CDS sequence (opt3) from neuraminidase__InfluenzaB__AHL91479
augcugcccagcaccauccagacacucacucuuuuccugacguccggcgggguguuguuaucucuguacgucucagccagucuaagcuaucuccuguacuccgacauucuucugaaguuuucuccuaccgagauaacagcuccaacuaugccgucggauugcgcaaacgccucaaauguucaagcggugaacagaagcgcuaccaaaggaguaacauugcuccugcccgaaccugaguggaccuauccaaggcugaguugucccgguuccacuuuccagaaggcccucuuaaucucuccucaccgguuuggcgaaacaaaagggaauagcgcaccacugauuauccgcgagcccuucauugccugcggaccuaaggaauguaaacauuuugcucuuacccacuacgcagcccagccaggcgguuauuacaacgggacgcgaggagaccguaauaaguugagacaucugaucuccgugaagcuaggcaaaauaccgacugucgagaacucaaucuuccacauggcugccuggaguggcagcgcgugccaugaugggaaggaguggaccuauauuggaguggacggucccgauucuaaugcacuccugaaaaucaaguacggcgaagccuacacagacacuuaucacuccuacgcuaacaauauucuuaggacccaggagucagccuguaacugcaucgggggaaauuguuaucugaugauaacagauggcagcgcaagugguauuucugaaugccgguuuuugaaaauccgcgaggggagaauuaucaaggagaucuucccuaccggaaggguuaagcacacggaagaguguacuugcggcuuugcuuccaacaaaacaauugaaugugccugccgggacaauagcuacaccgcgaagcgcccauucgugaaacucaacgucgagacugauacagccgaaauacgacugaugugcaccgagacguauuuagacacccccagaccugaugacggcucgaucacagggccaugugagucuaauggagauaaggguuccggcgggauuaaaggaggcuuugugcaucaaaggauggcaucaaagaucggucggugguacagucguacuaugagcaaaaccaagcgcauggggaugggccuguauguaaaguacgacggagaccccuggacagauuccgacgcucucgcccuuucuggcguuauggugagcauggaggaaccggggugguacucauucggauuugaaauaaaagauaagaaaugcgacgucccuuguauugguaucgagauggugcacgauggcgggaaggaaacuuggcauagugcugccaccgcaaucuauugccugaugggauccggccaguugcuaugggacacagugaccggugucgauauggcccuguga

SEQ ID NO: 158005 - RNA, 1401 nt, Artificial Sequence
  derived and/or modified CDS sequence (opt3) from neuraminidase__InfluenzaB__AHL91501
augcugcccagcaccauccagacacucacucuuuuccugacguccggcgggguguuguuaucucuguacgucucagccagucuaagcuaucuccuguacuccgacauucuucugaaguuuucuccuaccgagauaacagcuccaacuaugccguuggauugcgcaaacgccucgaauguucaagcggugaacagaucagcuaccaaaggaaugacacuccugcugcccgaaccugaguggaccuauccaaggcucagcugucccgguaguacuuuccagaaggccuuacugaucuccccucaccgguuuggcgaaacaaaaggaaauucugcaccacuuauuauccgcgagcccuucauugccugcgggccuaaggaauguaaacauuuugcuuugacccacuacgcagcccagccaggcgguuauuacaacgggacgcgagaggaccguaauaagcugagacaucuaaucagcguaaagcucggaaaaauaccgacuguggagaacuccaucuuccacauggcugccuggucaggcagugcgugccaugauggcaaggaauggaccuauauuggggucgacggacccgauagcaaugcacugcuuaaaaucaaguacggugaggccuacacagacacuuaucacucuuacgcuaacaauauucugaggacccaggaauccgccuguaacugcaucggcgggaauuguuauuugaugauaacagauggaucagcaagcggcauuagugagugccgguuucucaaaauccgcgaggguagaauuaucaaggaaaucuucccuaccgggaggguggagcacacggaagaguguacuugcggauuugcuucuaacaagacaauugaaugugccugccgggacaauuccuacaccgcgaaacgcccauucguuaagcugaacguggagacugauacagccgagauacgauuaaugugcaccgaaacguaucuggacacccccagaccugaugacggcagcaucacaggcccaugugagucgaaugggggaaaagguucuggcgggauuaagggaggcuuuguccaucaaaggauggaauccaaaaucggucggugguacucacguacuaugaguaagaccaaacgcauggggaugggccucuaugugaaguacgauggagaccccuggacagacagcgaugcacuugcucuguccggcguaaugguuucuauggaggaaccggggugguacagcuucggauuugagauaaaggacaaaaagugcgaugugccuuguauugguaucgagaugguccacgacggcgggaaagaaacuuggcauucagccgcuaccgccaucuauugcuugaugggaaguggccagcuacugugggauacagugaccggugugaacauggcacucuga

SEQ ID NO: 158006 - RNA, 1401 nt, Artificial Sequence
  derived and/or modified CDS sequence (opt3) from neuraminidase__InfluenzaB__AHL91512
augcugcccagcaccauccagacacucacucuuuuccugacguccggcgggguguuguuaucucuguacgucucagccagucuaagcuaucuccuguacuccgacauucuucugaaguuuucuccuaccgagauaacagcuccaacuaugccguuggauugcgcaaacgccucgaauguucaagcggugaacagaucagcuaccaaaggaguaacacuccugcugcccgaaccugaguggaccuauccaaggcucagcugucccgguaguaucuuccagaaggccuuacugauuuccccucaccgguuuggcgaaacuaaaggaaauucugcaccacuuaucauucgcgagcccuucaucgccugcgggccuaaggaauguaaacauuuugcuuugacacacuacgcagcccagccaggcgguuauuacaacgggacccgaggagaccguaauaagcugagacaucuaauaagcgugaagcucggcaaaaucccgacggucgagaacuccauuuuccacauggcugccuggucaggcagugcgugccaugaugggaaggaguggacuuauaucggaguggacggucccgauagcaaugcacugcuuaaaauuaaguacggcgaagccuacaccgacacauaucacucuuacgcuaacaauauccugaggacucaggaguccgccuguaacugcauagggggaaauuguuauuugaugauuaccgauggcucagcaagcgguaucagugaaugccgguuucucaaaauucgcgaggggagaaucaucaaggagauuuucccuacaggaaggguuaagcacaccgaagaguguacgugcggcuuugcuucuaacaaaacuauagaaugugccugccgggacaauuccuacacagcgaagcgcccauucgugaaacugaacgucgagaccgauacugccgaaauccgauuaaugugcacagagaccuaucuggacacgcccagaccugaugacggcagcauuaccgggccaugugagucgaauggagauaaggguucuggcgggaucaaaggaggcuuugugcaucaaaggauggcauccaagauaggucggugguacucacguacaaugaguaaaacuaagcgcauggggaugggccucuauguaaaguacgacggagaccccuggaccgauagcgacgcucuugcccuguccggcguuauggugucuauggaggaaccggggugguacagcuucggauuugaaauuaaagauaagaaaugcgacgucccuuguaucgguaucgagauggugcacgauggcgggaaggaaacauggcauucagcugccacugcaauuuauugcuugaugggaaguggccagcuacugugggacaccgugacaggugucgauauggcccucuga

SEQ ID NO: 158007 - RNA, 1401 nt, Artificial Sequence
  derived and/or modified CDS sequence (opt3) from neuraminidase__InfluenzaB__AHL91523
augcugcccagcaccauccagacacucacucuuuuccugacguccggcgggguguuguuaucucuguacgucucagccagucuaagcuaucuccuguacuccgacauucuucugaaguuuucuccuaccgagauaacagcuccaacuaugccguuggauugcgcaaacgccucgaauguucaagcggugaacagaucagcuaccaaaggaguaacacuccugcugcccgaaccugaguggaccuauccaaggcucagcugucccgguaguacuuuccagaaggccuuacugaucuccccucaccgguuuggcgaaacaaaaggaaauucugcaccacuuauuauccgcgagcccuucauugccugcgggccuaaggaauguaaacauuuugcuuugacccacuacgcagcccagccaggcgguuauuacaacgggacgcgaggagaccguaauaagcugagacaucuaaucagcgugaagcucggcaaaauaccgacugucgagaacuccaucuuccacauggcugccuggucaggcagugcgugccaugaugggaaggaguggaccuauauuggaguggacggucccgauaauaacgcacugcuuaaaaucaaguacggcgaagccuacacagacacuuaucacagcuacgcuaauaacauucugaggacccaggagucugccuguaauugcaucgggggaaacuguuauuugaugauaacagauggcuccgcaucagguauuagcgaaugccgguuucucaaaauccgcgaggggagaauuaucaaggagaucuucccuaccggaaggguuaagcacacggaagaguguacuugcggcuuugcuaguaauaaaacaauugaaugugccugccgggacaacucuuacaccgcgaagcgcccauucgugaaacugaaugucgagacugauacagccgaaauacgauuaaugugcaccgagacguaucuggacacccccagaccugaugacggcuccaucacagggccaugugagagcaacggagauaaggguucgggcgggauuaaaggaggcuuugugcaucaaaggauggcaucuaagaucggucggugguacucccguacuaugucaaaaaccaagcgcauggggaugggccucuauguaaaguacgacggagaccccuggacagauagugacgcucuugcccugagcggcguuaugguguccauggaggaaccggggugguacucuuucggauuugaaauaaaagauaagaaaugcgacgucccuuguauugguaucgagauggugcacgauggcgggaaggaaacuuggcauagcgcugccaccgcaaucuauugcuugaugggaucaggccagcuacugugggacacagugaccggugucgauauggcccucuga

SEQ ID NO: 158008 - RNA, 1401 nt, Artificial Sequence; identical to SEQ ID NO: 158005
  derived and/or modified CDS sequence (opt3) from neuraminidase__InfluenzaB__AHL91534

SEQ ID NO: 158009 - RNA, 1401 nt, Artificial Sequence
  derived and/or modified CDS sequence (opt3) from neuraminidase__InfluenzaB__AHL91545
augcugcccagcaccauccagacacucacucuuuuccugacguccggcgggguguuguuaucucuguacgucucagccagucuaagcuaucuccuguacuccgacauucuucugaaguuuucuccuaccgagauaacagcuccaacuaugccguuggauugcgcaaacgccucgaauguucaagcggugaacagaucagcuaccaaaggaguaacacuccugcugcccgaaccugaguggaccuauccaaggcucagcugucccgguaguacuuuccagaaggccuuacugaucuccccucaccgguuuggcgaaacaaaaggaaauucugcaccacuuauuauccgcgagcccuucauugccugcgggccuaaggaauguaaacauuuugcuuugacccacuacgcagcccagccaggcgguuauuacaacgggacgcgaggagaccguaauaagcugagacaucuaaucagcgugaagcucggcaaaauaccgacugucgagaacuccaucuuccacauggcugccuggucaggcagugcgugccaugaugggaaggaguggaccuauauuggaguggacggucccgauagcaaugcacugcuuaaaaucaaguacggcgaagccuacacagacacuuaucacucuuacgcuaacaauauucugaggacccaggaguccgccuguaacugcaucgggggaaauuguuauuugaugauaacagauggcucagcaagcgguauuagugaaugccgguuucucaaaauccgcgaggggagaauuaucaaggagaucuucccuaccggaaggguuaagcacacggaagaguguacuugcggcuuugcuucuaacaaaacaauugaaugugccugccgggacaauuccuacaccgcgaagcgcccauucgugaaacugaacgucgagacugauacagccgaaauacgauuaaugugcaccgagacguaucuggacacccccagaccugaugacggcagcaucacagggccaugugagucgaauggagauaaggguucuggcgggauuaaaggaggcuuugugcaucaaaggaugacuuccaagaucggucggugguacucacguaccaugaguaaaacaaagcgcauggggaugggccucuauguaaaguacgacggagaccccuggacugauagcgacgcacuugcucuguccggcguuauggugucuauggaggaaccggggugguacagcuucggauuugaaauaaaagauaagaaaugcgacgucccuuguauugguaucgagauggugcacgauggcgggaagggaaccuggcauucagccgcuacagccaucuauugcuugaugggcaguggucagcuacugugggacaccgugacuggggucgauauggcacucuga

SEQ ID NO: 158010 - RNA, 1401 nt, Artificial Sequence; identical to SEQ ID NO: 158005
  derived and/or modified CDS sequence (opt3) from neuraminidase__InfluenzaB__AHL91556

SEQ ID NO: 158011 - RNA, 1401 nt, Artificial Sequence; identical to SEQ ID NO: 158005
  derived and/or modified CDS sequence (opt3) from neuraminidase__InfluenzaB__AHL91578

SEQ ID NO: 158012 - RNA, 1401 nt, Artificial Sequence; identical to SEQ ID NO: 156933
  derived and/or modified CDS sequence (opt3) from neuraminidase__InfluenzaB__AHL91589

SEQ ID NO: 158013 - RNA, 1401 nt, Artificial Sequence
  derived and/or modified CDS sequence (opt3) from neuraminidase__InfluenzaB__AHL91600
augcugcccagcaccauccagacacucacucuuuuccugacgaccggcgggguguuguuaucccuguacgucucugccucacuaaguuaucuccuguacagcgacauucuucugaaguuuuccccuacagagauaacugcuccaaccaugccguuggauugcgcaaacgccucuaauguucaagcggugaacagaucggcuacaaaaggaguaaccuuccuccugcccgaaccugaguggacuuauccaaggcugucaugucccgguagcacauuucagaaggcccucuuaaucaguccucaccgguucggcgaaaccaaaggaaauuccgcaccacugauuauccgcgagcccuuuauugccugcgggccuaaggaauguaaacauuucgcucuuacgcacuacgcagcccagccaggcgguuauuacaacgggacucgaggagaccguaauaaguugagacaucugaucucugugaagcuaggcaaaauaccgaccgucgagaacagcaucuuucacauggcugccugguccggcucagcgugccaugaugggaaggaguggacauauauuggaguggacggucccgauaguaaugcacuccugaaaaucaaguacggcgaagccuacacugacaccuaucacagcuacgcuaacaauauucuuaggacacaggagucugccuguaacugcaucgggggaaauuguuaucugaugauaaccgauggcuccgcaucagguauuagcgaaugccgguucuugaaaauccgcgaggggagaauuaucaaggagaucuuuccuacgggaaggguuaagcacacugaagaguguacaugcggcuucgcuaguaacaaaaccauugaaugugccugccgggacaauucuuacacugcgaagcgcccauuugugaaacucaacgucgagacagauaccgccgaaauacgacugaugugcacggagaccuauuuagacacacccagaccugaugacggcuccaucacugggccaugugagagcaauggagauaaggguucgggcgggauuaaaggaggcuucgugcaucaaaggauggcaucuaagaucggucggugguacucccguaccaugucaaaaacaaagcgcauggggaugggccuguauguaaaguacgacggagaccccuggacugauagugacgcucucgcccuuagcggcguuaugguguccauggaggaaccggggugguacucuuuuggauucgaaauaaaagauaagaaaugcgacgucccuuguauugguaucgagauggugcacgauggcgggaaggaaaccuggcauagcgcugccacagcaaucuauugccugaugggaucaggccaguugcuaugggacaccgugacuggugucgauauggcccuguga

SEQ ID NO: 158014 - RNA, 1401 nt, Artificial Sequence; identical to SEQ ID NO: 158013
  derived and/or modified CDS sequence (opt3) from neuraminidase__InfluenzaB__AHL91611

SEQ ID NO: 158015 - RNA, 1401 nt, Artificial Sequence; identical to SEQ ID NO: 158005
  derived and/or modified CDS sequence (opt3) from neuraminidase__InfluenzaB__AHL91622

SEQ ID NO: 158016 - RNA, 1401 nt, Artificial Sequence; identical to SEQ ID NO: 158006
  derived and/or modified CDS sequence (opt3) from neuraminidase__InfluenzaB__AHL91633

SEQ ID NO: 158017 - RNA, 1401 nt, Artificial Sequence; identical to SEQ ID NO: 158006
  derived and/or modified CDS sequence (opt3) from neuraminidase__InfluenzaB__AHL91644

SEQ ID NO: 158018 - RNA, 1401 nt, Artificial Sequence
  derived and/or modified CDS sequence (opt3) from neuraminidase__InfluenzaB__AHL91655
augcugcccagcaccauccagacacucacucuuuuccugacguccggcgggguguuguuaucucuguacgucucagccagucuaagcuaucuccuguacuccgacauucuucugaaguuuucuccuaccgagauaacagcuccaacuaugccguuggauugcgcaaacgccucgaauguucaagcggugaacagaucagcuaccaaagaaguaacacuccugcugcccgagccugaauggaccuauccaaggcucagcugucccggaaguacuuuccagaaggccuuacugaucuccccucaccgguuuggugagacaaaaggcaauucugcaccacuuauuauccgcgaacccuucauugccugcgggccuaaggaguguaaacauuuugcuuugacccacuacgcagcccagccaggaggcuauuacaacgguacgcgaggggaccguaauaagcugagacaucuaaucagcgugaagcucggaaaaauaccgacugucgagaacuccaucuuccacauggcugccuggucaggcagugcgugccaugauggcaaggaauggaccuauauugggguggacggacccgauagcaaugcacugcuuaaaaucaaguacggugaggccuacacagacacuuaucacucuuacgcuaacaauauucugaggacccaggaauccgccuguaacugcaucggcgggaauuguuauuugaugauaacagauggaucagcaagcggcauuagugagugccgguuucucaaaauccgcgaggguagaauuaucaaggaaaucuucccuaccgggaggguuaagcacacggaggaauguacuugcggauuugcuucuaacaaaacaauugagugugccugccgggacaauuccuacaccgcgaagcgcccauucgugaaacugaacgucgaaacugauacagccgagauacgauuaaugugcaccgagacguaucuggacacccccagaccugaugacggcagcaucacaggcccaugugaaucgaauggggauaagggaucugguggcauuaaagggggauuugugcaucaaaggauggcauccaagaucggccggugguacucacguacuaugaguaaaaccaagcgcauggguauggggcucuauguaaaguacgacggcgaccccuggacagauagcgacgcucuugcccuguccggaguuauggugucuauggaggaaccgggcugguacagcuucggguuugagauaaaagauaagaaaugcgacgucccuuguauuggaaucgaaauggugcacgaugguggcaaggagacuuggcauucagcugccaccgcaaucuauugcuugauggggaguggacagcuacugugggacacagugaccggcgucgauauggcccucuga

SEQ ID NO: 158019 - RNA, 1401 nt, Artificial Sequence; identical to SEQ ID NO: 158005
  derived and/or modified CDS sequence (opt3) from neuraminidase__InfluenzaB__AHL91666

SEQ ID NO: 158020 - RNA, 1401 nt, Artificial Sequence; identical to SEQ ID NO: 158006
  derived and/or modified CDS sequence (opt3) from neuraminidase__InfluenzaB__AHL91677

SEQ ID NO: 158021 - RNA, 1401 nt, Artificial Sequence; identical to SEQ ID NO: 158007
  derived and/or modified CDS sequence (opt3) from neuraminidase__InfluenzaB__AHL91688

SEQ ID NO: 158022 - RNA, 1401 nt, Artificial Sequence; identical to SEQ ID NO: 156735
  derived and/or modified CDS sequence (opt3) from neuraminidase__InfluenzaB__AHL91699

SEQ ID NO: 158023 - RNA, 1401 nt, Artificial Sequence
  derived and/or modified CDS sequence (opt3) from neuraminidase__InfluenzaB__AHL91710
augcugcccagcaccauccagacacucacucuuuuccugacguccggcgggguguuguuaucucuguacgucucagccagucuaagcuaucuccuguacuccgacauucuucugaaguuuucuccuaccgagauaacagcuccaacuaugccguuggauugcgcaaacgccucgaauguucaagcggugaaccacucagcuaccaaaggaguaacacuccugcugcccgaaccugaguggaccuauccaagacucagcugucccgguaguacuuuccagaaggccuuacugaucuccccucauagguuuggcgaaacaaaaggaaauucugcaccacuuauuauccgggagcccuucauugccugcgggccuaaggaauguaaacacuuugcuuugacccauuacgcagcccagccaggcgguuauuacaacgggacgcgcggagaccgaaauaagcugcgucaccuaaucagcgugaagcucggcaaaauaccgacugucgagaacuccaucuuccauauggcugccuggucaggcagugcgugccacgaugggaaggaguggaccuauauuggaguggacggucccgauagcaaugcacugcuuaaaaucaaguacggcgaagccuacacagacacuuaucacucuuacgcuaacaauauucugagaacccaggaguccgccuguaacugcaucgggggaaauuguuauuugaugauaacagauggcucagcaagcgguauuagugaaugcagguuucucaaaauccgggaggggcgcauuaucaaggagaucuucccuaccggaagaguuaagcauacggaagaguguacuugcggcuuugcuucuaacaaaacaauugaaugugccugcagggacaauuccuacaccgcgaagcggccauucgugaaacugaacgucgagacugauacagccgaaauacgcuuaaugugcaccgagacguaucuggacacaccccgaccugaugacggcagcaucaccgggccaugugagucgaauggagauaaggguucuggcgggauuaaaggaggcuuugugcaccaaagaauggcauccaagaucgguaggugguacucacggacuaugaguaaaaccaagcguauggggaugggccucuauguaaaguacgacggagaccccuggacagauagcgacgcucuugcccuguccggcguuauggugucuauggaggaaccggggugguacagcuucggauuugaaauaaaagauaagaaaugcgacgucccuuguauugguaucgagauggugcaugauggcgggaaggaaacuuggcacucagcugccaccgcaaucuauugcuugaugggaaguggccagcuacugugggacacagugaccggugucgauauggcccucuga

SEQ ID NO: 158024 - RNA, 1401 nt, Artificial Sequence; identical to SEQ ID NO: 156662
  derived and/or modified CDS sequence (opt3) from neuraminidase__InfluenzaB__AHL91721

SEQ ID NO: 158025 - RNA, 1401 nt, Artificial Sequence; identical to SEQ ID NO: 156730
  derived and/or modified CDS sequence (opt3) from neuraminidase__InfluenzaB__AHL91732

SEQ ID NO: 158026 - RNA, 1401 nt, Artificial Sequence; identical to SEQ ID NO: 156662
  derived and/or modified CDS sequence (opt3) from neuraminidase__InfluenzaB__AHL91743

SEQ ID NO: 158027 - RNA, 1401 nt, Artificial Sequence
  derived and/or modified CDS sequence (opt3) from neuraminidase__InfluenzaB__AHL91754
augcugcccagcaccauccagacacucacucuucuguugacguccggcgggguguuacugucucuauacgucucagccagucucagcuaucugcuuuacuccgacauucuguugaaguucucuccuaccgagauaacagcuccaacuaugccgcucgauugcgcaaacgccucgaauguucaagcggugaacagaucagcuaccaaaggaguaacacugcugcuccccgaaccugaguggaccuauccaagguuaagcugucccgguaguacuuuucagaaggcccugcuuaucuccccucaccgguucggcgaaacaaaaggaaauucugcaccauugauuauccgcgagcccuuuauugccugcgggccuaaggaauguaaacauuucgcucugacccacuacgcagcccagccaggcgguuauuacaacgggacgcgaggagaccguaauaagcuaagacaucucaucagcgugaagcugggcaaaauaccgacugucgagaacuccaucuuucacauggcugccuggucaggcagugcgugccaugaugggaaggaguggaccuauauuggaguggacggucccgauagcaaugcacuucugaaaaucaaguacggcgaagccuacacagacacuuaucacucuuacgcuaacaauauuuugaggacccaggaguccgccuguaacugcaucgggggaaauuguuaucucaugauaacagauggcucagcaagcgguauuagugaaugccgguuccugaaaauccgcgaggggagaauuaucaaggagaucuuuccuaccggaaggguuaagcacacggaagaguguacuugcggcuucgcuucuaacaaaacaauugaaugugccugccgggacaauuccuacaccgcgaagcgcccauuugugaaauuaaacgucgagacugauacagccgaaauacgacugaugugcaccgagacguaucucgacacccccagaccugaugacggcagcaucacagggccaugugagucgaauggagauaaggguucuggcgggauuaaaggaggcuucgugcaucaaaggauggcauccaagaucggucggugguacucacguacuaugaguaaaaccaagcgcauggggaugggccuuuauguaaaguacgacggagaccccuggacagauagcgacgcucuggccuuguccggcguuauggugucuauggaggaaccggggugguacagcuuuggauucgaaauaaaagauaagaaaugcgacgucccuuguauugguaucgagauggugcacgauggcgggaaggaaacuuggcauucagcugccaccgcaaucuauugccuaaugggaaguggccagcugcucugggacacagugaccggugucgauauggcccuguga

SEQ ID NO: 158028 - RNA, 1401 nt, Artificial Sequence; identical to SEQ ID NO: 156662
  derived and/or modified CDS sequence (opt3) from neuraminidase__InfluenzaB__AHL91765

SEQ ID NO: 158029 - RNA, 1401 nt, Artificial Sequence
  derived and/or modified CDS sequence (opt3) from neuraminidase__InfluenzaB__AHL91776
augcugcccagcaccauccagacacucacucuuuuccugacguccggcgggguguuguuaucucuguacgucucagccagucuaagcuaucuccuguacuccgacauucuucugaaguuuucuccuaccgagauaacagcuccaacuaugccguuggauugcgcaaacgccucgaauguucaagcggugaacagaucagcuaccaaaggaguaacacuccugcugcccgaaccugaguggaccuauccaaggcucagcugucccgguaguacuuuccagaaggccuuacugaucuccccucaccgguuuggcgaaacaaaaggaaauucugcaccacuuauuauccgcgagcccuucauugccugcgggccuaaggaauguaaacauuuugcuuugacccacuacgcagcccagccaggcgguuauuacaacgggacgcgaggagaccguaauaagcugagacaucuaaucagcgugaagcucggcaaaauaccgacugucgagaccuccaucuuccacauggcugccuggucaggcagugcgugccaugaugggaaggaguggacauauauuggaguggacggucccgauaacaaugcacugcuuaaaaucaaguacggcgaagccuacacugacaccuaucacagcuacgcuaacaauauucugaggacacaggagucugccuguaacugcaucgggggaaauuguuauuugaugauaaccgauggcuccgcaucagguguuagcgaaugccgguuucucaaaauucgcgaggggagaaucauuaaggagaucuucccuacgggaagggugaagcacacugaagaguguacaugcggcuuugcuaguaacaaaaccaucgaaugugccugccgggacaauucuuacacugcgaagcgcccauucgucaaacugaacguggagacagauaccgccgaaauucgauuaaugugcacggagaccuaucuggacacacccagaccugaugacggcuccauaacugggccaugugagagcaauggagauaaggguucgggcgggaucaaaggaggcuuuguacaucaaaggauggcaucuaagauuggucggugguacucccguaccaugucaaaaacagaacgcauggggaugggccucuauguuaaguacgacggagaccccugggcugauagugacgcccuugcucugagcggcgugauggucuccauggaggaaccggggugguacucuuucggauuugagaucaaggauaaaaagugcgacgugccuuguauagguauugaaauggugcacgauggcgggaaagagacuuggcauagcgccgcaaccgccaucuauugcuugaugggaucaggccagcuacugugggacacagucaccgguguugauauggcucucuga

SEQ ID NO: 158030 - RNA, 1401 nt, Artificial Sequence; identical to SEQ ID NO: 158029
  derived and/or modified CDS sequence (opt3) from neuraminidase__InfluenzaB__AHL91787

SEQ ID NO: 158031 - RNA, 1401 nt, Artificial Sequence; identical to SEQ ID NO: 158029
  derived and/or modified CDS sequence (opt3) from neuraminidase__InfluenzaB__AHL91798

SEQ ID NO: 158032 - RNA, 1401 nt, Artificial Sequence; identical to SEQ ID NO: 156666
  derived and/or modified CDS sequence (opt3) from neuraminidase__InfluenzaB__AHL91809

SEQ ID NO: 158033 - RNA, 1401 nt, Artificial Sequence
  derived and/or modified CDS sequence (opt3) from neuraminidase__InfluenzaB__AHL91820
augcugcccagcaccauccagacacucacucuuuuccugacguccggcgggguguuguuaucucuguacgucucagccagucuaagcuaucuccuguacuccgacauucuucugaaguuuucuccuaccgagauaacagcuccaacuaugccguuggauugcgcaaacgccucgaauguucaagcggugaacagaucagcuaccaaaggaguaacacuccugcugcccgaaccugaguggaccuauccaaggcucagcugucccgguaguacuuuccagaaggccuuacugaucuccccucaccgguuuggcgaaacaaaaggaaauucugcaccacuuauuauccgcgagcccuucauugccugcgggccuaacgaauguaagcauuuugcuuugacccacuacgcagcccagccaggcgguuauuacaaugggacgcgaggagaccguaacaaacugagacaucuaaucagcgugaagcucggcaagauaccgacugucgaaaauuccaucuuccacauggcugccuggucaggcagugcgugccaugaugggaaagaguggaccuauauuggaguggacggucccgauaacaaugcacugcuuaagaucaaauacggcgaggccuacacagacacuuaucacagcuacgcuaacaauauucugaggacccaggagucugccuguaacugcaucgggggaaauuguuauuugaugguuacagauggcuccgcaucaggugugagcgaaugccgguuucucaagauacgcgaggggagaauuaucaaagagauuuucccuaccggaagggucaagcacacggaagaguguacuugcggcuuugcuaguaacaagacaaucgaaugugccugccgggacaauucuuacaccgcgaaacgcccauucgugaagcugaacguagagacugauacagccgaaauccgauuaaugugcaccgagacguaucuggacacccccagaccugaugacggcuccauuacagggccaugugagagcaacggagauaaagguucgggcgggauaaagggaggcuuuguucaucaaaggauggcaucuaaaaucggucggugguacucccguacuaugucaaagaccgaacgcauggggaugggccucuaugugaaauacgacggagaccccugggcugauagugacgcccuugcucugagcggcgucaugguguccauggaggaaccggggugguacucuuucggauuugagauuaaggauaagaaaugcgacgugccuuguaucgguauagaaaugguccacgauggcgggaaggagacauggcauagcgccgcaacugccauuuauugcuugaugggaucaggccagcuacugugggacaccguuacagguguggauauggcucucuga

SEQ ID NO: 158034 - RNA, 1401 nt, Artificial Sequence
  derived and/or modified CDS sequence (opt3) from neuraminidase__InfluenzaB__AHL91831
augcugcccagcaccauccagacacucacucuuuuccugacguccggcgggguguuguuaucucuguacgucucagccagucuaagcuaucuccuguacuccgacauucuucugaaguuuucuccuaccgagauaacagcuccaacuaugccguuggauugcgcaaacgccucgaauguucaagcggugaacagaucagcuaccaaaggaguaacacuccugcugcccgaaccugaguggaccuauccaaggcucagcugucccgguaguacuuuccagaaggccuuacugaucuccccucaccgguuuggcgaaacaaaaggaaauucugcaccacuuauuauccgcgagcccuucauugccugcgggccuaacgaauguaagcauuuugcuuugacccacuacgcagcccagccaggcgguuauuacaaugggacgcgaggagaccguaacaaacugagacaucuaaucagcgugaagcucggcaagauaccgacugucgaaaauuccaucuuccacauggcugccuggucaggcagugcgugccaugaugggaaagaguggaccuauauuggaguggacggucccgauaacaaugcacugcuuaagaucaaauacggcgaggccuacacagacacuuaucacagcuacgcuaacaauauucugaggacccaggagucugccuguaacugcaucgggggaaauuguuauuugaugauaacagauggcuccgcaucagguguuagcgaaugccgguuucucaagauucgcgaggggagaaucauuaaagagaucuucccuaccggaagggugaagcacacggaagaguguacuugcggcuuugcuaguaacaagacaaucgaaugugccugccgggacaauucuuacaccgcgaaacgcccauucgucaagcugaacguggagacugauacagccgaaauucgauuaaugugcaccgagacguaucuggacacccccagaccugaugacggcuccauaacagggccaugugagagcaacggagauaaagguucgggcgggaucaagggaggcuuuguacaucaaaggaugacuucuaaaauuggucggugguacucccguaccaugucaaagacagaacgcauggggaugggccucuauguuaaauacgacggagaccccugggcagauagugacgcucuugcccugagcggcgugauggucuccauggaggaaccggggugguacucuuucggauuugagaucaaggauaagaaaugcgacgugccuuguauagguauugaaauggugcacgauggcgggaaggagacuuggcauagcgcugccaccgcaaucuauugcuugaugggaucaggccagcuacugugggacacagucaccgguguugauauggcccucuga

SEQ ID NO: 158035 - RNA, 1401 nt, Artificial Sequence; identical to SEQ ID NO: 157179
  derived and/or modified CDS sequence (opt3) from neuraminidase__InfluenzaB__AHL91842

SEQ ID NO: 158036 - RNA, 1401 nt, Artificial Sequence
  derived and/or modified CDS sequence (opt3) from neuraminidase__InfluenzaB__AHL91853
augcugcccagcaccauccagacacucacucuuuuccugacguccggcgggguguuguuaucucuguacgucucagccagucuaagcuaucuccuguacuccgacauucuucugaaguuuucuaccacagagauaacugcuccuaccaugccaucggauugcgcaaacgccucaaauguucaagcggugaacagaagcgcuacaaaaggaguaaccuugcuccugccggaacccgaguggacuuauccuaggcugaguuguccagguuccacauuccagaaggcccucuuaaucucuccccaccgguuuggcgaaaccaaagggaauagcgcaccucugauuauccgcgagccauucauugccugcggacccaaggaauguaaacauuuugcucuuacgcacuacgcagcccagccuggcgguuauuacaacgggacucgagaggaccguaauaaguugagacaucugaucuccgugaagcuaggaaaaauaccaaccgucgagaacucaaucuuccacauggcugccuggaguggcagcgcgugccaugauggcaaggaauggacauauauugggguggacggaccggauucuaaugcacuccugaaaaucaaguacggugaggccuacacugacaccuaucacuccuacgcuaacaauauucuuaggacacaggaaucagccuguaacugcaucggcgggaauuguuaucugaugauaaccgauggaagcgcaaguggcauuucugagugccgguuuuugaaaauccgcgaggguagaauuaucaaggaaaucuuccccacggggaggguuaagcacacugaggaauguacaugcggauuugcuuccaacaaaaccauugagugugccugccgggacaauagcuacacugcgaagcgcccuuucgugaaacucaacgucgaaacagauaccgccgagauacgacugaugugcacggagaccuauuuagacacaccaagacccgaugacggcucgaucacuggcccuugugaaucuaaugggaacaagggauccgguggcauuaaagggggauuugugcaucaaaggauggcaucaaagaucggccggugguacagucguaccaugagcaaaacaaagcgcauggguauggggcuguauguaaaguacgauggcgacccauggacugacuccgaugcucucgcccuuucuggaguuauggugagcauggaggaacccggcugguacucauucggguuugagauaaaagacaagaaaugcgaugucccguguauuggaaucgaaauggugcacgacgguggcaaggagaccuggcauagugcugccacagcaaucuauugccugaugggguccggacaguugcuaugggauaccgugacuggcgucgacauggcccuguga

SEQ ID NO: 158037 - RNA, 1401 nt, Artificial Sequence; identical to SEQ ID NO: 157177
  derived and/or modified CDS sequence (opt3) from neuraminidase__InfluenzaB__AHL91864

SEQ ID NO: 158038 - RNA, 1401 nt, Artificial Sequence; identical to SEQ ID NO: 157177
  derived and/or modified CDS sequence (opt3) from neuraminidase__InfluenzaB__AHL91875

SEQ ID NO: 158039 - RNA, 1401 nt, Artificial Sequence; identical to SEQ ID NO: 156934
  derived and/or modified CDS sequence (opt3) from neuraminidase__InfluenzaB__AHL91886

SEQ ID NO: 158040 - RNA, 1401 nt, Artificial Sequence; identical to SEQ ID NO: 156675
  derived and/or modified CDS sequence (opt3) from neuraminidase__InfluenzaB__AHL91897

SEQ ID NO: 158041 - RNA, 1401 nt, Artificial Sequence; identical to SEQ ID NO: 156675
  derived and/or modified CDS sequence (opt3) from neuraminidase__InfluenzaB__AHL91908

SEQ ID NO: 158042 - RNA, 1401 nt, Artificial Sequence
  derived and/or modified CDS sequence (opt3) from neuraminidase__InfluenzaB__AHL91919
augcugcccagcaccauccagacacucacucuuuuccugacguccggcgggguguuguuaucucuguacgucucagccagucuaagcuaucuccuguacuccgacauucuucugaaguuuucucaaaccgagauaacagcuccuaucaugccauuggauugcgcaaacgccucgaauguucaggcggugaacagaucagcuacuaaaggaguaaccccgcuccugcccgaaccugaguggacauauccaaggcugagcugucccgguaguaccuuccagaaggcccucuuaauuuccccucaccgguuuggcgaaacuaaaggaaauucugcaccacugaucauucgcgagcccuucaucgccugcgggccuaaggaauguaaacauuuugcucuuacacacuacgcagcccagccaggcgguuauuacaacgggacccgagaggaccguaauaaguugagacaucugauaagcgugaagcuaggaaaaaucccgacggucgagaacuccauuuuccacauggcugccuggucaggcagugcgugccaugauggcagggaauggacuuauaucgggguggacggacccgauagcaaugcacuccugaagauuaaauacggugaggccuacaccgacacauaucacucuuacgcuaagaacauccuucggacucaagaauccgccuguaauugcauaggcggggauuguuaucugaugauuaccgacggaccugcaucaggcaucagcgagugccgcuuuuugaaaauuagagaggguaggaucaucaaggaaauuuucccaacagggcggguuaagcacaccgaggaauguacgugcggauuugcuaguaacaaaacuauagagugugccugccgcgauaauucuuacacagcgaagcgacccuucgugaaacucaacgucgaaaccgacacugccgagaucagacugaugugcacagagaccuauuuagauacgccuaggccaaaugacggcuccauuaccggccccugugaaagcaacggggauaagggaucggguggcaucaaagggggauuugugcaucagcggauggcaucuaagauaggccguugguacucccgcacaaugucaaaaacuaagagaauggguauggggcuguauguaaaguacgacggcgacccguggaccgauagugaggcucucgcccuuagcggaguuaugguguccauggaggaaccuggcugguacucuuucggguuugaaauuaaagacaagaaaugcgauguccccuguaucggaaucgagauggugcacgacgguggcaagacaacuuggcauagcgcugccaccgcaauuuauugccugauggggucaggacaguugcuaugggauacagugaccggcgucgacauggcccuguga

SEQ ID NO: 158043 - RNA, 1401 nt, Artificial Sequence; identical to SEQ ID NO: 157737
  derived and/or modified CDS sequence (opt3) from neuraminidase__InfluenzaB__AHL91930

SEQ ID NO: 158044 - RNA, 1401 nt, Artificial Sequence; identical to SEQ ID NO: 156675
  derived and/or modified CDS sequence (opt3) from neuraminidase__InfluenzaB__AHL91941

SEQ ID NO: 158045 - RNA, 1401 nt, Artificial Sequence; identical to SEQ ID NO: 156675
  derived and/or modified CDS sequence (opt3) from neuraminidase__InfluenzaB__AHL91952

SEQ ID NO: 158046 - RNA, 1401 nt, Artificial Sequence; identical to SEQ ID NO: 156718
  derived and/or modified CDS sequence (opt3) from neuraminidase__InfluenzaB__AHL91963

SEQ ID NO: 158047 - RNA, 1401 nt, Artificial Sequence
  derived and/or modified CDS sequence (opt3) from neuraminidase__InfluenzaB__AHL91974
augcugcccagcaccauccagacacucacucuuuuccugacguccggcgggguguuguuaucucuguacgucucagccagucuaagcuaucuccuguacuccgacauucuucugaaguuuucuccuaccgagauaacaacuccaaccaugccguuggauugcgcuaacgcaucgaauguucaagccgugaacagaucagcgacaaaaggaguaacccuccugcugcccgaaccugaguggacuuauccaaggcucagcugucccgguaguacauuccagaaggcuuuacugaucuccccucaccgguuuggcgaaaccaaaggaaauucugccccacuuauuauccgcgagcccuucauugcaugcgggccuaacgaauguaagcauuuugccuugacgcacuacgcugcacagccaggcgguuauuacaaugggacucgaggagaccguaacaaacugagacaucuaaucagcgugaagcucggcaagauaccgaccgucgaaaauuccaucuuccacauggccgcuuggucaggcagugccugccaugaugggaaagaguggacauauauuggaguggacggucccgauaacaaugcgcugcuuaagaucaaauacggcgaggcauacacugacaccuaucacagcuacgccaacaauauucugaggacacaggagucugcuuguaacugcaucgggggaaauuguuauuugaugauaaccgauggcuccgccucagguguuagcgaaugccgguuucucaagauucgcgaggggagaaucauuaaagagaucuucccuacgggaagggugaagcacacugaagaguguacaugcggcuuugcaaguaacaagaccaucgaaugugcuugccgggacaauucuuacacugccaaacgcccauucgucaagcugaacguggagacagauaccgcggaaauucgauuaaugugcacggacaccuaucuggauacacccagaccugacgauggcuccauaacugggccaugugagagcaacggagacaaagguucgggcgggaucaagggaggcuuuguacaucaaaggauggccucuaaaauuggucggugguacucccguaccaugucaaagacagagcgcauggggaugggccucuauguuaaauacgacggagaucccugggcagacagugaugcucuugccuucagcggcgugauggucuccaugaaggaaccggggugguacucuuuuggauucgagaucaaggacaaaaagugcgaugugccuuguauagguauugaaauggugcacgacggcgggaaagagacuuggcauagcgcugccaccgcaaucuauugccugaugggaucaggccaguugcuaugggauacagucaccgguguugacauggcccuguga

SEQ ID NO: 158048 - RNA, 1401 nt, Artificial Sequence; identical to SEQ ID NO: 156718
  derived and/or modified CDS sequence (opt3) from neuraminidase__InfluenzaB__AHL91985

SEQ ID NO: 158049 - RNA, 1401 nt, Artificial Sequence; identical to SEQ ID NO: 156675
  derived and/or modified CDS sequence (opt3) from neuraminidase__InfluenzaB__AHL91995

SEQ ID NO: 158050 - RNA, 1401 nt, Artificial Sequence
  derived and/or modified CDS sequence (opt3) from neuraminidase__InfluenzaB__AHL92006
augcugcccagcaccauccagacacucacucuuuuccugacguccggcgggguguuguuaucucuguacgucucagccagucuaagcuaucuccuguacuccgacauucuucugaaguuuucuccuaccgagauaacagcuccaacuaugccguuggauugcgcaaacgccucgaauguucaagcggugaacagaucagcuaccaaaggaguaacacuccugcugcccgaaccugaguggaccuauccaaggcucagcugucccgguaguacuuuccagaaggccuuacugaucuccccucaccgguuuggcgaaacaaaaggaaauucugcaccacuuauuauccgcgagcccuucauugccugcgggccuaacgaauguaagcauuuugcuuugacccacuacgcagcccagccaggcgguuauuacaaugggacgcgaggagaccguaacaaacugagacaucuaaucagcgugaagcucggcaagauaccgacugucgaaaauuccaucuuccacauggcugccuggucaggcagugcgugccaugaugggaaagaguggaccuauauuggaguggacggucccgauaacaaugcacugcuuaagaucaaauacggcgaggccuacacagacacuuaucacagcuacgcuaacaagauucugaggacccaggagucugccuguaauugcaucgggggaaacuguuauuugaugauaacagauggcuccgcaucagguguuagcgaaugccgguuucucaaaauucgcgaggggagaaucauuaaggagaucuucccuaccggaagggugaagcacacggaagaguguacuugcggcuuugcuaguaauaaaacaaucgaaugugccugccgggacaacucuuacaccgcgaagcgcccauucgucaaacugaauguggagacugauacagccgaaauucgauuaaugugcaccgacacguaucuggauacccccagaccugacgauggcuccauaacagggccaugugagagcaacggagacaaggguucgggcgggaucaaaggaggcuuuguacaucaaaggauggcaucuaagauuggucggugguacucccguacuaugucaaaaaccgagcgcauggggaugggccucuauguuaaguacgacggagaucccugggcugacagugaugcccuugcuuucagcggcgugauggucuccaugaaggaaccggggugguacucuuuuggauucgagaucaaagacaagaaaugcgaugugccuuguauagguguggaaaugguccacgacggcgggaaggagacauggcauagcgccgcaacugccauuuauugccugaugggaucaggccaguugcuaugggauaccguuacagguguggacauggcucuguga

SEQ ID NO: 158051 - RNA, 1401 nt, Artificial Sequence; identical to SEQ ID NO: 156683
  derived and/or modified CDS sequence (opt3) from neuraminidase__InfluenzaB__AHL92017

SEQ ID NO: 158052 - RNA, 1401 nt, Artificial Sequence; identical to SEQ ID NO: 156683
  derived and/or modified CDS sequence (opt3) from neuraminidase__InfluenzaB__AHL92028

SEQ ID NO: 158053 - RNA, 1401 nt, Artificial Sequence
  derived and/or modified CDS sequence (opt3) from neuraminidase__InfluenzaB__AHL92039
augcugcccagcaccauccagacacucacucuuuuccugacguccggcgggguguuguuaucucuguacgucucagccagucuaagcuaucuccuguacuccgacauucuucugaaguuuucuccuaccgagauaacagcuccaacuaugccguuggauugcgcaaacgccucgaauguucacgcggugaacagaucagcuaccaaaggaguaacacuccugcugcccgaaccugaguggaucuauccaaggcucagcugucccgguaguaccuuccaaaaggccuuacugauuuccccucaucgguuuggcgaaacuaaaggaaauucugcaccacuuaucauucgcgagcccuucaucgccugcgggccuaacgaauguaagcacuuugcuuugacacauuacgcagcccagccaggcgguuauuacaaugggacccgaggagaccguaacaaacugagacaccuaauaagcgugaagcucggcaagaucccgacggucgaaaauuccauuuuccauauggcugccuggucaggcagugcgugccacgaugggaaagaguggacuuauaucggaguggacggucccgauaacaaugcacugcuuaagauuaaauacggcgaggccuacaccgacacauaucacagcuacgcuaacaauauccugaggacucaggagucugccuguaacugcauagggggaaauuguuauuugaugauuaccgauggcuccgcaucagguguuagcgaaugccgguuucucaagauccgcgaggggagaauuaucaaagagaucuucccuacaggaagggugaagcauaccgaagaguguacgugcggcuuugcuaguaacaagacuauugaaugugccugccgggacaauucuuacacagcgaaacgcccauucgucaagcugaacguggagaccgauacugccgaaauacgauuaaugugcacagacaccuaucuggauacgcccagaccugacgauggcuccaucaccgggccaugugagagcaacggagacaaagguucgggcgggauuaagggaggcuuuguacaccagaggauggcaucuaaaaucggucggugguacucccguacaaugucaaagacugagcgcauggggaugggccucuauguuaaauacaauggagaccccugggcugauagugacgcccuugcuuucagcggcgugauggucuccaugaaggaaccggggugguacucuuuuggauucgagauaaaggauaaaaagugcgacgugccuuguauugguaucgaaauggugcaugauggcgggaaagagaccuggcacagcgccgcaacagccaucuauugccugaugggaucaggccaauugcuaugggacacugucaccgguguugauauggcucuguga

SEQ ID NO: 158054 - RNA, 1401 nt, Artificial Sequence; identical to SEQ ID NO: 156683
  derived and/or modified CDS sequence (opt3) from neuraminidase__InfluenzaB__AHL92050

SEQ ID NO: 158055 - RNA, 1401 nt, Artificial Sequence
  derived and/or modified CDS sequence (opt3) from neuraminidase__InfluenzaB__AHL92061
augcugcccagcaccacacagacucucacgcuuuuccugaccuccggcgggguguuguuaucucuguacgucucagccagucuaagcuaucuccuguacuccgacauccuucugaaguuuucuccuacagagauuacugcuccaaccaugccguuggauugcgcaaacgccucgaauguucaagcggugaacagaucagcuacaaaaggaguaacccuccugcugcccgaaccugaguggacuuauccaaggcucagcugucccgguaguacauuccagaaggccuuacugauauccccucaccgguuuggcgaaaccaaaggaaauucugcaccacuuaucauucgcgagcccuucaucgccugcgggccuaacgaauguaagcauuuugcuuugacgcacuacgcagcccagccaggcgguuauuacaaugggacucgaggagaccguaacaaacugagacaucuaauuagcgugaagcucggcaagaucccgaccgucgaaaauuccauauuccacauggcugccuggucaggcagugcgugccaugaugggaaagaguggacauauaucggaguggacggucccgauaacaaugcacugcuuaagauuaaauacggcgaggccuacacugacaccuaucacagcuacgcuaacaagauccugaggacacaggagucugccuguaauugcauugggggaaacuguuauuugaugaucaccgauggcuccgcaucagguguuagcgaaugccgguuucucaaaauacgcgaggggagaauuaucaaggagauuuucccuacgggaagggugaagcacacugaagaguguacaugcggcuuugcuaguaauaaaaccaucgaaugugccugccgggacaacucuuacacugcgaagcgcccauucgucaaacugaauguggagacagauaccgccgaaauccgauuaaugugcacggacaccuaucuggauacacccagaccugacgauggcuccauuacugggccaugugagagcaacggagacaaggguucgggcgggauaaaaggaggcuuuguacaucaaaggauggcaucuaagaucggucggugguacucccguaccaugucaaaaacagagcgcauggggaugggccucuauguuaaguacgacggagaucccugggcugacagugaugcccuugcuuucagcggcgugauggucuccaugaaggaaccggggugguacucuuuuggauucgagauuaaagacaagaaaugcgaugugccuuguaucgguauagaaauggugcacgacggcgggaaggagacuuggcauagcgccgcaaccgccauuuauugccugaugggaucaggccaguugcuaugggauacagucaccgguguugacauggcucuguga

SEQ ID NO: 158056 - RNA, 1401 nt, Artificial Sequence
  derived and/or modified CDS sequence (opt3) from neuraminidase__InfluenzaB__AHL92072
augcugcccagcaccauccagacacucacucuuuuccugacguccggcgggguguuguuaucucuguacgucucagccagucuaagcuaucuccuguacuccgacauucuucugaaguuuucuccuaccgagauaacagcuccaacuaugccguuggauugcgcaaacgccucgaauguucaagcggugaaccacucagcuaccaaaggaguaacacuccugcugcccgaaccugaguggaccuauccaagacucagcugucccgguaguacuuuccagaaggccuuacugaucuccccucauagguuuggcgaaacaaaaggaaauucugcaccacuuauuauccgggagcccuucauugccugcgggccuaacgaauguaagcacuuugcuuugacccauuacgcagcccagccaggcgguuauuacaaugggacgcgcggagaccgaaacaaacugcgucaccuaaucagcgugaagcucggcaagauaccgacugucgaaaauuccaucuuccauauggcugccuggucaggcagugcgugccacgaugggaaagaguggaccuauauuggaguggacggucccgauaacaaugcacugcuuaagaucaaauacggcgaggccuacacagacacuuaucacagcuacgcuaacaagauucugagaacccaggagucugccuguaauugcaucgggggaaacuguuauuugaugauaacagauggcuccgcaucagguguuagcgaaugcagguuucucaaaauucgggaggggcgcaucauuaaggagaucuucccuaccggaagagugaagcauacggaagaguguacuugcggcuuugcuaguaauaaaacaaucgaaugugccugcagggacaacucuuacaccgcgaagcggccauucgucaaacugaauguggagacugauacagccgaaauucgcuuaaugugcaccgacacguaucuggauacaccccgaccugacgauggcuccauaaccgggccaugugagagcaacggagacaaggguucgggcgggaucaaaggaggcuuuguacaccaaagaauggcaucuaagauugguaggugguacucccggacuaugucaaaaaccgagcguauggggaugggccucuauguuaaguacgacggagaucccugggcugacagugaugcccuugcuuucagcggcgugauggucuccaugaaggaaccggggugguacucuuuuggauucgagaucaaagacaagaaaugcgaugugccuuguauagguauugaaauggugcaugacggcgggaaggagacauggcacagcgccgcaacugccaucuauugccugaugggaucaggccaguugcuaugggauaccgucacagguguugacauggcucuguga

SEQ ID NO: 158057 - RNA, 1401 nt, Artificial Sequence; identical to SEQ ID NO: 158056
  derived and/or modified CDS sequence (opt3) from neuraminidase__InfluenzaB__AHL92083

SEQ ID NO: 158058 - RNA, 1401 nt, Artificial Sequence; identical to SEQ ID NO: 158056
  derived and/or modified CDS sequence (opt3) from neuraminidase__InfluenzaB__AHL92094

SEQ ID NO: 158059 - RNA, 1401 nt, Artificial Sequence
  derived and/or modified CDS sequence (opt3) from neuraminidase__InfluenzaB__AHL92105
augcugcccagcaccauccagacacucacucuuuuccugacguccggcgggguguuguuaucucuguacgucucagccagucuaagcuaucuccuguacuccgacauucuucugaaguuuucuccuaccgagauaacagcuccaacuaugccguuggauugcgcaaacgccucgaauguucacgcggugaacagaucagcuaccaaaggaguaacacuccugcugcccgaaccugaguggaccuauccaaggcucagcugucccgguaguacuuuccaaaaggccuuacugaucuccccucaucgguuuggcgaaacaaaaggaaauucugcaccacuuauuauccgcgagcccuucauugccugcgggccuaacgaauguaagcacuuugcuuugacccauuacgcagcccagccaggcgguuauuacaaugggacgcgaggagaccguaacaaacugagacaccuaaucagcgugaagcucggcaagauaccgacugucgaaaauuccaucuuccauauggcugccuggucaggcagugcgugccacgaugggaaagaguggaccuauauuggaguggacggucccgauaacaaugcacugcuuaagaucaaauacggcgaggccuacacagacacuuaucacagcuacgcuaacaauauucugaggacccaggagucugccuguaacugcaucgggggaaauuguuauuugaugauaacagauggcuccgcaucagguguuagcgaaugccgguuucucaagauucgcgaggggagaaucauuaaagagaucuucccuaccggaagggugaagcauacggaagaguguacuugcggcuuugcuaguaacaagacaaucgaaugugccugccgggacaauucuuacaccgcgaaacgcccauucgucaagcugaacguggagacugauacagccgaaauucgauuaaugugcaccgacacguaucuggauacccccagaccugacgauggcuccauaacagggccaugugagagcaacggagacaaagguggcgggggaaucaagggcgguuuuguacaccagaggauggcaucgaaaauugggcggugguacucucguacuauguccaagaccgagcgcaugggcaugggacucuauguuaaauacgacggcgaucccugggcugacucagaugcccuugcuuucaguggggugauggucagccugaaggaaccgggaugguacuccuuugguuucgagaucaaggacaaaaagugcgaugugccuuguauaggcauugaaauggugcaugacgggggaaaagagacauggcacucugccgcaacugccaucuauugcuugaugggcagcggucaacuacugugggauaccgucacagggguugacauggcucucuga

SEQ ID NO: 158060 - RNA, 1401 nt, Artificial Sequence; identical to SEQ ID NO: 156836
  derived and/or modified CDS sequence (opt3) from neuraminidase__InfluenzaB__AHL92116

SEQ ID NO: 158061 - RNA, 1401 nt, Artificial Sequence; identical to SEQ ID NO: 158056
  derived and/or modified CDS sequence (opt3) from neuraminidase__InfluenzaB__AHL92127

SEQ ID NO: 158062 - RNA, 1401 nt, Artificial Sequence; identical to SEQ ID NO: 158056
  derived and/or modified CDS sequence (opt3) from neuraminidase__InfluenzaB__AHL92138

SEQ ID NO: 158063 - RNA, 1401 nt, Artificial Sequence; identical to SEQ ID NO: 158056
  derived and/or modified CDS sequence (opt3) from neuraminidase__InfluenzaB__AHL92149

SEQ ID NO: 158064 - RNA, 1401 nt, Artificial Sequence
  derived and/or modified CDS sequence (opt3) from neuraminidase__InfluenzaB__AHL92171
augcugcccagcaccauccagacacucacucuuuuccugacguccggcgggguguuguuaucucuguacgucucagccagucuaagcuaucuccuguacuccgacauucuucugaaguuuucuccuaccgagauaacagcuccaacuaugccguuggauugcgcaaacgccucgaauguucaagcggugaaccacucagcuaccaaaggaguaacacuccugcugcccgaaccugaguggaccuauccaagacucagcugucccgguaguacuuuccagaaggccuuacugguguccccucauagguuuggcgaaacaaaaggaaauucugcaccacuuaucauucgggagcccuucaucgccugcgggccuaacgaauguaagcacuuugcuuugacccauuacgcagcccagccaggcgguuauuacaaugggacgcgcggagaccgaaacaaacugcgucaccuaauuagcgucaagcucggcaagaucccgacuguggaaaauuccauauuccauauggcugccuggucaggcagugcgugccacgaugggaaagaguggaccuauaucggaguugacggucccgauaacaaugcacugcuuaagauuaaauacggcgaggccuacacagacacuuaucacagcuacgcuaacaagauccugagaacccaggagucugccuguaauugcauugggggaaacuguuauuugaugaucacagauggcuccgcaucaggugugagcgaaugcagguuucucaaaauacgggaggggcgcauuaucaaggagauuuucccuaccggaagagucaagcauacggaagaguguacuugcggcuuugcuaguaauaaaacaaucgaaugugccugcagggacaacucuuacaccgcgaagcggccauucgugaaacugaauguagagacugauacagccgaaauccgcuuaaugugcaccgacacguaucuggauacaccccgaccugacgauggcuccauuaccgggccaugugagagcaacggagacaaggguucgggcgggauaaaaggaggcuuuguucaccaaagaauggcaucuaagaucgguaggugguacucccggacuaugucaaaaaccgagcguauggggaugggccucuaugugaaguacgacggagaucccugggcugacagugaugcccuugcuuucagcggcgucaugguguccaugaaggaaccggggugguacucuuuuggauucgagauuaaagacaagaaaugcgaugugccuuguaucgguauagaaaugguccaugacggcgggaaggagacauggcacagcgccgcaacugccauuuauugccugaugggaucaggccaguugcuaugggauaccguuacagguguggacauggcucuguga

SEQ ID NO: 158065 - RNA, 1401 nt, Artificial Sequence
  derived and/or modified CDS sequence (opt3) from neuraminidase__InfluenzaB__AHL92182
augcugcccagcaccauccagacacucacucuuuuccugacguccggcgggguguuguuaucucuguacgucucagccagucuaagcuaucuccuguacuccgacauucuucugaaguuuucuccuaccgagauaacagcuccaacuaugccguuggauugcgcaaacgccucgaauguucacgcggugaacagaucagcuaccaaaggaguaacacuccugcugcccgaaccugagugggccuauccaaggcucagcugucccgguaguaccuuccaaaaggcauuacugaucuccccucaucgguuuggcgaaacuaaaggaaauucugccccacuuauuauccgcgagcccuucauugcuugcgggccuaacgaauguaagcacuuugcauugacacauuacgccgcucagccaggcgguuauuacagcgggacccgaggagaccguaauaaacugagacaccuaaucuccgugaagcucggcaagauaccgacggucgagaacucaaucuuccauauggccgcguggaguggcagcgcaugccacgaugggaaagaguggacuuauauuggaguggacggucccgauaauaacgcccugcuuaagaucaaauacggcgaggcuuacaccgacacauaucacucuuacgccaauaacauucugaggacucaggaauccgcauguaauugcaucgggggaaacuguuauuugaugauaaccgauggcucagcuagcgguguuagugaaugccgguuucucaagauucgcgaggggagaaucauuaaagagaucuucccuacaggaagggugaagcauaccgaagaguguacgugcggcuuugccucuaauaagacuaucgaaugugcgugccgggacaacuccuacacagccaaacgcccauucgucaagcugaauguggagaccgauacugcagaaauucgauuaaugugcacagacaccuaucuggauacgcccagaccugacgauggcagcauaaccgggccaugugagucgaacggagacaaagguucuggcgggaucaagggaggcuuuguacaccagaggauggcuuccaaaauuggucggugguacucacguacaaugaguaagacugagcgcauggggaugggccucuauguuaaauacgacggagaucccugggccgacagcgaugcucuugccuucuccggcgugauggucucuaugaaggaaccggggugguacagcuuuggauucgagaucaaggacaaaaagugcgaugugccuuguauagguauugaaauggugcaugacggcgggaaagagaccuggcacucagcagccacagcuaucuauugccugaugggaaguggccaauugcuaugggauacugucaccgguguugacauggcgcuguga

SEQ ID NO: 158066 - RNA, 1401 nt, Artificial Sequence; identical to SEQ ID NO: 158065
  derived and/or modified CDS sequence (opt3) from neuraminidase__InfluenzaB__AHL92193

SEQ ID NO: 158067 - RNA, 1401 nt, Artificial Sequence; identical to SEQ ID NO: 156836
  derived and/or modified CDS sequence (opt3) from neuraminidase__InfluenzaB__AHL92204

SEQ ID NO: 158068 - RNA, 1401 nt, Artificial Sequence
  derived and/or modified CDS sequence (opt3) from neuraminidase__InfluenzaB__AHL92215
augcugcccagcaccauccagacacucacucuuuuccugacguccggcgggguguuguuaucucuguacgucucagccagucuaagcuaucuccuguacuccgacauucuucugaaguuuucuccuaccgagauaacagcuccaacuaugccguuggauugcgcaaacgccucgaauguucaagcggugaaccacucagcuaccaaaggaguaacacuccugcugcccgaaccugaguggaccuauccaagacucagcugucccgguaguacuuuccagaaggccuuacugaucuccccucauagguuuggcgaaacaaaaggaaauucugcaccacuuauuauccgggagcccuucauugccugcgggccuaacgaauguaagcacuuugcuuugacccauuacgcagcccagccaggcgguuauuacaaugggacgcgcggagaccgaaacaaacugcgucaccuaaucagcgugaagcucggcaagauaccgacugucgaaaauuccaucuuccauauggcugccuggucaggcagugcgugccacgaugggaaagaguggaccuauauuggaguggacggucccgauaacaaugcacugcuuaagaucaaauacggcgaggccuacacagacacuuaucacagcuacgcuaacaagauucugagaacccaggagucugccuguaauugcaucgggggaaacuguuauuugaugauaacagauggcuccgcaucagguguuagcgaaugcagguuucucaaaauucgggaggggcgcaucauuaaggagaucuucccuaagggaagagugaaacauaccgaagaguguacgugcggcuuugcuaguaauaagacuaucgaaugugccugcagggacaacucuuacacagcgaaacggccauucgucaagcugaauguggagaccgauacugccgaaauucgcuuaaugugcacagacaccuaucuggauacgccccgaccugacgauggcuccauaaccgggccaugugagagcaacggagacaaagguucgggcgggaucaagggaggcuuuguacaccaaagaauggcaucuaaaauugguaggugguacucccggacaaugucaaagacugagcguauggggaugggccucuauguuaaguacgacggagaucccugggcugacagugaugcccuugcuuucagcggcgugauggucuccaugaaagaaccggggugguacucuuuuggauucgagaucaaggacaaaaagugcgaugugccuuguauagguauugaaauggugcaugacggcgggaaagagaccuggcacagcgccgcaacagccaucuauugccugaugggaucaggccaguugcuaugggauacugucaccgguguugacauggcucuguga

SEQ ID NO: 158069 - RNA, 1401 nt, Artificial Sequence; identical to SEQ ID NO: 158056
  derived and/or modified CDS sequence (opt3) from neuraminidase__InfluenzaB__AHL92226

SEQ ID NO: 158070 - RNA, 1401 nt, Artificial Sequence; identical to SEQ ID NO: 156836
  derived and/or modified CDS sequence (opt3) from neuraminidase__InfluenzaB__AHL92237

SEQ ID NO: 158071 - RNA, 1401 nt, Artificial Sequence; identical to SEQ ID NO: 158056
  derived and/or modified CDS sequence (opt3) from neuraminidase__InfluenzaB__AHL92248

SEQ ID NO: 158072 - RNA, 1401 nt, Artificial Sequence
  derived and/or modified CDS sequence (opt3) from neuraminidase__InfluenzaB__AHL92259
augcugcccagcaccauccagacacucacucuuuuccugacguccggcgggguguuguuaucucuguacgucucagccagucuaagcuaucuccuguacuccgacauucuucugaaguuuucuccuaccgagauaacagcuucgacuaugccauuggauugcgcaaacgccucaaauguucaagcggugaacagaagcgcuaccaaaggaguaacacuccugcugccggaacccgaguggaccuauccuaggcucaguuguccagguuccacuuuccagaaggccuuacugaucucuccccaccgguuuggcgaaacaaaagggaauagcgcaccucuuauuauccgcgagccauucauugccugcggacccaacgaauguaagcauuuugcuuugacccacuacgcagcccagccuggcgguuauuacaaugggacgcgaggagaccguaacaaacugagacaucuaaucuccgugaagcucggcaagauaccaacugucgaaaauucaaucuuccacauggcugccuggaguggcagcgcgugccaugaugggaaagaguggaccuauauuggaguggacgguccggauaacgacgcacugcuuaagaucaaauacggcgaggccuacacagauacuuaucacucuuacgcuaauaagauucugaggacccaggaguccgccuguaacugcaucgggggaaauuguuauuugaugauaacagacggcucagcaagcgguguuagugaaugccgguuucucaaaauucgcgaggggagaaucauuaaggagaucuuccccaccggaagggugaagcacacggaagaguguacuugcggcuuugcuucuaacaaaacaaucgaaugugccugccgggauaauuccuacaccgcgaagcgcccuuucgucaaacugaacguggagacugacacagccgaaauucgauuaaugugcaccgauacguaucuggacaccccaagacccgaugacggcagcauaacagggccuugugagucgaauggagacaaggguucuggcgggaucaaaggaggcuuuguacaucaaaggaugacuuccaagauuggucggugguacucacguaccaugaguaaaacagagcgcauggggaugggccucuauguuaaguacgauggagacccaugggcagauagcgacgcucuugccuucuccggcgugauggucucuaugaaggaacccgggugguacagcuuuggauucgagaucaaagauaagaaaugcgacgugccguguauagguauugaaauggugcacgauggcgggaaggagacuuggcauucagcugccaccgcaaucuauugccugaugggaaguggccaguugcuaugggacacagucaccgguguugauauggcccuguga

SEQ ID NO: 158073 - RNA, 1401 nt, Artificial Sequence; identical to SEQ ID NO: 158056
  derived and/or modified CDS sequence (opt3) from neuraminidase__InfluenzaB__AHL92270

SEQ ID NO: 158074 - RNA, 1401 nt, Artificial Sequence
  derived and/or modified CDS sequence (opt3) from neuraminidase__InfluenzaB__AHL92281
augcugcccagcaccauccagacacucacucuuuuccugacguccggcgggguguuguuaucucuguacgucucagccagucuaagcuaucuccuguacuccgacauucuucugaaguuuucuccuaccgagauaacagcuccaacuaugccguuggauugcgcaaacgccucgaauguucaagcggcuaaccacucagccaccaaaggagugacacuccugcugcccgaaccugaguggaccuauccaagacucagcugucccgguaguacuuuccagaaggcauuacugaucuccccucauagguuuggcgaaacaaaaggaaauucugccccacuuauuauccgggagcccuucauugcuugcgggccuaacgaauguaagcacuuugcauugacccauuacgccgcucagccaggcgguuauuacaaugggacgcgcggagaccgaaacaaacugcgucaccuaaucagcguaaagcucggcaagauaccgacuguggaaaauuccaucuuccauauggccgcguggucaggcagugcaugccacgaugggaaagaguggaccuauauuggagucgacggucccgauaacaaugcccugcuuaagaucaaauacggcgaggcuuacacagacacuuaucacagcuacgccaacaagauucugagaacccaggagucugcauguaauugcaucgggggaaacuguuauuugaugauaacagauggcuccgcuucaggugugagcgaaugcagguuucucaaaauucgggaggggcgcaucauuaaggagaucuucccuaccggaagaguuaagcauacggaagaguguacuugcggcuuugccaguaauaaaacaaucgaaugugcgugcagggacaacucuuacaccgccaagcggccauucgugaaacugaaugucgagacugauacagcagaaauucgcuuaaugugcaccgacacguaucuggauacaccccgaccugacgauggcuccauaaccgggccaugugagagcaacggagacaaggguucgggcgggaucaaaggaggcuuugugcaccaaagaauggcuucuaagauugguaggugguacucccggacuaugucaaaaaccgagcguauggggaugggccucuauguaaaguacgacggagaucccugggccgacagugaugcucuugccuucagcggcguuaugguguccaugaaggaaccggggugguacucuuuuggauucgagaucaaagacaagaaaugcgaugucccuuguauagguauugaaauggugcaugacggcgggaaggagacauggcacagcgcagccacugcuaucuauugccugaugggaucaggccaguugcuaugggauaccgugacaggugucgacauggcgcuguga

SEQ ID NO: 158075 - RNA, 1401 nt, Artificial Sequence
  derived and/or modified CDS sequence (opt3) from neuraminidase__InfluenzaB__AHL92303
augcugcccagcaccauccagacacucacucuuuuccugacguccggcgggguguuguuaucucuguacgucucagccagucuaagcuaucuccuguacuccgacauucuucugaaguuuucuccuaccgagauaacagcuccaacuaugccguuggauugcgcaaacgccucgaauguucacgcggugaacagaucagcuaccaaaggaguaacauuccuccugcccgaaccugaguggaccuauccaaggcugagcugucccgguaguacuuuucaaaaggcccucuuaaucuccccucaucgguucggcgaaacaaaaggaaauucugcaccacugauuauccgcgagcccuuuauugccugcgggccuaacgaauguaagcacuucgcucuuacccauuacgcagcccagccaggcgguuauuacaaugggacgcgaggagaccguaacaaauugagacaccugaucagcgugaagcuaggcaagauaccgacugucgaaaauuccaucuuucauauggcugccuggucaggcagugcgugccacgaugggaaagaguggaccuauauuggaguggacggucccgauaacaaugcacuccugaagaucaaauacggcgaggccuacacagacacuuaucacagcuacgcuaacaauauucuuaggacccaggagucugccuguaacugcaucgggggaaauuguuaucugaugauaacagauggcuccgcaucagguguuagcgaaugccgguucuugaagauucgcgaggggagaaucauuaaagagaucuuuccuaccggaagggugaagcauacggaagaguguacuugcggcuucgcuaguaacaagacaaucgaaugugccugccgggacaauucuuacaccgcgaaacgcccauuugucaagcucaacguggagacugauacagccgaaauucgacugaugugcaccgacacguauuuagauacccccagaccugacgauggcuccauaacagggccaugugagagcaacggaaauaaagguucgggcgggaucaagggaggcuucguacaccagaggauggcaucuaaaauuggucggugguacucccguacuaugucaaagaccgagcgcauggggaugggccuguauguuaaauacgacggagaccccugggcugauagugacgcccucgcuuuuagcggcgugauggucuccaugaaggaaccggggugguacucuuucggauucgagaucaaggauaaaaagugcgacgugccuuguauagguauugaaauggugcaugauggcgggaaagagacauggcacagcgccgcaacugccaucuauugccuuaugggaucaggccaacuguugugggacaccgucacagguguugauauggcucuauga

SEQ ID NO: 158076 - RNA, 1401 nt, Artificial Sequence
  derived and/or modified CDS sequence (opt3) from neuraminidase__InfluenzaB__AHL92314
augcugcccagcaccauccagacacucacucuuuuccugacguccggcgggguguuguuaucucuguacgucucagccagucuaagcuaucuccuguacuccgacauucuucugaaguuuucucaaaccaaaauaacagcuccuaucaugccauuggauugcgcaaacgccucgaauguucaggcggugaacagaucagcugccaagggaguaacucuccugcugccggagcccgaauggaccuauccuaggcucagcuguccagguaguacauuccagaaagcauuacugauuucuccccaccgguuuggcgagaccaagggaaauuccgccccucuuaucauucgcgaaccauucaucgcuugcgggcccacugaguguaaacauuuugcauugacacacuacgccgcucagccuggcgguuauuacaacgggacccgagaagaccguaauaagcugagacaucuaauaagcgugaagcucggaaaaaucccaacggucgagaacuccauuuuccacauggccgcguggucaggcagugcaugccaugauggcaaggaguggacuuauguggggguugacggaccggauagcaaugcccugcuuaaaaucaaguacggugaggcuuacaccgacacauaucacucuuacgccaaaaacauucugaggacucaagaauccgcauguaauugcaucggcggggauuguuauuugaugauaaccgacggacccgcuucaggcauuagcgaaugccgguuucucaagauccgcgaggguagaauuaucaaggagaucuucccuacagggagggugaaacacaccgaagaguguacgugcggauuugccaguaacaagacuauugaaugugcgugccgggauaauucuuacacagccaaacgcccauucgucaagcugaacguggagaccgacacugcagaaauacgauuaaugugcacagagaccuaucuggauacgcccagaccuaaugacggcuccaucaccggcccaugugagagcgauggggacaaaggaucggguggcauuaaagggggauuuguacaucagaggauggcuucuaagaucggccggugguacucccguacaaugucaaagacuaagcgcauggguauggggcucuauguuaaauacgacggcgaucccuggaccgacagugaagcccuugcucugagcggagugauggucuccauggaugagccgggcugguacucuuucggguuugaaauaaaggacaaaaagugcgaugugccuuguauuggaaucgagauggugcacgacgguggcaaaacaacuuggcauagcgccgcaaccgccaucuauugcuugauggggucaggacagcuacugugggauacagucaccggcguugacauggcucucuga

SEQ ID NO: 158077 - RNA, 1401 nt, Artificial Sequence
  derived and/or modified CDS sequence (opt3) from neuraminidase__InfluenzaB__AHL92325
augcugcccagcaccauccagacacucacucuuuuccugacguccggcgggguguuguuaucucuguacgucucagccagucuaagcuaucuccuguacuccgacauucuucugaaguuuucucaaaccgagauaacagcuccuaucaugccauuggauugcgcaaacgccucgaauguucaggcggugaacagaucagcugccaaaggaguaacucuccugcugccggaacccgaguggaccuauccuaggcucagcuguccagguaguacauuccagaaggcauuacugauuucuccccaccgguuuggcgaaaccaaaggaaauuccgccccucuuaucauucgcgagccauucaucgcuugcgggcccacugaauguaagcauuuugcauugacacacuacgccgcucagccuggcgguuauuacaacgggacccgagaggaccguaauaaacugagacaucuaauaagcgugaagcucggaaagaucccaacggucgagaacuccauuuuccacauggccgcguggucaggcagugcaugccaugauggcaaagaauggacuuauaucgggguggacggaccggauagcaaugcccugcuuaagauuaaauacggugaggcuuacaccgacacauaucacucuuacgccaagaacauccugaggacucaagaauccgcauguaauugcauaggcggggauuguuauuugaugauuaccgacggacccgcuucaggcaucagcgagugccgguuucucaaaauucgcgaggguagaaucaucaaggaaauuuucccuacagggaggguuaagcacaccgaggaauguacgugcggauuugccaguaacaaaacuauagagugugcgugccgggauaauucuuacacagccaagcgcccauucgugaaacugaacgucgaaaccgacacugcagagauccgauuaaugugcacagagaccuaucuggauacgcccagaccuaaugacggcuccauuaccggcccaugugaaagcgauggggacaagggaucggguggcaucaaagggggauuugugcaucagaggauggcuucuaagauaggccggugguacucccguacaaugucaaaaacuaagcgcauggguauggggcucuauguaaaguacgacggcgaucccuggaccgacagugaggcccuugcucugagcggaguuaugguguccaugggcgaaccggggugguacucuuucggauuugagauuaaagauaagaaaugcgacgucccuuguaucgguaucgaaauggugcacgauggcgggaagacaacuuggcauagcgccgcaaccgccauuuauugcuugaugggaucaggccagcuacugugggacacagugaccggugucgauauggcucucuga

SEQ ID NO: 158078 - RNA, 1401 nt, Artificial Sequence; identical to SEQ ID NO: 156836
  derived and/or modified CDS sequence (opt3) from neuraminidase__InfluenzaB__AHL92336

SEQ ID NO: 158079 - RNA, 1401 nt, Artificial Sequence
  derived and/or modified CDS sequence (opt3) from neuraminidase__InfluenzaB__AHL92358
augcugcccagcaccauccagacacucacucuuuuccugacguccggcgggguguuguuaucucuguacgucucagccagucuaagcuaucuccuguacuccgacauucuucugaaguuuucucaaaccgagauaacagcuccuaucaugccauuggauugcgcaaacgccucgaauguucaggcggugaacagaucagcugccaaaggaguaacucuccugcugccggaacccgaguggaccuauccuaggcucagcuguccagguaguacauuccagaaggcauuacugauuucuccccaccgguuuggcgaaaccaaaggaaauuccgccccucuuaucauucgcgagccauucaucgcuugcgggcccaaggaauguaaacauuuugcauugacucacuacgccgcucagccuggcgguuauuacaacgggacacgagaggaccguaauaagcugagacaucuaauaagcgugaagcucggaaaaaucccaaccgucgagaacuccauuuuccacauggccgcguggucaggcagugcaugccaugauggcaaggaauggacguauguggggguugacggaccggauagcaaugcccugcuuaaaaucaaguacggugaggcuuacacugacaccuaucacucuuacgccaaaaacauucugaggacacaagaauccgcauguaauugcaucggcggggauuguuauuugaugauaacugacggacccgcuucaggcauuagcgagugccgguuucucaagauccgcgaggguagaauuaucaaggaaaucuucccuaccgggagggugaaacacacagaggaauguaccugcggauuugccaguaacaagacgauugagugugcgugccgggauaauucuuacacugccaaacgcccauucgucaagcugaacguggaaacagacaccgcagagauacgauuaaugugcacugagacauaucuggauacccccagaccuaaugacggcuccaucacgggcccaugugaaagcgauggggacaaaggaucggguggcauuaaagggggauuuguacaucagaggauggcuucuaagaucggccggugguacucccguaccaugucaaagacaaagcgcauggguauggggcucuauguuaaauacgacggcgaucccuggacugacagugaggcccuugcucugagcggagugauggucuccauggaggaaccgggcugguacucuuucggguuugaaauaaaggauaaaaagugcgacgugccuuguauuggaaucgagauggugcacgaugguggcaaaaccacauggcauagcgccgcaacugccaucuauugcuugauggggucaggacagcuacugugggacaccgucacaggcguugauauggcucucuga

SEQ ID NO: 158080 - RNA, 1401 nt, Artificial Sequence; identical to SEQ ID NO: 158079
  derived and/or modified CDS sequence (opt3) from neuraminidase__InfluenzaB__AHL92369

SEQ ID NO: 158081 - RNA, 1401 nt, Artificial Sequence
  derived and/or modified CDS sequence (opt3) from neuraminidase__InfluenzaB__AHL92380
augcugcccagcaccauccagacacucacucuuuuccugacguccggcgggguguuguuaucucuguacgucucagccagucuaagcuaucuccuguacuccgacauucuucugaaguuuucuagaaccgagauaacagcuccuaucaugccauuggauugcgcaaacgccucgaauguucaagcggugaacaggucagcuacuaaaggaguaaagcuccugcugccggaacccgaguggaccuauccucggcucagcuguccagguaguacauuccagaaagccuuacugauuucuccccaccgcuuuggcgaaaccaagggaaauuccgcaccucuuaucauucgagagccauucaucgccugcgggcccaaagaauguaagcauuuugcuuugacucacuacgcagcccagccuggcgguuauuacaacgggacacgugaggacagaaauaagcugaggcaucuaauaagcgugaaacucggaaagaucccaaccgucgagaacuccauuuuccacauggcugccuggucaggcagugcgugccaugauggccgggaauggacguauaucgggguggacggaccggauagcaaugcacugcuuaaaauuaaguacggugaggccuacacugacaccuaucacucuuacgcuaaaaacauccugcgcacacaggaauccgccuguaauugcauaggcggggauuguuauuugaugauuacugacggacccgcaucaggcaucagcgagugcagauuucucaagauuagggagggucggaucaucaaggaaauuuucccuaccgggcgcguuaaacacacagaggaauguaccugcggauuugcuaguaacaagacgauagagugugccugccgagauaauucuuacacugcgaaaagaccauucgugaagcugaacgucgaaacagacaccgccgagaucagguuaaugugcacugagacauaucuggauacgccccggccuaaugacggcuccauuaccggcccaugugaaagcaacggggauaaaggaucggguggcaucaaagggggauuugugcaucaacguauggcaucuaagauaggccgcugguacuccagaaccaugucaaagacaaagaggauggguauggggcucuauguaaaauacgacggcgaccccuggacugauagugaggcucuugcccugagcggaguuaugguguccauggaggaaccgggcugguacucuuucggguuugaaauuaaggacaaaaagugcgaugucccuuguaucggaaucgagauggugcacgacgguggcaaaaccacauggcauagcgcugccacugcaauuuauugcuugauggggucaggacagcuacugugggauaccgugacaggcgucaauaugacccucuga

SEQ ID NO: 158082 - RNA, 1401 nt, Artificial Sequence
  derived and/or modified CDS sequence (opt3) from neuraminidase__InfluenzaB__AHL92391
augcugcccagcaccauccagacacucacucuuuuccugacguccggcgggguguuguuaucucuguacgucucagccagucuaagcuaucuccuguacuccgacauucuucugaaguuuucuagaaccgagauaacagcuccuaucaugccauuggauugcgcaaacgccucgaauguucaagcggugaacaggucagcuacuaaaggaguaacccuccugcugccggaacccgaguggacauauccucggcucagcuguccagguaguaccuuccagaaggccuuacugauuucuccccaccgcuuuggcgaaacuaaaggaaauuccgcaccucuuaucauucgagagccauucaucgccugcgggcccaaggaauguaaacauuuugcuuugacacacuacgcagcccagccuggcgguuauuacaacgggacccgugaggacagaagcaagcugaggcaucuaauauccgugaagcucggaaaaaucccaacggucgaaaauucaauuuuccacauggcugccuggaguggcagcgcgugccaugauggccgggaauggacuuauaucgggguggacggaccggauucuaacgcacugcuuaagauuaaauacggugaggccuacaccgacacauaucacuccuacgcuaagaauauccugcgcacucaggaaucagccuguaacugcauaggcggggauuguuauuugaugauuaccgacggacccgcaagcggcaucagugagugcagauuucucaaaauuagggagggucggaucaucaaggaaauuuucccuacagggcgcguuaagcacaccgaggaauguacgugcggauuugcuucuaauaaaacuauagagugugccugccgagauaacuccuacacagcgaagagaccauucgugaaacugaaugucgaaaccgacacugccgagaucagguuaaugugcacagagaccuaucuggauacgccccggccuaacgacggcagcauuaccggcccaugugaaucgaauggggauaagggaucugguggcaucaaagggggauuugugcaucaacguauggcauccaagauaggccgcugguacucaagaacaaugaguaaaacuaagaggauggguauggggcucuauguaaaguacgacggcgaccccuggaccgauagcgaggcucuugcccuguccggaguuauggugucuauggaggagccgggcugguacagcuucggguuugaaauuaaagacaagaaaugcgaugucccuuguaucggaaucgagauggugcacgacgguggcaagacaacuuggcauucagcugccaccgcaauuuauugcuugauggggaguggacagcuacugugggauacagugaccggcgucaacaugacucucuga

SEQ ID NO: 158083 - RNA, 1401 nt, Artificial Sequence; identical to SEQ ID NO: 156865
  derived and/or modified CDS sequence (opt3) from neuraminidase__InfluenzaB__AHL92402

SEQ ID NO: 158084 - RNA, 1401 nt, Artificial Sequence; identical to SEQ ID NO: 156865
  derived and/or modified CDS sequence (opt3) from neuraminidase__InfluenzaB__AHL92413

SEQ ID NO: 158085 - RNA, 1401 nt, Artificial Sequence; identical to SEQ ID NO: 156865
  derived and/or modified CDS sequence (opt3) from neuraminidase__InfluenzaB__AHL92424

SEQ ID NO: 158086 - RNA, 1401 nt, Artificial Sequence
  derived and/or modified CDS sequence (opt3) from neuraminidase__InfluenzaB__AHL92435
augcugcccagcaccauccagacacucacucuuuuccugacguccggcgggguguuguuaucucuguacgucucagccagucuaagcuaucuccuguacuccgacauucuucugaaguuuucucaaaccgagauaacagcuccuaucaugccauuggauugcgcaaacgccucgaauguucaggcggugaacagaucagcugccaaaggaguaacucuccugcugccggaacccgaguggaccuauccuaggcucagcuguccagguaguacauuccagaaggcauuacugauuucuccccaccgguuuggcgaaaccaaaggaaauuccgccccucuuaucauucgcgagccauucaucgcuugcgggcccacugaauguaagcauuuugcauugacacacuacgccgcucagccuggcgguuauuacaacgggacccgagaggaccguaauaaacugagacaucuaauaagcgugaagcucggaaagaucccaacggucgagaacuccauuuuccacauggccgcguggucaggcagugcaugccaugauggcaaagaauggacuuauaucgggguggacggaccggauagcaaugcccugcuuaagauuaaauacggugaggcuuacaccgacacauaucacucuuacgccaagaacauccugaggacucaagaauccgcauguaauugcauaggcggggauuguuauuugaugauuaccgacggacccgcuucaggcaucagcgagugccgguuucucaaaauucgcgaggguagaaucaucaaggaaauuuucccuacagggaggguuaagcacaccgaggaauguacgugcggauuugccaguaacaaaacuauagagugugcgugccgggauaauucuuacacagccaagcgcccauucgugaaacugaacgucgaaaccgacacugcagagauccgauuaaugugcacagagaccuaucuggauacgcccagaccuaaugacggcuccauuaccggcccaugugaaagcgauggggacaagggaucggguggcaucaaagggggauuugugcaucagaggauggcuucuaagauaggccggugguacucccguacaaugucaaaaacuaagcgcauggguauggggcucuauguaaaguacgacggcgaucccuggaccgacagugaggcccuugcucugagcggaguuaugauuuccauggaggaaccgggcugguacucuuucggguuugaaaucaaagauaagaaaugcgacgugccuuguaucggaauugagaugguccacgaugguggcaagacaacuuggcauagcgccgcaaccgccaucuauugcuugauggggucaggacagcuacugugggacacagugaccggcguggauauggcucucuga

SEQ ID NO: 158087 - RNA, 1401 nt, Artificial Sequence; identical to SEQ ID NO: 156865
  derived and/or modified CDS sequence (opt3) from neuraminidase__InfluenzaB__AHL92446

SEQ ID NO: 158088 - RNA, 1401 nt, Artificial Sequence; identical to SEQ ID NO: 156865
  derived and/or modified CDS sequence (opt3) from neuraminidase__InfluenzaB__AHL92457

SEQ ID NO: 158089 - RNA, 1401 nt, Artificial Sequence; identical to SEQ ID NO: 156865
  derived and/or modified CDS sequence (opt3) from neuraminidase__InfluenzaB__AHL92468

SEQ ID NO: 158090 - RNA, 1401 nt, Artificial Sequence; identical to SEQ ID NO: 156865
  derived and/or modified CDS sequence (opt3) from neuraminidase__InfluenzaB__AHL92479

SEQ ID NO: 158091 - RNA, 1401 nt, Artificial Sequence; identical to SEQ ID NO: 156836
  derived and/or modified CDS sequence (opt3) from neuraminidase__InfluenzaB__AHL92490

SEQ ID NO: 158092 - RNA, 1401 nt, Artificial Sequence; identical to SEQ ID NO: 156865
  derived and/or modified CDS sequence (opt3) from neuraminidase__InfluenzaB__AHL92501

SEQ ID NO: 158093 - RNA, 1401 nt, Artificial Sequence
  derived and/or modified CDS sequence (opt3) from neuraminidase__InfluenzaB__AHL92512
augcugcccagcaccauccagacacucacucuuuuccugacguccggcgggguguuguuaucucuguacgucucagccagucuaagcuaucuccuguacuccgacauucuucugaaguuuucuagaaccgagauaacagcuccuaucaugccauuggauugcgcaaacgccucgaauguucaagcggugaacaggucagcuacuaaaggaguaacccuccugcugccggaacccgaguggacauauccucggcucagcuguccagguaguaccuuccagaaggccuuacugauuucuccccaccgcuuuggcgaaacuaaaggaaauuccgcaccucuuaucauucgagagccauucaucgccugcgggcccaaggaauguaaacauuuugcuuugacacacuacgcagcccagccuggcgguuauuacaacgggacccgugaggacagaaauaagcugaggcaucuaauaagcgugaagcucggaaaaaucccaacggucgagaacuccauuuuccacaugguggcuuggucaggcagugccugccaugauggccgggaauggacuuauaucgggguugacggaccggauagcaaugcgcugcuuaagauuaaauacggugaggcauacaccgacacauaucacucuuacgccaagaacauccugcgcacucaggaauccgcuuguaauugcauaggcggggauuguuauuugaugauuaccgacggacccgccucaggcaucagcgagugcagauuucucaaaauuagggagggucggaucaucaaggaaauuuucccuacagggcgcgugaagcacaccgaggaauguacgugcggauuugcaaguaacaaaacuauagagugugcuugccgagauaauucuuacacagccaagagaccauucgucaaacugaacguggaaaccgacacugcggagaucagguuaaugugcacagagaccuaucuggauacgccccggccuaaugacggcuccauuaccggcccaugugaaagcaacggggauaagggaucggguggcaucaaagggggauuuguacaucaacguauggccucuaagauaggccgcugguacuccagaacaaugucaaaaacuaagaggauggguauggggcucuauguuaaguacgacggcgaccccuggaccgauagugaggcacuugcucugagcggagugauggucuccauggaggaaccgggcugguacucuuucggguuugaaauuaaagacaagaaaugcgaugugccuuguaucggaaucgagauggugcacgacgguggcaagacaacuuggcauagcgccgcuaccgccauuuauugcuugauggggucaggacagcuacugugggauacagucaccggcguuaauaugacucucuga

SEQ ID NO: 158094 - RNA, 1401 nt, Artificial Sequence; identical to SEQ ID NO: 156865
  derived and/or modified CDS sequence (opt3) from neuraminidase__InfluenzaB__AHL92523

SEQ ID NO: 158095 - RNA, 1401 nt, Artificial Sequence; identical to SEQ ID NO: 156865
  derived and/or modified CDS sequence (opt3) from neuraminidase__InfluenzaB__AHL92534

SEQ ID NO: 158096 - RNA, 1401 nt, Artificial Sequence; identical to SEQ ID NO: 156836
  derived and/or modified CDS sequence (opt3) from neuraminidase__InfluenzaB__AHL92545

SEQ ID NO: 158097 - RNA, 1401 nt, Artificial Sequence; identical to SEQ ID NO: 156865
  derived and/or modified CDS sequence (opt3) from neuraminidase__InfluenzaB__AHL92556

SEQ ID NO: 158098 - RNA, 1401 nt, Artificial Sequence; identical to SEQ ID NO: 156865
  derived and/or modified CDS sequence (opt3) from neuraminidase__InfluenzaB__AHL92567

SEQ ID NO: 158099 - RNA, 1401 nt, Artificial Sequence; identical to SEQ ID NO: 156865
  derived and/or modified CDS sequence (opt3) from neuraminidase__InfluenzaB__AHL92578

SEQ ID NO: 158100 - RNA, 1401 nt, Artificial Sequence; identical to SEQ ID NO: 156836
  derived and/or modified CDS sequence (opt3) from neuraminidase__InfluenzaB__AHL92589

SEQ ID NO: 158101 - RNA, 1401 nt, Artificial Sequence; identical to SEQ ID NO: 156865
  derived and/or modified CDS sequence (opt3) from neuraminidase__InfluenzaB__AHL92600

SEQ ID NO: 158102 - RNA, 1401 nt, Artificial Sequence; identical to SEQ ID NO: 157892
  derived and/or modified CDS sequence (opt3) from neuraminidase__InfluenzaB__AHL92611

SEQ ID NO: 158103 - RNA, 1401 nt, Artificial Sequence
  derived and/or modified CDS sequence (opt3) from neuraminidase__InfluenzaB__AHL92622
augcugcccagcaccauccagacacucacucuuuuccugacguccggcgggguguuguuaucucuguacgucucagccagucuaagcuaucuccuguacuccgacauucuucugaaguuuucuagaaccgagauaacagcuccuaucaugccauuggauugcgcaaacgccucgaauguucaagcggugaacaggucagcuacuaaaggaguaaccuuccuccugccggaacccgaguggacauauccucggcugagcuguccagguaguaccuuucagaaggcccucuuaauuucuccccaccgcuucggcgaaacuaaaggaaauuccgcaccucugaucauucgagagccauuuaucgccugcgggcccaaggaauguaaacauuucgcucuuacacacuacgcagcccagccuggcgguuauuacaacgggacccgugaggacagaaauaaguugaggcaucugauaagcgugaagcuaggaaaaaucccaacggucgagaacuccauuuuucacauggcugccuggucaggcagugcgugccaugauggccgggaauggacuuauaucgggguggacggaccggauagcaaugcacuccugaagauuaaauacggugaggccuacaccgacacauaucacucuuacgcuaagaacauccuucgcacucaggaauccgccuguaauugcauaggcggggauuguuaucugaugauuaccgacggacccgcaucaggcaucagcgagugcagauucuugaaaauuagggagggucggaucaucaaggaaauuuuuccuacagggcgcguuaagcacaccgaggaauguacgugcggauucgcuaguaacaaaacuauagagugugccugccgagauaauucuuacacagcgaagagaccauuugugaaacucaacgucgaaaccgacacugccgagaucaggcugaugugcacagagaccuauuuagauacgccccggccuaaugacggcuccauuaccggcccaugugaaagcaacggggauaagggaucggguggcaucaaagggggauucgugcaucaacguauggcaucuaagauaggccgcugguacuccagaacaaugucaaaaacuaagaggauggguauggggcuguauguaaaguacgacggcgaccccuggaccgauagugaggcucucgcccuuagcggaguuaugguguccauggaggaaccgggcugguacucuuuuggguucgaaauuaaagacaagaaaugcgaugucccuuguaucggaaucgagauggugcacgacgguggcaagacaacuuggcauagcgcugccaccgcaauuuauugccugauggggucaggacaguugcuaugggauacagugaccggcgucaauaugacucuguga

SEQ ID NO: 158104 - RNA, 1401 nt, Artificial Sequence
  derived and/or modified CDS sequence (opt3) from neuraminidase__InfluenzaB__AHL92633
augcugcccagcaccauccagacacucacucuuuuccugacguccggcgggguguuguuaucucuguacgucucagccagucuaagcuaucuccuguacuccgacauucuucugaaguuuucuagaaccgagauaacagcuccuaucaugccauuggauugcgcaaacgccucgaauguucaagcggugaacaggucagcuacuaaaggaguaaccuuccuccugccggaacccgaguggacauauccucggcugagcuguccagguaguaccuuucagaaggcccucuuaauuucuccccaccgcuucggcgaaacuaaaggaaauuccgcaccucugaucauucgagagccauuuaucgccugcgggcccaaggaauguaaacauuucgcucuuacacacuacgcagcccagccuggcgguuauuacaacgggacccgugaggacagaaauaaguugaggcaucugauaagcgugaagcuaggaaaaaucccaauugucgagaacuccaucuuucacauggcugccuggucaggcagugcgugccaugauggccgggaauggacguauauugggguggacggaccggauagcaaugcacuccugaagaucaaauacggugaggccuacacugacaccuaucacucuuacgcuaagaacauacuucgcacacaggaauccgccuguaauugcauuggcggggauuguuaucugaugaucacugacggacccgcaucaggcauuagcgagugcagauucuugaaaaucagggagggucggaucauuaaggaaauauuuccuaccgggcgcguuaagcacacagaggaauguaccugcggauucgcuaguaacaaaacgaucgagugugccugccgagauaauucuuacacugcgaagagaccauuugugaaacucaacgucgaaacagacaccgccgagauuaggcugaugugcacugagacauauuuagauacgccccggccuaaugacggcuccaucaccggcccaugugaaagcaacggggauaagggaucggguggcauaaaagggggauucgugcaucaacguauggcaucuaagauuggccgcugguacuccagaaccaugucaaaaacaaagaggauggguauggggcuguauguaaaguacgacggcgaccccuggacugauagugaggcucucgcccuuagcggaguuaugguguccauggaggaaccgggcugguacucuuuuggguucgaaaucaaagacaagaaaugcgaugucccuuguaucggaauugagauggugcacgacgguggcaagaccacauggcauagcgcugccacugcaaucuauugccugauggggucaggacaguugcuaugggauaccgugacaggcgucaauaugacccuguga

SEQ ID NO: 158105 - RNA, 1401 nt, Artificial Sequence; identical to SEQ ID NO: 156836
  derived and/or modified CDS sequence (opt3) from neuraminidase__InfluenzaB__AHL92644

SEQ ID NO: 158106 - RNA, 1401 nt, Artificial Sequence; identical to SEQ ID NO: 156836
  derived and/or modified CDS sequence (opt3) from neuraminidase__InfluenzaB__AHL92655

SEQ ID NO: 158107 - RNA, 1401 nt, Artificial Sequence; identical to SEQ ID NO: 156865
  derived and/or modified CDS sequence (opt3) from neuraminidase__InfluenzaB__AHL92666

SEQ ID NO: 158108 - RNA, 1401 nt, Artificial Sequence; identical to SEQ ID NO: 156865
  derived and/or modified CDS sequence (opt3) from neuraminidase__InfluenzaB__AHL92677

SEQ ID NO: 158109 - RNA, 1401 nt, Artificial Sequence; identical to SEQ ID NO: 156836
  derived and/or modified CDS sequence (opt3) from neuraminidase__InfluenzaB__AHL92688

SEQ ID NO: 158110 - RNA, 1401 nt, Artificial Sequence; identical to SEQ ID NO: 156865
  derived and/or modified CDS sequence (opt3) from neuraminidase__InfluenzaB__AHL92699

SEQ ID NO: 158111 - RNA, 1401 nt, Artificial Sequence; identical to SEQ ID NO: 156865
  derived and/or modified CDS sequence (opt3) from neuraminidase__InfluenzaB__AHL92710

SEQ ID NO: 158112 - RNA, 1401 nt, Artificial Sequence; identical to SEQ ID NO: 156865
  derived and/or modified CDS sequence (opt3) from neuraminidase__InfluenzaB__AHL92721

SEQ ID NO: 158113 - RNA, 1401 nt, Artificial Sequence; identical to SEQ ID NO: 156865
  derived and/or modified CDS sequence (opt3) from neuraminidase__InfluenzaB__AHL92732

SEQ ID NO: 158114 - RNA, 1401 nt, Artificial Sequence; identical to SEQ ID NO: 156865
  derived and/or modified CDS sequence (opt3) from neuraminidase__InfluenzaB__AHL92743

SEQ ID NO: 158115 - RNA, 1401 nt, Artificial Sequence; identical to SEQ ID NO: 156865
  derived and/or modified CDS sequence (opt3) from neuraminidase__InfluenzaB__AHL92754

SEQ ID NO: 158116 - RNA, 1401 nt, Artificial Sequence; identical to SEQ ID NO: 156865
  derived and/or modified CDS sequence (opt3) from neuraminidase__InfluenzaB__AHL92765

SEQ ID NO: 158117 - RNA, 1401 nt, Artificial Sequence; identical to SEQ ID NO: 156865
  derived and/or modified CDS sequence (opt3) from neuraminidase__InfluenzaB__AHL92776

SEQ ID NO: 158118 - RNA, 1401 nt, Artificial Sequence; identical to SEQ ID NO: 156865
  derived and/or modified CDS sequence (opt3) from neuraminidase__InfluenzaB__AHL92787

SEQ ID NO: 158119 - RNA, 1401 nt, Artificial Sequence; identical to SEQ ID NO: 156865
  derived and/or modified CDS sequence (opt3) from neuraminidase__InfluenzaB__AHL92798

SEQ ID NO: 158120 - RNA, 1401 nt, Artificial Sequence
  derived and/or modified CDS sequence (opt3) from neuraminidase__InfluenzaB__AHL92809
augcugcccagcaccauccagacacucacucuuuuccugacguccggcgggguguuguuaucucuguacgucucagccagucuaagcuaucuccuguacuccgacauucuucugaaguuuucuagaaccgagauaacagcuccuaucaugccauuggauugcgcaaacgccucgaauguucaagcggugaacaggucagcuauuaaaggaguaacucuccugcugccggaacccgaguggaccuauccucggcucagcuguccagguaguacauuccagaaggccuuacugaucucuccccaccgcuuuggcgaaaccaaaggaaauuccgcaccucuuauuauccgagagccauucauagccugcgggcccaaggaauguaaacauuuugcuuugacucacuacgcagcccagccuggcgguuauuacaacgggacacgugaggacagaaauaagcugaggcaucuaaucagcgugaagcucggaaaaauuccaaccgucgagaacuccaucuuccacauggcugccuggucaggcagugcgugccaugauggccgggaauggacguauauugggguggacggaccggauagcaaugcacugcuuaagaucaaauacggugaggccuacacugacaccuaucacucuuacgcuaagaacauacugcgcacacaggaauccgccuguaauugcauuggcggggauuguuauuugaugaucacugacggacccgcaucaggcauuagcgagugcagauuucucaaaaucagggagggucggaucauuaaggaaauauucccuaccgggcgcguuaagcacacagaggaauguaccugcggauuugcuaguaacaaaacgaucgagugugccugccgagauaauucuuacacugcgaagagaccauucgugaaacugaacgucgaaacagacaccgccgagauuagguuaaugugcacugagacauaucuggauacgccccggccuaaugacggcuccaucaccggcccaugugaaagcaacggggauaagggaucggguggcauaaaagggggauuugugcaucaacguauggcaucuaagauuggccgcugguacuccagaaccaugucaaaaacaaagaggauggguauggggcucuauguaaaguacgacggcgaccccuggacugauagugaggcucuugcccugagcggaguuaugguguccauggaggaaccgggcugguacucuuucggguuugaaaucaaagacaagaaaugcgaugucccuuguaucggaauugagauggugcacgacgguggcaagaccacauggcauagcgcugccacugcaaucuauugcuugauggggucaggacagcuacugugggauaccgugacaggcgucaauaugacccucuga

SEQ ID NO: 158121 - RNA, 1401 nt, Artificial Sequence
  derived and/or modified CDS sequence (opt3) from neuraminidase__InfluenzaB__AHL92820
augcugcccagcaccauccagacacucacucuuuuccugacguccggcgggguguuguuaucucuguacgucucagccagucuaagcuaucuccuguacuccgacauucuucugaaguuuucuagaaccgagauaacagcuccuaucaugccauuggauugcgcaaacgccucgaauguucaagcggugaacaggucagcuacuaaaggaguaacccuccugcugccggaacccgaguggacauauccucggcucagcuguccagguaguaccuuccagaaggccuuacugauuucuccccaccgcuuuggcgaaacuaaaggaaauuccgcaccucuuaucauucgagagccauucaucgccugcgggcccaaggaauguaaacauuuugcuuugacacacuacgcagcccagccuggcgguuauuacaacgggacccgugaggacagaaauaagcugaggcaucuaauaagcgugaagcucggaaaaaucccaacggucgagaacuccauuuuccacauggcugccuggucaggcagugcgugccaugauggccgggaauggacuuauaucgggguggacggaccggauagcaaugcacugcuuaagauuaaauacggugaggccuacaccgacacauaucacucuuacgcuaagaacauccugcgcacucaggaauccgccuguaauugcauaggcggggauuguuauuugaugauuaccgacggacccgcaucaggcaucagcgagugcagauuucucaaaauuagggagggucggaucaucaaggaaauuuucccuacagggcgcguuaagcacaccgaggaauguacgugcggauuugcuaguaacaaaacuauagagugugccugccgagauaauucuuacacagcgaagagaccauucgugaaacugaacgucgaaaccgacacugccgagaucagguuaaugugcacagagaccuaucuggauacgccccggccuaaugacggcuccauuaccggcccaugugaaagcaacggggauaagggaucggguggcaucaaagggggauuugugcaucaacguauggcaucuaagauaggccgcugguacuccagaacaaugucaaaaacuaagaggauggguauggggcucuauguaaaguacgacggcgaccccuggaccgauagugaggcucuugcccugagcggaguuaugguguccauggaggaaccgggcugguacucuuucggguuugaaauuaaagacaagaaaugcgaugucccuuguaucggaaucgagauggugcacgacgguggcaagaaaacauggcauagcgcugccacugcaauuuauugcuugauggggucaggacagcuacugugggauaccgugacaggcgucaauaugacccucuga

SEQ ID NO: 158122 - RNA, 1401 nt, Artificial Sequence
  derived and/or modified CDS sequence (opt3) from neuraminidase__InfluenzaB__AHL92842
augcugcccagcaccauccagacacucacucuuuuccugacguccggcgggguguuguuaucucuguacgucucagccagucuaagcuaucuccuguacuccgacauucuucugaaguuuucuagaaccgagauaacagcuccuaucaugccauuggauugcgcaaacgccucgaauguucaagcggugaacaggucaacuaccaaaggaguaacacuccugcugccggaacccgaguggaccuauccucggcucagcuguccagguaguacuuuccagaaggcuuuacugauuucuccccaccgcuuuggcgaaacaaaaggaaauuccgccccucuuaucauucgagagccauucaucgcaugcgggcccaaggaauguaaacauuuugccuugacccacuacgcugcacagccuggcgguuauuacaacgggacgcgugaggacagaaauaagcugaggcaucuaauaagcgugaagcucggaaaaaucccaacugucgagaacuccauuuuccacauggccgcuuggucaggcagugccugccaugauggccgggaauggaccuauaucgggguggacggaccggauagcaaugcgcugcuuaagauuaaauacggugaggcauacacagacacuuaucacucuuacgccaagaacauccugcgcacccaggaauccgcuuguaauugcauaggcggggauuguuauuugaugauuacagacggacccgccucaggcaucagcgagugcagauuucucaaaauuagggagggucggaucaucaaggaaauuuucccuaccgggcgcguuaagcacacggaggaauguacuugcggauuugcaaguaacaaaacaauagagugugcuugccgagauaauucuuacaccgccaagagaccauucgugaaacugaacgucgaaacugacacagcggagaucagguuaaugugcaccgagacguaucuggauacaccccggccuaaugacggcuccauuaccggcccaugugaaagcaacggggauaagggaucggguggcaucaaagggggauuugugcaucaacguauggccucuaagauaggccgcugguacuccagaacuaugucaaaaaccaagaggauggguauggggcucuauguaaaguacgacggcgaccccuggacagauagugaggcacuugcucugagcggaguuaugguguccauggaggaaccgggcugguacucuuucggguuugaaauuaaagacaagaaaugcgaugucccuuguaucggaaucgagauggugcacgacgguggcaagacuaccuggcauagcgccgcuacagccauuuauugcuugauggggucaggacagcuacugugggauaccgugacuggcgucaauaugacgcucuga

SEQ ID NO: 158123 - RNA, 1401 nt, Artificial Sequence; identical to SEQ ID NO: 156865
  derived and/or modified CDS sequence (opt3) from neuraminidase__InfluenzaB__AHL92853

SEQ ID NO: 158124 - RNA, 1401 nt, Artificial Sequence; identical to SEQ ID NO: 156865
  derived and/or modified CDS sequence (opt3) from neuraminidase__InfluenzaB__AHL92864

SEQ ID NO: 158125 - RNA, 1401 nt, Artificial Sequence; identical to SEQ ID NO: 156718
  derived and/or modified CDS sequence (opt3) from neuraminidase__InfluenzaB__AHL92875

SEQ ID NO: 158126 - RNA, 1401 nt, Artificial Sequence; identical to SEQ ID NO: 156675
  derived and/or modified CDS sequence (opt3) from neuraminidase__InfluenzaB__AHL92886

SEQ ID NO: 158127 - RNA, 1401 nt, Artificial Sequence
  derived and/or modified CDS sequence (opt3) from neuraminidase__InfluenzaB__AHL92897
augcugcccagcaccauccagacacucacucuuuuccugacguccggcgggguguuguuaucucuguacgucucagccagucuaagcuaucuccuguacuccgacauucuucugaaguuuucuccuaccgagauaacagcuccaacuaucccguuggauugcgcaaacgccucgaauguucaagcggugaacagaucagcuaccaaaggaguaacacuccugcugcccgaaccugaguggaccuauccaaggcucagcugucccgguaguacuuuccagaaggccuuacugauuuccccucaccgguuuggcgaaacaaaaggaaauucugcaccacuuaucauucgcgagcccuucaucgccugcgggccuaacgaauguaagcauuuugcuuugacccacuacgcagcccagccaggcgguuauuacaaugggacgcgaggagaccguaacaaacugagacaucuaauaagcgugaagcucggcaagaucccgacugucgaaaauuccauuuuccacauggcugccuggucaggcagugcgugccaugaugggaaagaguggaccuauaucggaguggacggucccgauaacaaugcacugcuuaagauuaaauacggcgaggccuacacagacacuuaucacagcuacgcuaacaauauccugaggacccaggagucugccuguaacugcauagggggaaauuguuauuugaugauuacagauggcuccgcaucagguguuagcgaaugccgguuucucaagauccgcgaggggagaauuaucaaagagaucuucccuaccggaagggugaagcacacggaagaguguacuugcggcuuugcuaguaacaagacaauugaaugugccugccgggacaauucuuacaccgcgaaacgcccauucgucaagcugaacguggagacugauacagccgaaauacgauuaaugugcaccgacacguaucuggauacccccagaccugacgauggcuccaucacagggccaugugagagcaacggagacaaagguucgggcgggauuaagggaggcuuuguacaucaaaggauggcaucuaaaaucggucggugguacucccguacuaugucaaagaccgagcgcauggggaugggccucuauguuaaauacgacggagaucccugggcugacagugaugcccuugcuuucagcggcgugauggucuccaugaaggaaccggggugguacucuuuuggauucgagauaaaggacaaaaagugcgaugugccuuguauugguaucgaaauggugcacgacggcgggaaagagacauggcauagcgccgcaacugccaucuauugccugaugggaucaggccaguugcuaugggauaccgucacagguguugacauggcucuguga

SEQ ID NO: 158128 - RNA, 1401 nt, Artificial Sequence
  derived and/or modified CDS sequence (opt3) from neuraminidase__InfluenzaB__AHL92908
augcugcccagcaccauccagacacucacucuuuuccugacguugggcgggguguuacugucccuauacgucucugccucacucaguuaucugcuuuacagcgacauucuguugaaguuuucccaaaccgagauaacagcuccuaucaugccacucgauugcgcaaacgccucuaauguucaggcggugaacagaucggcuacuaaaggaguaacccugcugcucccggaacccgaguggacauauccuagguuaucauguccagguagcaccuuccagaaggcccugcuuauuaguccccaccgguuuggcgaaacuaaaggaaauuccgcaccuuugaucauucgcgagccauucaucgccugcgggcccaaggaauguaaacauuuugcucugacacacuacgcagcccagccuggcgguuauuacaacgggacccgagaggaccguaauaagcuaagacaucucauaucugugaagcugggaaaaaucccaacggucgagaacagcauuuuccacauggcugccugguccggcucagcgugccaugauggcaaggaauggacuuauaucgggguggacggaccggauaguaaugcacuucugaaaauuaaguacggugaggccuacaccgacacauaucacagcuacgcuaaaaacaucuugaggacucaagaaucugccuguaauugcauaggcggggauuguuaucucaugauuaccgacggacccgcauccggcaucucagagugccgguuucugaagauucgcgaggguagaaucaucaaggaaauuuucccuacagggaggguuaaacacaccgaggaauguacgugcggauuugcuagcaacaagacuauagagugugccugccgggauaauaguuacacagcgaaacgcccauucgugaaguuaaacgucgaaaccgacacugccgagauccgacugaugugcacagagaccuaucucgauacgcccagaccuaaugacggcucuauuaccggcccaugugaauccaacggggauaaaggaagcgguggcaucaaagggggauuugugcaucagaggauggcaucgaagauaggccggugguacucucguacaauguccaagacuaagcgcauggguauggggcuuuauguaaaauacgacggcgaccccuggaccgauucagaggcucuggccuugaguggaguuauggugagcauggaggaaccgggcugguacuccuucggguuugaaauuaaggacaaaaagugcgaugucccuuguaucggaaucgagauggugcacgacgguggcaaaacaacuuggcauucugcugccaccgcaguguauugccuaauggggagcggacagcugcucugggauacaauuaccggcgucgacauggcccuguga

SEQ ID NO: 158129 - RNA, 1401 nt, Artificial Sequence
  derived and/or modified CDS sequence (opt3) from neuraminidase__InfluenzaB__AHL92919
augcugcccagcaccauccagacacucacucuuuuccugacguccggcgggguguuguuaucucuguacgucucagccagucuaagcuaucuccuguacuccgacauucuucugaaguuuucuccuaccgagauaacagcuccaacuaugccguuggauugcgcaaacgccucgaauguucaagcggugaacagaucagcuaccaaaggaguaacacuccugcugcccgaaccugaguggaccuauccaaggcucagcugucccgguaguacuuuccagaaggccuuacugaucuccccucaccgguuuggcgaaacaaaaggaaauucugcaccacuuauuauccgcgagcccuucauugccugcgggccuaacgaauguaagcauuuugcuuugacccacuacgcagcccagccaggcgguuauuacaaugggacgcgaggagaccguaacaaacugagacaucuaaucagcgugaagcucggcaagauaccgacugucgaaaauuccaucuuccacauggcugccuggucaggcagugcgugccaugaugggaaagaguggaccuauauuggaaucgacggucccgauaacaaugcacugcuuaagauuaaauacggcgaggccuacacagacacuuaucacagcuacgcuaacaauauccugaggacccaggagucugccuguaacugcauagggggaaauuguuauuugaugauuacagauggcuccgcaucaggugugagcgaaugccgguuucucaagauccgcgaggggagaauuaucaaagagaucuucccuaccggaaggguuaagcacacggaagaguguacuugcggcuuugcuaguaacaagacaauugaaugugccugccgggacaauucuuacaccgcgaaacgcccauucgugaagcugaacgucgagacugauacagccgaaauacgauuaaugugcaccgacacguaucuggauacccccagaccugacgauggcuccaucacagggccaugugagagcaacggagacaaagguucgggcgggauuaagggaggcuuugugcaucaaaggauggcaucuaaaaucggucggugguacucccguacuaugucaaagaccgagcgcauggggaugggccucuauguaaaauacgacggagaucccugggcugacagugaugcccuugcuuucagcggcguuaugguguccaugaaggaaccggggugguacucuuuuggauucgagauaaaggacaaaaagugcgaugucccuuguauugguaucgaaauggugcacgacggcgggaaagagacauggcauagcgccgcaacugccaucuauugccugaugggaucaggccaguugcuaugggauaccgugacaggugucgacauggcucuguga

SEQ ID NO: 158130 - RNA, 1401 nt, Artificial Sequence
  derived and/or modified CDS sequence (opt3) from neuraminidase__InfluenzaB__AHL92930
augcugcccagcaccauccagacacucacucuuuuccugacguccggcgggguguuguuaucucuguacgucucagccagucuaagcuaucuccuguacuccgacauucuucugaaguuuucuccuaccgagauaacagcuccaacuaugccguuggauugcgcaaacgccucgaauguucaagcggugaacagaucagcuaccaaaggaguaacacuccugcugcccgaaccugaguggaccuauccaaggcucagcugucccgguaguacuuuccagaaggccuuacugaucuccccucaccgguuuggcgaaacaaaaggaaauucugcaccacuuauuauccgcgagcccuucauugccugcgggccuaacgaauguaagcauuuugcuuugacccacuacgcagcccagccaggcgguuauuacaaugggacgcgaggagaccguaacaaacugagacaucuaaucagcgugaagcucggcaagauaccgacugucgaaaauuccaucuuccacauggcugccuggucaggcagugcgugccaugaugggaaagaguggaccuauauuggaguggacggucccgauaacgacgcacugcuuaagaucaaauacggcgaggccuacacagauacuuaucacagcuacgcuaauaacauucugaggacccaggagucugccuguaauugcaucgggggaaacuguuauuugaugauaacagacggcuccgcaucagguguuagcgaaugccgguuucucaagauucgcgaggggagaaucauuaaagagaucuucccuaccggaagggugaagcacacggaagaguguacuugcggcuuugcuaguaauaagacaaucgaaugugccugccgggauaacucuuacaccgcgaaacgcccauucgucaagcuggacguggagacugauacagccgaaauucgauuaaugugcaccgacacguaucuggauacccccagaccugacgacggcuccauaacagggccaugugagagcaauggagauaaagguucgggcgggaucaagggaggcuuuguacaucaaaggauggcaucuaaaauuggucggugguacucccguacuaugucaaagaccgagcgcauggggaugggccucuauguuaaauacgacggagaucccugggcugacagugaugcccuugcuuucagcggcgugauggucuccaugaaggaaccggggugguacucuuuuggauucgagaucaaggacaaaaagugcgaugugccuuguauagguauugaaauggugcacgacggcgggaaagagacauggcauagcgccgcaacugccaucuauugccugaugggaucaggccaguugcuaugggauaccgucacagguguugacauggcucuguga

SEQ ID NO: 158131 - RNA, 1401 nt, Artificial Sequence; identical to SEQ ID NO: 156675
  derived and/or modified CDS sequence (opt3) from neuraminidase__InfluenzaB__AHL92941

SEQ ID NO: 158132 - RNA, 1401 nt, Artificial Sequence; identical to SEQ ID NO: 156683
  derived and/or modified CDS sequence (opt3) from neuraminidase__InfluenzaB__AHL92952

SEQ ID NO: 158133 - RNA, 1401 nt, Artificial Sequence; identical to SEQ ID NO: 156683
  derived and/or modified CDS sequence (opt3) from neuraminidase__InfluenzaB__AHL92963

SEQ ID NO: 158134 - RNA, 1401 nt, Artificial Sequence
  derived and/or modified CDS sequence (opt3) from neuraminidase__InfluenzaB__AHL92974
augcugcccagcaccauccagacacucacucuuuuccugacguccggcgggguguuguuaucucuguacgucucagccagucuaagcuaucuccuguacuccgacauucuucugaaguuuucuccuaccgagauaacagcuccaacuaugccguuggauugcgcaaacgccucgaauguucacgcggugaacagaucagcuaccaaaggaguaacacuccugcugcccgaaccugaguggaccuauccaaggcucagcugucccgguaguacuuuccaaaaggccuuacugaucuccccucaucgguuuggcgaaacaaaaggaaauucugcaccacuuauuauccgcgagcccuucauugccugcgggccuaacgaauguaagcacuuugcuuugacccauuacgcagcccagccaggcgguuauuacaaugggacgcgaggagaccguaacaaacugagacaccuaaucagcgugaagcucggcaagauaccgacugucgaaaauuccaucuuccauauggcugccuggucaggcagugcgugccacgaugggaaagaguggaccuauauuggaguggacggucccgauaacaaugcacugcuuaagaucaaauacggcgaggccuacacagacacuuaucacagcuacgcuaacaauauucugaggacccaggagucugccuguaacugcaucgggggaaauuguuauuugaugauaacagauggcuccgcaucagguguuagcgaaugccgguuucucaagauucgcgaggggagaaucauuaaagagaucuucccuaccggaagggugaagcauacggaagaguguacuugcggcuuugcuaguaacaagacaaucgaaugugccugccgggacaauucuuacaccgcgaaacgcccauucgucaagcugaacguggagacugauacagccgaaauucgauuaaugugcaccgacacguaucuggauacccccagaccugacgauggcuccauaacagggccaugugagagcaacggagacaaagguucgggcgggaucaagggaggcuuuguacaccagaggauggcaucuaaaauuggucggugguacucccguacuaugucaaagaccgagcgcauggggaugggccucuauguuaaauacaauggagaccccugggcugauagugacgcccuugcuuucagcggcgugauggucuccaugaaggaaccggggugguacucuuuuggauucgagaucaaggauaaaaagugcgacgugccuuguauagguauugaaauggugcaugauggcgggaaagagacauggcacagcgccgcaacugccaucuauugccugaugggaucaggccaauugcuaugggacaccgucacagguguugauauggcucuguga

SEQ ID NO: 158135 - RNA, 1401 nt, Artificial Sequence; identical to SEQ ID NO: 156683
  derived and/or modified CDS sequence (opt3) from neuraminidase__InfluenzaB__AHL92985

SEQ ID NO: 158136 - RNA, 1401 nt, Artificial Sequence; identical to SEQ ID NO: 156683
  derived and/or modified CDS sequence (opt3) from neuraminidase__InfluenzaB__AHL92996

SEQ ID NO: 158137 - RNA, 1401 nt, Artificial Sequence; identical to SEQ ID NO: 158056
  derived and/or modified CDS sequence (opt3) from neuraminidase__InfluenzaB__AHL93008

SEQ ID NO: 158138 - RNA, 1401 nt, Artificial Sequence; identical to SEQ ID NO: 158065
  derived and/or modified CDS sequence (opt3) from neuraminidase__InfluenzaB__AHL93019

SEQ ID NO: 158139 - RNA, 1401 nt, Artificial Sequence; identical to SEQ ID NO: 158065
  derived and/or modified CDS sequence (opt3) from neuraminidase__InfluenzaB__AHL93030

SEQ ID NO: 158140 - RNA, 1401 nt, Artificial Sequence; identical to SEQ ID NO: 158079
  derived and/or modified CDS sequence (opt3) from neuraminidase__InfluenzaB__AHL93041

SEQ ID NO: 158141 - RNA, 1401 nt, Artificial Sequence; identical to SEQ ID NO: 158079
  derived and/or modified CDS sequence (opt3) from neuraminidase__InfluenzaB__AHL93052

SEQ ID NO: 158142 - RNA, 1401 nt, Artificial Sequence; identical to SEQ ID NO: 156865
  derived and/or modified CDS sequence (opt3) from neuraminidase__InfluenzaB__AHL93063

SEQ ID NO: 158143 - RNA, 1401 nt, Artificial Sequence; identical to SEQ ID NO: 156865
  derived and/or modified CDS sequence (opt3) from neuraminidase__InfluenzaB__AHL93074

SEQ ID NO: 158144 - RNA, 1401 nt, Artificial Sequence; identical to SEQ ID NO: 156865
  derived and/or modified CDS sequence (opt3) from neuraminidase__InfluenzaB__AHL93085

SEQ ID NO: 158145 - RNA, 1401 nt, Artificial Sequence; identical to SEQ ID NO: 158122
  derived and/or modified CDS sequence (opt3) from neuraminidase__InfluenzaB__AHL93096

SEQ ID NO: 158146 - RNA, 1401 nt, Artificial Sequence; identical to SEQ ID NO: 156865
  derived and/or modified CDS sequence (opt3) from neuraminidase__InfluenzaB__AHL93107

SEQ ID NO: 158147 - RNA, 1401 nt, Artificial Sequence; identical to SEQ ID NO: 156865
  derived and/or modified CDS sequence (opt3) from neuraminidase__InfluenzaB__AHL93118

SEQ ID NO: 158148 - RNA, 1401 nt, Artificial Sequence; identical to SEQ ID NO: 156836
  derived and/or modified CDS sequence (opt3) from neuraminidase__InfluenzaB__AHL93129

SEQ ID NO: 158149 - RNA, 1401 nt, Artificial Sequence; identical to SEQ ID NO: 156865
  derived and/or modified CDS sequence (opt3) from neuraminidase__InfluenzaB__AHL93140

SEQ ID NO: 158150 - RNA, 1401 nt, Artificial Sequence; identical to SEQ ID NO: 156836
  derived and/or modified CDS sequence (opt3) from neuraminidase__InfluenzaB__AHL93151

SEQ ID NO: 158151 - RNA, 1401 nt, Artificial Sequence; identical to SEQ ID NO: 156865
  derived and/or modified CDS sequence (opt3) from neuraminidase__InfluenzaB__AHL93162

SEQ ID NO: 158152 - RNA, 1401 nt, Artificial Sequence; identical to SEQ ID NO: 156865
  derived and/or modified CDS sequence (opt3) from neuraminidase__InfluenzaB__AHL93173

SEQ ID NO: 158153 - RNA, 1401 nt, Artificial Sequence; identical to SEQ ID NO: 156836
  derived and/or modified CDS sequence (opt3) from neuraminidase__InfluenzaB__AHL93184

SEQ ID NO: 158154 - RNA, 1401 nt, Artificial Sequence; identical to SEQ ID NO: 156865
  derived and/or modified CDS sequence (opt3) from neuraminidase__InfluenzaB__AHL93195

SEQ ID NO: 158155 - RNA, 1401 nt, Artificial Sequence; identical to SEQ ID NO: 156865
  derived and/or modified CDS sequence (opt3) from neuraminidase__InfluenzaB__AHL93206

SEQ ID NO: 158156 - RNA, 1401 nt, Artificial Sequence; identical to SEQ ID NO: 157009
  derived and/or modified CDS sequence (opt3) from neuraminidase__InfluenzaB__AHL93217

SEQ ID NO: 158157 - RNA, 1401 nt, Artificial Sequence; identical to SEQ ID NO: 157009
  derived and/or modified CDS sequence (opt3) from neuraminidase__InfluenzaB__AHL93228

SEQ ID NO: 158158 - RNA, 1401 nt, Artificial Sequence
  derived and/or modified CDS sequence (opt3) from neuraminidase__InfluenzaB__AHL93239
augcugcccagcaccauccagacacucacucuuuuccugacguccggcgggguguuguuaucucuguacgucucagccagucuaagcuaucuccuguacuccgacauucuucugaaguuuucuccuaccgagauaacagcuccaacuaugccguuggauugcgcaaacgccucgaauguucaagcggugaacagaucagcuaccaaaggaguaacauuccuccugcccgaaccugaguggaccuauccaaggcugagcugucccgguaguacuuuucagaaggcccucuuaaucuccccucaccgguucggcgaaacaaaaggaaauucugcaccacugauuauccgcgagcccuuuauugccugcgggccuaacgaauguaagcauuucgcucuuacccacuacgcagcccagccaggcgguuauuacaaugggacgcgaggagaccguaacaaauugagacaucugaucagcgugaagcuaggcaagauaccgacugucgaaaauuccaucuuucacauggcugccuggucaggcagugcgugccaugaugggaaagaguggaccuauauuggaguggacggucccgauaacaaugcacuccugaagguuaaauacggcgaggccuacacagacacuuaucacagcuacgcuaacaagauccuuaggacccaggagucugccuguaauugcauugggggaaacuguuaucugaugaucacagauggcuccgcaucaggugugagcgaaugccgguucuugaaaauacgcgaggggagaauuaucaaggagauuuuuccuaccggaagggucaagcacacggaagaguguacuugcggcuucgcuaguaauaaaacaaucgaaugugccugccgggacaacucuuacaccgcgaagcgcccauuugugaaacucaauguagagacugauacagccgaaauccgacugaugugcaccgacacguauuuagauacccccagaccugacgauggcuccauuacagggccaugugagagcaacggagacaaggguucgggcgggauaaaaggaggcuucguucaucaaaggauggagucuaagaucggucggugguacucccguacuaugucaaaaaccgaacgcauggggaugggccuguaugugaaguacgacggagaucccugggcagacagugaugcucucgccuuuagcggcgucaugguguccaugaaggagccggggugguacucuuucggauucgaaauuaaagacaagaaaugcgaugugccuuguaucgguauagagaugguccacgacggcgggaaggaaacauggcauagcgcugccacugcaauuuauugccuuaugggaucaggccagcuguugugggauaccguuacagguguggacauggcccuauga

SEQ ID NO: 158159 - RNA, 1401 nt, Artificial Sequence
  derived and/or modified CDS sequence (opt3) from neuraminidase__InfluenzaB__AHL93250
augcugcccagcaccauccagaugcucacacuuuuccugacuuccggcgggguguuguuaucucuguacgucucagccagucuaagcuaucuccuguacuccgacauucuucugaaguuuucuccuacggagauaaccgcuccaacaaugccguuggauugcgcaaacgccucgaauguucacgcggugaacagaucagcuacuaaaggaguaaccuuccuccugcccgaaccugaguggacauauccaaggcugagcugucccgguaguaccuuucaaaaggcccucuuaaucuccccucaucgguucggcgaaacuaaaggaaauucugcaccacugauuauccgcgagcccuuuauugccugcgggccuaacgaauguaagcacuucgcucuuacacauuacgcagcccagccaggcgguuauuacaaugggacccgaggagaccguaacaaauugagacaccugaucagcgugaagcuaggcaagauaccgacggucgaaaauuccaucuuucauauggcugccuggucaggcagugcgugccacgaugggaaagaguggacuuauauuggaguggacggucccgauaacaaugcacuccugaagaucaaauacggcgaggccuacaccgacacauaucacagcuacgcuaacaauauucuuaggacucaggagucugccuguaacugcaucgggggaaauuguuaucugaugauaaccgauggcuccgcaucagguguuagcgaaugccgguucuugaagauucgcgaggggagaaucauuaaagagaucuuuccuacaggaagggugaagcauaccgaagaguguacgugcggcuucgcuaguaacaagacuaucgaaugugccugccgggacaauucuuacacagcgaaacgcccauuugucaagcucaacguggagaccgauacugccgaaauucgacugaugugcacagacaccuauuuagauacgcccagaccugacgauggcuccauaaccgggccaugugagagcaacggagacaaagguucgggcgggaucaagggaggcuucguacaccagaggauggcaucuaaaauuggucggugguacucccguacaaugucaaagacugagcgcauggggaugggccuguauguuaaauacgacggagaucccuggaccgacagugaugcucucgccuuuagaggcgugauggucagcaugaaggaaccggggugguacuccuucggauucgagaucaaggacaaaaagugcgaugugccuuguauagguauugaaauggugcaugacggcgggaaagagacauggcacucugcugccacugcaaucuauugccuuaugggaagcggccaacuguugugggauaccgucacagguguugacauggcccuauga

SEQ ID NO: 158160 - RNA, 1401 nt, Artificial Sequence; identical to SEQ ID NO: 157009
  derived and/or modified CDS sequence (opt3) from neuraminidase__InfluenzaB__AHL93261

SEQ ID NO: 158161 - RNA, 1401 nt, Artificial Sequence; identical to SEQ ID NO: 157009
  derived and/or modified CDS sequence (opt3) from neuraminidase__InfluenzaB__AHL93272

SEQ ID NO: 158162 - RNA, 1401 nt, Artificial Sequence; identical to SEQ ID NO: 157009
  derived and/or modified CDS sequence (opt3) from neuraminidase__InfluenzaB__AHL93283

SEQ ID NO: 158163 - RNA, 1401 nt, Artificial Sequence; identical to SEQ ID NO: 157009
  derived and/or modified CDS sequence (opt3) from neuraminidase__InfluenzaB__AHL93294

SEQ ID NO: 158164 - RNA, 1401 nt, Artificial Sequence
  derived and/or modified CDS sequence (opt3) from neuraminidase__InfluenzaB__AHL93305
augcugcccagcaccauccagacacucacucuuuuccugacguccggcgggguguuguuaucucuguacgucucagccagucuaagcuaucuccuguacuccgacauucuucugaaguuuucuccuaccgagauaacagcuccaacuaugccguuggauugcgcaaacgccucgaauguucaagcggugaacagaucagcuaccaaaggaguaacacuccugcugcccgaaccugaguggaccuauccaaggcucagcugucccgguaguacuuuccagaaggccuuacugaucuccccucaccgguuuggcgaaacaaaaggaaauucugcaccacuuauuauccgcgagcccuucguggccugcgggccuaacgaauguaagcauuuugcuuugacccacuacgcagcccagccaggcgguuauuacaaugggacgcgaggagaccguaacaaacugagacaucuaauuagcgucaagcucggcaagaucccgacuguggaaaauuccauauuccacauggcugccuggucaggcagugcgugccaugaugggaaagaguggaccuauaucggaguugacggucccgauaacaaugcacugcuuaaggugaaauacggcgaggccuacacagacacuuaucacagcuacgcuaacaagauucugaggacccaggagucugccuguaauugcaucgggggaaacuguuauuugaugauuacagauggcuccgcaucaggugucagcgaaugccgguuucucaaaauccgcgaggggagaauaauuaaggagaucuucccuaccggaagggugaagcacacggaagaguguacuugcggcuuugcuaguaauaaaacaauugaaugugccugccgggacaacucuuacaccgcgaagcgcccauucguaaaacugaauguugagacugauacagccgaaauccgauuaaugugcaccgacacguaucuggauacccccagaccuaacgacggcuccaucacagggccaugugagagcaacggagauaaggguucgggcgggauuaaaggaggcuuugugcaucaaaggauggagucuaagauaggucggugguacucccguacuaugucaaaaaccgaacgcauggggaugggccucuaugucaaguacgacggagaccccugggcagauagugacgcucuugccuucagcggcgugaugguguccaugaaggagccggggugguacucuuuuggauucgaaaucaaagauaagaaaugcgacgucccuuguauugguaucgagaugguucacgauggcgggaaggaaacauggcauagcgcugccacugcaauauauugccugaugggaucaggccaguugcuaugggacaccgugacagguguagauauggcccuguga

SEQ ID NO: 158165 - RNA, 1401 nt, Artificial Sequence; identical to SEQ ID NO: 157009
  derived and/or modified CDS sequence (opt3) from neuraminidase__InfluenzaB__AHL93316

SEQ ID NO: 158166 - RNA, 1401 nt, Artificial Sequence
  derived and/or modified CDS sequence (opt3) from neuraminidase__InfluenzaB__AHL93338
augcugcccagcaccauccagacacucacucuuuuccugacguccggcgggguguuguuaucucuguacgucucagccagucuaagcuaucuccuguacuccgacauucuucugaaguuuucuccuaccgagauaacagcuccaacuaugccguuggauugcgcaaacgccucgaauguucaagcggugaacagaucagcuaccaaaggaguaacacuccugcugcccgaaccugaguggaccuauccaaggcucagcugucccgguaguacuuuccagaaggccuuacugaucuccccucaccgguuuggcgaaacaaaaggaaauucugcaccacuuauuauccgcgagcccuucauugccugcgggccuaacgaauguaagcauuuugcuuugacccacuacgcagcccagccaggcgguuauuacaaugggacgcgaggagaccguaacaaacugagacaucuaaucagcgugaagcucggcaagauaccgacugucgaaaauuccaucuuccacauggcugccuggucaggcagugcgugccaugaugggaaagaguggaccuauauuggaguggacggucccgauaacaaugcacugcuuaagguuaaauacggcgaggccuacacagacacuuaucacagcuacgcuaacaagauccugaggacccaggagucugccuguaauugcauugggggaaacuguuauuugaugaucacagauggcuccgcaucaggugugagcgaaugccgguuucucaaaauacgcgaggggagaauuaucaaggagauuuucccuaccggaagggucaagcacacggaagaguguacuugcggcuuugcuaguaauaaaacaaucgaaugugccugccgggacaacucuuacaccgcgaagcgcccauucgugaaacugaauguagagacugaugccgcagaaauccgauuaaugugcacagacaccuaucuggauacgcccagaccuaacgacggcuccauuaccgggccaugugagagcaacggagauaaggguucgggcgggauaaaaggaggcuuuguucaucaaaggauggagucuaagaucggucggugguacucccguacaaugucaaaaacugaacgcauggggaugggccucuaugugaaguacgacggagaccccugggcugauagugacgcccuugcuuucagcggcgucaugguguccaugaaggagccggggugguacucuuuuggauucgaaauuaaagauaagaaaugcgacgugccuuguaucgguauagagaugguccacgauggcgggaaggaaaccuggcauagcgccgcaacagccauuuauugccugaugggaucaggccaguugcuaugggacacuguuaccgguguggauauggcucuguga

SEQ ID NO: 158167 - RNA, 1401 nt, Artificial Sequence
  derived and/or modified CDS sequence (opt3) from neuraminidase__InfluenzaB__AHL93349
augcugcccagcaccauccagacacucacucuuuuccugacguccggcgggguguuguuaucucuguacgucucagccagucuaagcuaucuccuguacuccgacauucuucugaaguuuucuccuaccgagauaacagcuccaacuaugccguuggauugcgcaaacgccucgaauguucaagcggugaacagaucagcuaccaaaggaguaacacuccugcugcccgaaccugaguggaccuauccaaggcucagcugucaggguaguacuuuccagaaggccuuacugaucucuccccaccgguuuggcgaaacaaaaggaaauuccgcaccucuuauuauccgcgagccauucauugccugcgggcccaacgaauguaagcauuuugcuuugacccacuacgcagcccagccuggcgguuauuacaaugggacgcgaggagaccguaacaaacugagacaucuaaucagcgugaagcucggcaagauaccaacugucgaaaauuccaucuuccacauggcugccuggucaggcagugcgugccaugaugggaaagaguggaccuauauuggaguggacgguccggauaacaaugcacugcuuaagguuaaauacggcgaggccuacacagacacuuaucacagcuacgcuaacaagauccugaggacccaagagucugccuguaauugcauugggggaaacuguuauuugaugaucacagauggcuccgcaucaggugugagcgaaugccgguuucucaaaauacgcgaggggagaauuaucaaggagauuuuccccaccggaagggucaagcacacggaagaguguacuugcggcuuugcuaguaauaaaacaaucgaaugugccugccgggacaacucuuacaccgcgaagcgcccuuucgugaaacugaauguagagacugauacagccgaaauccgauuaaugugcaccgacacguaucuggauaccccaagacccaacgacggcuccauuacagggccuugugagagcaacggagauaaggguucgggcgggauaaaaggaggcuuuguucaucagaggauggagucuaagaucggucggugguacucccguacuaugucaaaaaccgaacgcauggggauggagcucuaugugaaguacgacggcgacccaugggcagauagugacgcucuugccuucagcggagucaugguguccaugaaggaacccggcugguacucuuuuggguucgagauuaaagauaagaaaugcgacgugccguguaucggaauagaaaugguccacgaugguggcaaggagacauggcauagcgcugccacugcaauuuauugccugauggggucaggacaguugcuaugggacaccguuacaggcgugaauauggcccuguga

SEQ ID NO: 158168 - RNA, 1401 nt, Artificial Sequence; identical to SEQ ID NO: 157009
  derived and/or modified CDS sequence (opt3) from neuraminidase__InfluenzaB__AHL93371

SEQ ID NO: 158169 - RNA, 1401 nt, Artificial Sequence
  derived and/or modified CDS sequence (opt3) from neuraminidase__InfluenzaB__AHL93382
augcugcccagcaccauccagacacucacucuuuuccugacguccggcgggguguuguuaucucuguacgucucagccagucuaagcuaucuccuguacuccgacauucuucugaaguuuucuccuaccgagauaacagcuccaacuaugccguuggauugcgcaaacgccucgaauguucaagcggugaacagaucagcuaccaaaggaguaacacuccugcugcccgaaccugaguggaccuauccaaggcucagcugucccgguaguacuuuccagaaggccuuacugaucuccccucaccgguuuggcgaaacaaaaggaaauucugcaccacuuauuauccgcgagcccuucauugccugcgggccuaacgaauguaagcauuuugcuuugacccacuacgcagcccagccaggcgguuauuacaaugggacgcgaggagaccguaacaaacugagacaucuaaucagcgugaagcucggcaagauaccgacugucgaaaauuccaucuuccacauggcugccuggucaggcagugcgugccaugaugggaaagaguggaccuauauuggaguggacggucccgauaacaaugcacugcuuaagguuaaauacggcgaggccuacacagacacuuaucacagcuacgcuaacaagauccugaggacccaggagucugccuguaauugcauugggggaaacuguuauuugaugaucacagauggcuccgcaucaggugugagcgaaugccgguuucucaaaauacgcgaggggagaauuaucaaggagauuuucccuaccggaagggucaagcacacggaagaguguacuugcggcuuugcuaguaauaaaacaaucgaaugugccugccgggacaacucuuacaccgcgaagcgcccauucgugaaacugaauguagagacugauacagccgaaauccgauuaaugugcaccgacacguaucuggauacccccagaccuaacgacggcuccauuacagggccaugugagagcaacggagauaaggguucgggcgggauaaaaggaggcuuuguucaucaaaggauggagucuaagaucggucggugguacucccguacuaugucaaaaaccgaacgcauggggauggagcucuaugugaaguacgacggcgaccccugggcagauagugacgcucuugccuucagcggagucaugguguccaugaaggaaccgggcugguacucuuuuggguucgagauuaaagauaagaaaugcgacgugccuuguaucggaauagaaaugguccacgaugguggcaaggagacauggcauagcgcugccacugcaauuuauugccugauggggucaggacaguugcuaugggacaccguuacaggcgugaauauggcccuguga

SEQ ID NO: 158170 - RNA, 1401 nt, Artificial Sequence; identical to SEQ ID NO: 157009
  derived and/or modified CDS sequence (opt3) from neuraminidase__InfluenzaB__AHL93393

SEQ ID NO: 158171 - RNA, 1401 nt, Artificial Sequence; identical to SEQ ID NO: 157009
  derived and/or modified CDS sequence (opt3) from neuraminidase__InfluenzaB__AHL93404

SEQ ID NO: 158172 - RNA, 1401 nt, Artificial Sequence; identical to SEQ ID NO: 157009
  derived and/or modified CDS sequence (opt3) from neuraminidase__InfluenzaB__AHL93415

SEQ ID NO: 158173 - RNA, 1401 nt, Artificial Sequence; identical to SEQ ID NO: 157009
  derived and/or modified CDS sequence (opt3) from neuraminidase__InfluenzaB__AHL93426

SEQ ID NO: 158174 - RNA, 1401 nt, Artificial Sequence; identical to SEQ ID NO: 157009
  derived and/or modified CDS sequence (opt3) from neuraminidase__InfluenzaB__AHL93437

SEQ ID NO: 158175 - RNA, 1401 nt, Artificial Sequence; identical to SEQ ID NO: 158169
  derived and/or modified CDS sequence (opt3) from neuraminidase__InfluenzaB__AHL93448

SEQ ID NO: 158176 - RNA, 1404 nt, Artificial Sequence
  derived and/or modified CDS sequence (opt3) from neuraminidase__InfluenzaB__AHL93459
augcugcccagcaccauccagacacucacucuuuuccugacguccggcgggguguuguuaucucuguacgucucagccagucuaagcuaucuccuguacuccgacauucuucugaaguuuucuccuaccgagauaacagcuccaacuaugccguuggauugcgcaaacgccucgaauguucaagcggugaacagaucagcuaccaaaggaguaacacuccugcugcuccccgaaccugaguggaccuauccaagguuaagcugucccgguaguacuuuccagaaggcccugcuuaucuccccucaccgguuuggcgaaacaaaaggaaauucugcaccauugauuauccgcgagcccuucauugccugcgggccuaacgaauguaagcauuuugcucugacccacuacgcagcccagccaggcgguuauuacaaugggacgcgaggagaccguaacaaacuaagacaucucaucagcgugaagcugggcaagauaccgacugucgaaaauuccaucuuccacauggcugccuggucaggcagugcgugccaugaugggaaagaguggaccuauauuggaguggacggucccgauaacaaugcacuucugaagguuaaauacggcgaggccuacacagacacuuaucacagcuacgcuaacaagaucuugaggacccaggagucugccuguaauugcauugggggaaacuguuaucucaugaucacagauggcuccgcaucaggugugagcgaaugccgguuucugaaaauacgcgaggggagaauuaucaaggagauuuucccuaccggaagggucaagcacacggaagaguguacuugcggcuuugcuaguaauaaaacaaucgaaugugccugccgggacaacucuuacaccgcgaagcgcccauucgugaaauuaaauguagagacugauacagccgaaauccgacugaugugcaccgacacguaucucgauacccccagaccuaacgacggcuccauuacagggccaugugagagcaacggagauaaggguucgggcgggauaaaaggaggcuuuguucaucaaaggauggagucuaagaucggucggugguacucccguacuaugucaaaaaccgaacgcauggggaugggccuuuaugugaaguacgacggagaccccugggcagauagugacgcucuggccuucagcggcgucaugguguccaugaaggagccggggugguacucuuuuggauucgaaauuaaagauaagaaaugcgacgugccuuguaucgguauagagaugguccacgauggcgggaaggaaacauggcauagcgcugccacugcaauuuauugcuugaugggaucaggccagcuacugugggacaccguuacagguguggauauggcccucuga

SEQ ID NO: 158177 - RNA, 1401 nt, Artificial Sequence
  derived and/or modified CDS sequence (opt3) from neuraminidase__InfluenzaB__AHL93470
augcugcccagcaccauccagacacucacucuuuuccugacguccggcgggguguuguuaucucuguacgucucagccagucuaagcuaucuccuguacuccgacauucuucugaaguuuucuccuaccgagauaacagcuccaacuaugccguuggauugcgcaaacgccucgaauguucaagcggugaacagaucagcuaccaaaggaguaacacuccugcugcccgaaccugaguggaccuauccaaggcucagcugucccgguaguacuuuccagaaggccuuacugaucuccccucaccgguuuggcgaaacaaaaggaaauucugcaccacuuauuauccgcgagcccuucauugccugcgggccuaacgaauguaagcauuuugcuuugacccacuacgcagcccagccaggcgguuauuacaaugggacgcgaggagaccguaacaaacugagacaucuaaucagcgugaagcucggcaagauaccgacugucgaaaauuccaucuuccacauggcugccuggucaggcagugcgugccaugaugggaaagaguggaccuauauuggaguggacggucccgauaacaaugcacugcuuaagguuaaauacggcgaggccuacacagacacuuaucacagcuacgcuaacaagauccugaggacccaggagucugccuguaauugcauugggggaaacuguuauuugaugaucacagauggcuccgcaucaggugugagcgaaugccgguuucucaaaauacgcgaggggagaauuaucaaggagauuuucccuaccggaagggucaagcacacggaagaguguacuugcggcuuugcuaguaauaaaacaaucgaaugugccugccgggacaacucuuacaccgcgaagcgcccauucgugaaacugaauguagagacugauacagccgaaauccgauuaaugugcaccgacacguaucuggauacccccagaccuaacgacggcuccauuacagggccaugugagagcaacggagauaaggguucgggcgggauaaaaggaggcuuuguucaucaaaggauggagucuaagaucggucggugguacucccguacuaugucaaaaaccgaacgcauggggaugggccucuaugugaaguacgacggagaccccugggcagauagugacgcucuuacauucagcggcgucaugguguccaugaaggagccggggugguacucuuuuggauucgaaauuaaagauaagaaaugcgacgugccuuguaucgguauagagaugguccacgauggcgggaaggaaacuuggcauagcgccgcuaccgccauuuauugccugaugggaucaggccaguugcuaugggacacaguuaccgguguggauauggcacuguga

SEQ ID NO: 158178 - RNA, 1401 nt, Artificial Sequence; identical to SEQ ID NO: 156946
  derived and/or modified CDS sequence (opt3) from neuraminidase__InfluenzaB__AHL93481

SEQ ID NO: 158179 - RNA, 1401 nt, Artificial Sequence; identical to SEQ ID NO: 157004
  derived and/or modified CDS sequence (opt3) from neuraminidase__InfluenzaB__AHL93492

SEQ ID NO: 158180 - RNA, 1401 nt, Artificial Sequence; identical to SEQ ID NO: 156865
  derived and/or modified CDS sequence (opt3) from neuraminidase__InfluenzaB__AHL93503

SEQ ID NO: 158181 - RNA, 1401 nt, Artificial Sequence
  derived and/or modified CDS sequence (opt3) from neuraminidase__InfluenzaB__AHL93514
augcugcccagcaccauccagacacucacucuuuuccugacguccggcgggguguuguuaucucuguacgucucagccagucuaagcuaucuccuguacuccgacauucuucugaaguuuucuccuaccgagauaacagcuccaacuaugccguuggauugcgcaaacgccucgaauguucaagcggugaacagaucagcuaccaaaggaguaacacuccugcugcccgaaccugaguggaccuauccaaggcucagcugucccgguaguacuuuccagaaggccuuacugaucuccccucaccgguuuggcgaaacaaaaggaaauucugcaccacuuauuauccgcgagcccuucauugccugcgggccuaacgaauguaagcauuuugcuuugacccacuacgcagcccagccaggcgguuauuacaaugggacgcgaggagaccguaacaaacugagacaucuaaucagcauaaagcucggcaagaucccgacuguggaaaauuccauuuuccacauggcugccuggucaggcagugcgugccaugaugggaaagaguggaccuauaucggagucgacggucccgauaacaaugcacugcuuaaggugaaauacggcgaggccuacacagacacuuaucacagcuacgcuaacaagauucugaggacccaggagucugccuguaauugcaucgggggaaacuguuauuugaugauaacagauggcuccgcaucagguguuagcgaaugccgguuucucaaaauucgcgaggggagaaucauuaaggagaucuucccuaccggaagggugaagcacacggaagaguguacuugcggcuuugcuaguaauaaaacaaucgaaugugccugccgggacaacucuuacaccgcgaagcgcccauucgucaaacugaauguggagacugauacagccgaaauucgauuaaugugcaccgacacguaucuggauacccccagaccugacgauggcuccauaacagggagcugugagucgaacggagacaaggguucuggcgggaucaaaggaggcuuuguacaucaaaggauggaguccaagauuggucggugguacucacguacuaugaguaaaaccgaacgcauggggaugggccucuauguuaaguacgacggagauccaugggcagacagcgaugcucuuacauucuccggcgugauggucucuaugaaggagcccgggugguacagcuuuggauucgaaaucaaagacaagaaaugcgaugugccguguauagguauugagauggugcacgacggcgggaaggaaacuuggcauucagccgcuaccgccaucuauugccugaugggaaguggccaguugcuaugggauacagucaccgguguugacauggcacuguga

SEQ ID NO: 158182 - RNA, 1401 nt, Artificial Sequence; identical to SEQ ID NO: 156865
  derived and/or modified CDS sequence (opt3) from neuraminidase__InfluenzaB__AHL93525

SEQ ID NO: 158183 - RNA, 1401 nt, Artificial Sequence; identical to SEQ ID NO: 157004
  derived and/or modified CDS sequence (opt3) from neuraminidase__InfluenzaB__AHL93536

SEQ ID NO: 158184 - RNA, 1401 nt, Artificial Sequence
  derived and/or modified CDS sequence (opt3) from neuraminidase__InfluenzaB__AHL93558
augcugcccagcaccauccagacacucacucuuuuccugacguccggcgggguguuguuaucucuguacgucucagccagucuaagcuaucuccuguacuccgacauucuucugaaguuuucuccuaccgagauaacagcuccagcaaugccguuggauugcgccaacgcgucgaauguucaagcugugaacagaucagccacuaaaggaguaacccuccugcugcccgaaccugaguggacauauccaaggcucagcugucccgguaguaccuuccagaaggcauuacugaucuccccucaccgguuuggcgaaacuaaaggaaauucugccccacuuauuauccgcgagcccuucauugcuugcgggccuaacgaauguaagcauuuugcauugacacacuacgccgcucagccaggcgguuauuacaaugggacccgaggagaccguaacaaacugagacaucuaaucagcgugaagcucggcaagauaccgacggucgaaaauuccaucuuccacauggccgcguggucaggcagugcaugccaugaugggaaagaguggacuuauauuggaguggacggucccgauaacaaugcccugcuuaagguuaaauacggcgaggcuuacaccgacacauaucacagcuacgccaacaagauccugaggacucaggagucugcauguaauugcauugggggaaacuguuauuugaugaucaccgauggcuccgcuucaggugugagcgaaugccgguuucucaaaauacgcgaggggagaauuaucaaggagauuuucccuacaggaagggucaagcacaccgaagaguguacgugcggcuuugccaguaauaaaacuaucgaaugugcgugccgggacaacucuuacacagccaagcgcccauucgugaaacugaauguagagaccgauacugcagaaauccgauuaaugugcacagacaccuaucuggauacgcccagaccuaacgacggcuccauuaccgggccaugugagagcgauggagacaaggguucgggcgggauaaaaggaggcuuuauccaucaaaggauggagucuaagauuggucggugguacucccguacaaugucaaaaacugaacgcauggggaugggccucuauguuaaguacgacggagaucccugggcugacagugaugcccuugcuuucagcggcgugauggucuccaugaaggagccggggugguacucuuuuggauucgaaaucaaagacaagaaaugcgaugugccuuguauagguauugagauggugcacgacggcgggaaggaaaccuggcauagcgccgcaacagccaucuauugccugaugggaucaggccaguugcuaugggauacugucaccgguguugacauggcucuguga

SEQ ID NO: 158185 - RNA, 1401 nt, Artificial Sequence
  derived and/or modified CDS sequence (opt3) from neuraminidase__InfluenzaB__AHL93569
augcugcccagcaccauccagacacucacucuuuuccugacguccggcgggguguuguuaucucuguacgucucagccagucuaagcuaucuccuguacuccgacauucuucugaaguuuucuccuaccgagauaacagcuccaacuaugccguuggauugcgcaaacgccucgaauguucaagcggugaacagaucagcuaccaaaggaguaacacuccugcugcccgaaccugaguggaccuauccaaggcucagcugucccgguaguacuuuccagaaggccuuacugaucuccccucaccgguuuggcgaaacaaaaggaaauucugcaccacuuauuauccgcgagcccuucauugccugcgggccuaacgaauguaagcauuuugcuuugacccacuacgcagcccagccaggcgguuauuacaaugggacgcgaggagaccguaacaaacugagacaucuaaucagcgugaagcucggcaagauaccgacugucgaaaauuccaucuuccacauggcugccuggucaggcagugcgugccaugaugggaaagaguggaccuauauuggaguggacggucccgauaacaaugcacugcuuaagguuaaauacggcgaggccuacacagacacuuaucacagcuacgcuaacaagauccugaggacccaggagucugccuguaauugcauugggggaaacuguuauuugaugaucacagauggcuccgcaucaggugugagcgaaugccgguuucucaaaauacgcgaggggagaauuaucaaggagauuuucccuaccggaagggucaagcacacggaagaguguacuugcggcuuugcuaguaauaaaacaaucgaaugugccugccgggacaacucuuacaccgcgaagcgcccauucgugaaacugaauguagagacugauacagccgaaauccgauuaaugugcaccgacacguaucuggauacccccagaccuaacgacggcuccauuacagggccaugugagagcgauggagacaaggguucgggcgggauaaaaggaggcuuuguucaucaaaggauggagucuaagaucggucggugguacucccguacuaugucaaaaaccgaacgcauggggaugggccucuaugugaaguacgacggagaucccugggcagacagugaugcucuuacauucagcggcgucaugguguccaugaaggagccggggugguacucuuuuggauucgaaauuaaagacaagaaaugcgaugugccuuguaucgguauagagaugguccacgacggcgggaaggaaacuuggcauagcgccgcuaccgccauuuauugccugaugggaucaggccaguugcuaugggauacaguuaccgguguggacauggcacuguga

SEQ ID NO: 158186 - RNA, 1401 nt, Artificial Sequence; identical to SEQ ID NO: 157004
  derived and/or modified CDS sequence (opt3) from neuraminidase__InfluenzaB__AHL93580

SEQ ID NO: 158187 - RNA, 1401 nt, Artificial Sequence; identical to SEQ ID NO: 157004
  derived and/or modified CDS sequence (opt3) from neuraminidase__InfluenzaB__AHL93591

SEQ ID NO: 158188 - RNA, 1401 nt, Artificial Sequence
  derived and/or modified CDS sequence (opt3) from neuraminidase__InfluenzaB__AHL93613
augcugcccagcaccauccagacacucacucuuuuccugacguccggcgggguguuguuaucucuguacgucucagccagucuaagcuaucuccuguacuccgacauucuucugaaguuuucuccuaccgagauaacagcuccaacuaugccguuggauugcgcaaacgccucgaauguucaagcggugaacagaucagcuaccaaaggaguaacacuccugcugcccgaaccugaguggaccuauccaaggcucagcugucccgguaguacuuuccagaaggccuuacugaucuccccucaccgguuuggcgaaacaaaaggaaauucugcaccacuuauuauccgcgagcccuucauugccugcgggccuaacgaauguaagcauuuugcuuugacccacuacgcagcccagccaggcgguuauuacaaugggacgcgaggagaccguaacaaacugagacaucuaaucagcgugaagcucggcaagauaccgacugucgaaaauuccaucuuccacauggcugccuggucaggcagugcgugccaugaugggaaagaguggaccuauauuggaguggacggucccgauaacaaugcacugcuuaagguuaaauacggcgaggccuacacagacacuuaucacagcuacgcuaacaagauccugaggacccaggagucugccuguaauugcauugggggaaacuguuauuugauggugacagauggcuccgcaucaggugucagcgaaugccgguuucucaaaauccgcgaggggagaauaauuaaggagaucuucccuaccggaagggugaagcacacggaagaguguacuugcggcuuugcuaguaauaaaacaauugaaugugccugccgggacaacucuuacaccgcgaagcgcccauucguaaaacugaauguugagacugauacagccgaaauccgauuaaugugcaccgacacguaucuggauacccccagaccugacgauggcuccaucacagggccaugugagagcaacggagacaaggguucgggcgggauuaaaggaggcuuugugcaucaaaggauggagucuaagauaggucggugguacucccguacuaugucaaaaaccgaacgcauggggaugggccucuaugucaaguacgacggagaucccugggcagacagugaugcucuuguguucagcggcgugauggucuccaugaaggagccggggugguacucuuuuggauucgaaaucaaagacaagaaaugcgauguuccuuguauugguaucgagauggugcacgacggcgggaaggaaacauggcauagcgccgcuacugccauauauugccugaugggaucaggccaguugcuaugggauaccguaacagguguggacauggcacuguga

SEQ ID NO: 158189 - RNA, 1401 nt, Artificial Sequence; identical to SEQ ID NO: 157004
  derived and/or modified CDS sequence (opt3) from neuraminidase__InfluenzaB__AHL93624

SEQ ID NO: 158190 - RNA, 1401 nt, Artificial Sequence; identical to SEQ ID NO: 158188
  derived and/or modified CDS sequence (opt3) from neuraminidase__InfluenzaB__AHL93635

SEQ ID NO: 158191 - RNA, 1401 nt, Artificial Sequence; identical to SEQ ID NO: 158188
  derived and/or modified CDS sequence (opt3) from neuraminidase__InfluenzaB__AHL93646

SEQ ID NO: 158192 - RNA, 1401 nt, Artificial Sequence; identical to SEQ ID NO: 156865
  derived and/or modified CDS sequence (opt3) from neuraminidase__InfluenzaB__AHL93657

SEQ ID NO: 158193 - RNA, 1401 nt, Artificial Sequence; identical to SEQ ID NO: 157004
  derived and/or modified CDS sequence (opt3) from neuraminidase__InfluenzaB__AHL93668

SEQ ID NO: 158194 - RNA, 1401 nt, Artificial Sequence
  derived and/or modified CDS sequence (opt3) from neuraminidase__InfluenzaB__AHL93679
augcugcccagcaccauccagacacucacucuuuuccugacguccggcgggguguuguuaucucuguacgucucagcccuacucaguuaucugcuuuacagcgacauucuguugaaguuuuccccuaccgagauaacagcuccaacuaugucucucgauugcgcaaacgccucgaauguucaagcggugaacagaucagcuaccaaaggaguaacauuccugcugccggaacccgaguggaccuauccuaggcucagcuguccagguaguacuuuucagaaggccuuacugaucucuccccaccgguucggcgaaacaaaaggaaauuccgcaccucuuauuauccgcgagccauuuauugccugcgggcccaacgaauguaagcauuucgcuuugacccacuacgcagcccagccuggcgguuauuacaaugggacgcgaggagaccguaacaaacugagacaucuaaucagcgugaagcucggcaagauaccaacugucgaaaauuccaucuuucacauggcugccuggucaggcagugcgugccaugaugggaaagaguggaccuauauuggaguggacgguccggauaacgacgcacugcuuaagguuaaauacggcgaggccuacacagauacuuaucacagcuacgcuaauaagauccugaggacccaggagucugccuguaacugcauugggggaaauuguuauuugaugaucacagacggcuccgcaucaggugugagcgaaugccgguuccucaaaauacgcgaggggagaauuaucaaggagauucugcccaccggaagggucaagcacacggaagaguguacuugcggcuuugcuaguaacaaaacaaucgaaugugccugccgggauaauucuuacaccgcgaagcgcccuuucgugaaauuaaacguagagacugacacagccgaaauccgacugaugugcaccgauacguaucucgacaccccaagacccgaugacggcuccauuacagggccuugugagagcaauggagacaaggguucgggcgggauaaaaggaggcuuuguucaucaaaggauggagucuaagaucggucggugguacucccguacuaugucaaaaaccgaacgcauggggaugggccuuuaugugaaguacgauggagacccaugggcagauagugacgcucuggccuucagcggcgucaugguguccaugaaggagcccgggugguacucuuuuggauucgaaauuaaagauaagaaaugcgacgugccguguaucgguauagagaugguccacgauggcgggaaggaaacauggcauagcgcugccacugcaauuuauugcuugaugggaucaggccagcuacugugggacaccguuacagguguggauauggcccucuga

SEQ ID NO: 158195 - RNA, 1401 nt, Artificial Sequence; identical to SEQ ID NO: 158188
  derived and/or modified CDS sequence (opt3) from neuraminidase__InfluenzaB__AHL93690

SEQ ID NO: 158196 - RNA, 1401 nt, Artificial Sequence; identical to SEQ ID NO: 158188
  derived and/or modified CDS sequence (opt3) from neuraminidase__InfluenzaB__AHL93701

SEQ ID NO: 158197 - RNA, 1401 nt, Artificial Sequence; identical to SEQ ID NO: 158188
  derived and/or modified CDS sequence (opt3) from neuraminidase__InfluenzaB__AHL93712

SEQ ID NO: 158198 - RNA, 1401 nt, Artificial Sequence
  derived and/or modified CDS sequence (opt3) from neuraminidase__InfluenzaB__AHL93723
augcugcccagcaccauccagaugcucacacuuuuccugacuuccggcgggguguuguuaucucuguacgucucagccagucuaagcuaucuccuguacuccgacauucuucugaaguuuucuccuacggagauaaccgcuccaacaaugccguuggauugcgcaaacgccucgaauguucacgcggugaacagaucagcuacuaaaggaguaaccuuccuccugcccgaaccugaguggacauauccaaggcugagcugucccgguaguaccuuucaaaaggcccucuuaaucuccccucaucgguucggcgaaacuaaaggaaauucugcaccacugauuauccgcgagcccuuuauugccugcgggccuaacgaauguaagcacuucgcucuuacacauuacgcagcccagccaggcgguuauuacaaugggacccgaggagaccguaacaaauugagacaccugaucagcgugaagcuaggcaagauaccgacggucgaaaauuccaucuuucauauggcugccuggucaggcagugcgugccacgaugggaaagaguggacuuauauuggaguggacggucccgauaacaaugcacuccugaagaucaaauacggcgaggccuacaccgacacauaucacagcuacgcuaacaauauucuuaggacucaggagucugccuguaacugcaucgggggaaauuguuaucugaugauaaccgauggcuccgcaucagguguuagcgaaugccgguucuugaagauucgcgaggggagaaucauuaaagagaucuuuccuacaggaagggugaagcauaccgaagaguguacgugcggcuucgcuaguaacaagacuaucgaaugugccugccgggacaauucuuacacagcgaaacgcccauuugucaagcucaacguggagaccgauacugccgaaauucgacugaugugcacagacaccuauuuagauacgcccagaccugacgauggcuccaccacagggccaugugagagcaacggagacaaagguucgggcgggauaaagggaggcuucguacaccagaggauggcaucuaaaaucggucggugguacucccguacuaugucaaagaccgagcgcaaagggaugggccuguauguuaaguacgacggagaucccuggacagacagugaugcucucgccuuuagaggcgugauggucagcaugaaggaaccggggugguacuccuucggauucgagauuaaagacaagaaaugcgaugugccuuguaucgguauagaaauggugcaugacggcgggaaggagacuuggcacucugcugccaccgcaauuuauugccuuaugggaagcggccaacuguugugggauacagucaccgguguugacauggcccuauga

SEQ ID NO: 158199 - RNA, 1401 nt, Artificial Sequence; identical to SEQ ID NO: 157004
  derived and/or modified CDS sequence (opt3) from neuraminidase__InfluenzaB__AHL93734

SEQ ID NO: 158200 - RNA, 1401 nt, Artificial Sequence
  derived and/or modified CDS sequence (opt3) from neuraminidase__InfluenzaB__AHL93745
augcugcccagcaccauccagaugcucacacuuuuccugacuuccggcgggguguuguuaucucuguacgucucagccagucuaagcuaucuccuguacuccgacauucuucugaaguuuucuccuacggagauaaccgcuccaacaaugccguuggauugcgcaaacgccucgaauguucacgcggugaacagaucagcuacuaaaggaguaaccuuccuccugcccgaaccugaguggacauauccaaggcugagcugucccgguaguaccuuucaaaaggcccucuuaaucuccccucaucgguucggcgaaacuaaaggaaauucugcaccacugauuauccgcgagcccuuuauugccugcgggccuaacgaauguaagcacuucgcucuuacacauuacgcagcccagccaggcgguuauuacaaugggacccgaggagaccguaacaaauugagacaccugaucagcgugaagcuaggcaagauaccgacggucgaaaauuccaucuuucauauggcugccuggucaggcagugcgugccacgaugggaaagaguggacuuauauuggaguggacggucccgauaacaaugcacuccugaagaucaaauacggcgaggccuacaccgacacauaucacagcuacgcuaacaauguucuuaggacucaggagucugccuguaacugcauugggggaaauuguuaucugaugaucaccgauggcuccgcaucaggugugagcgaaugccgguucuugaagauacgcgaggggagaauuaucaaagagauuuuuccuacaggaagggucaagcauaccgaagaguguacgugcggcuucgcuaguaacaagacuaucgaaugugccugccgggacaauucuuacacagcgaaacgcccauuugugaagcucaacguagagaccgauacugccgaaauccgacugaugugcacagacaccuauuuagauacgcccagaccugacgauggcuccauuaccgggccaugugagagcaacggagacaaagguucgggcgggauaaagggaggcuucguucaccagaggauggcaucuaaaaucggucggugguacucccguacaaugucaaagacugagcgcaaagggaugggccuguaugugaaguacgacggagaucccuggaccgacagugaugcucucgccuuuagaggcgucauggugagcaugaaggaaccggggugguacuccuucggauucgagauuaaagacaagaaaugcgaugugccuuguaucgguauagaaaugguccaugacggcgggaaggagacauggcacucugcugccacugcaauuuauugccuuaugggaagcggccaacuguugugggauaccguuacagguguggacauggcccuauga

SEQ ID NO: 158201 - RNA, 1401 nt, Artificial Sequence; identical to SEQ ID NO: 157167
  derived and/or modified CDS sequence (opt3) from neuraminidase__InfluenzaB__AHL93756

SEQ ID NO: 158202 - RNA, 1401 nt, Artificial Sequence; identical to SEQ ID NO: 158188
  derived and/or modified CDS sequence (opt3) from neuraminidase__InfluenzaB__AHL93767

SEQ ID NO: 158203 - RNA, 1401 nt, Artificial Sequence
  derived and/or modified CDS sequence (opt3) from neuraminidase__InfluenzaB__AHL93778
augcugcccagcaccauccagacacucauucuuuuccugacuuccggcgggguguuguuaucucuguacgucucagcccuacucaguuaucugcuuuacagcgacauacuguugaaguuuuccccuacggagaucaccgcuccaacaaugucucucgauugcgcaaacgccucgaauguucaagcggugaacagaucagcuacuaaaggaguaaccuuccugcugccggaacccgaguggacauauccuaggcucagcuguccagguaguauuuuucagaaggccuuacugaucucuccccaccgguucggcgaaaccaaaggaaauuccgcaccucuuauuauccgcgagccauuuauagccugcgggcccaacgaauguaagcauuucgcuuugacucacuacgcagcccagccuggcgguuauuacaaugggacacgaggagaccguaacaaacugagacaucuaaucagcgugaagcucggcaagauuccaaccgucgaaaauuccaucuuucacauggcugccuggucaggcagugcgugccaugaugggaaagaguggacguauauuggaguggacgguccggauaacgacgcacugcuuaagguuaaauacggcgaggccuacacugauaccuaucacagcuacgcuaauaagauccugaggacacaggagucugccuguaacugcauagggggaaauuguuauuugaugauuacugacggcuccgcaucaggugugagcgaaugccgguuccucaaaauccgcgaggggagaauuaucaaggagaucuuucccaccggaagggucaagcacacagaagaguguaccugcggcuucgcuaguaacaaaacgauugaaugugccugccgggauaauucuuacacugcgaagcgcccuuuugugaaacugaacguagagacagacaccgccgaaauacgauuaaugugcacugauacauaucuggacaccccaagacccgaugacggcuccaucacggggccuugugagagcaauggagacaaggguucgggcgggauuaaaggaggcuucguucaucaaaggauggagucuaagaucggucggugguacucccguaccaugucaaaaacagaacgcauggggaugggccucuaugugaaguacgauggagacccaugggcagauagugacgcucuugccuuuagcggcgucaugguguccaugaaggagcccgggugguacucuuucggauucgaaauaaaagauaagaaaugcgacgugccguguauugguaucgagaugguccacgauggcgggaaggaaacuuggcauagcgcugccaccgcaaucuauugccugaugggaucaggccaguugcuaugggacacaguuacugguguggauauggcccuguga

SEQ ID NO: 158204 - RNA, 1401 nt, Artificial Sequence
  derived and/or modified CDS sequence (opt3) from neuraminidase__InfluenzaB__AHL93789
augcugcccagcaccauccagacacucacucuuuuccugacguccggcgggguguuguuaucucuguacgucucagccagucuaagcuaucuccuguacuccgacauucuucugaaguuuucuccuaccggaauaacagcuccaacuaugccguuggauugcgcaaacgccucgaauguucaagcggugaacagaucagcuaccaaagguguaacacuccugcugcccgagccugaauggaccuauccaaggcucagcugucccggcaguacuuuccagaaggccuuacugaucuccccucaccgguuuggggagacaaaaggaaauucugcaccacuuauuauccgcgaacccuucauugccugcggcccuaacgaguguaagcauuuugcuuugacccacuacgcagcccagccagguggguauuacaauggaacgcgaggcgaccguaacaaacugagacaucuaaucagcgugaagcucggcaagauaccgacugucgaaaauuccaucuuccacauggcugccuggucagggagugcgugccaugauggaaaagaguggaccuauauugguguggacggccccgauaacaaugcacugcuuaagguuaaauacggggaggccuacacagacacuuaucacagcuacgcuaacaagauccugaggacccaggaaucugccuguaauugcauuggaggcaacuguuauuugauggugacagaugguuccgcaucaggggucagcgagugccgguuucucaaaauccgcgaaggaagaauaauuaaggagaucuucccuaccggcagggugaagcacacggaggaauguacuugcggcuuugcuaguaauaaaacaauugagugugccugccgggacaacucuuacaccgcgaagcgcccauucguaaaacugaauguugaaacugauacagccgagauccgauuaaugugcaccgacacguaucuggauacccccagaccugacgauggguccaucacaggaccaugugaaagcaacggugacaagggcucugggggaauuaaaggcgguuuugugcaucaaaggauggagucgaagauagggcggugguacucccguacuaugucaaaaaccgagcgcaugggcaugggacucuaugucaaguacgacggcgaucccugggcagacagugaugcucuuguguucagcggggugauggucuccaugaaggaaccgggaugguacucuuuugguuucgagaucaaagacaagaaaugcgauguuccuuguauuggcaucgaaauggugcacgacgggggaaaggagacauggcauagcgccgcuacugccauauauugccugaugggcucaggucaguugcuaugggauaccguaacagggguggacauggcacuguga

SEQ ID NO: 158205 - RNA, 1401 nt, Artificial Sequence; identical to SEQ ID NO: 157004
  derived and/or modified CDS sequence (opt3) from neuraminidase__InfluenzaB__AHL93800

SEQ ID NO: 158206 - RNA, 1401 nt, Artificial Sequence; identical to SEQ ID NO: 157004
  derived and/or modified CDS sequence (opt3) from neuraminidase__InfluenzaB__AHL93811

SEQ ID NO: 158207 - RNA, 1401 nt, Artificial Sequence; identical to SEQ ID NO: 157540
  derived and/or modified CDS sequence (opt3) from neuraminidase__InfluenzaB__AHL93822

SEQ ID NO: 158208 - RNA, 1401 nt, Artificial Sequence; identical to SEQ ID NO: 157004
  derived and/or modified CDS sequence (opt3) from neuraminidase__InfluenzaB__AHL93833

SEQ ID NO: 158209 - RNA, 1401 nt, Artificial Sequence
  derived and/or modified CDS sequence (opt3) from neuraminidase__InfluenzaB__AHL93844
augcugcccagcaccauccagacacucacucuuuuccugacguccggcgggguguuguuaucucuguacgucucagccagucuaagcuaucuccuguacuccgggauucuucugaaguuuucuccuaccgagauaacagcuccaacuaugccguuggacugcgcaaacgccucgaauguucaagcggugaacagaucagcuaccaaagaaguaacacuccugcugcccgagccugaauggaccuauccaaggcucagcugucccgguaguacuuuccagaaggccuuacugaucuccccucaccgguuuggcgagacaaaaggaaauucugcaccacuuauuauccgcgaacccuucauugccugcggaccuaacgaguguaagcauuuugcuuugacccacuacgcagcccagccaggcgguuauuacaaugggacgcgaggagaucguaacaaacugagacaucuaaucagcgugaagcucggcaagauaccgacugucgaaaauuccaucuuccacauggcugccuggucaggcagugcgugccaugacgggaaagaguggaccuauauuggaguggauggucccgacgauaacgcacugcuuaagguuaaauacggcgaggccuacacagacacuuaucacagcuacgcucacaagauccugaggacccaggaaucugccuguaauugcauugggggaaacuguuauuugaugaucacagauggcuccgcaucaggugugagcgagugccgguuucucaaaauacgcgaggggagaauuaucaaggaaauuuucccuaccggaagggucaagcauacggaggaauguacuugcggcuuugcuaguaauaaaacaaucgagugugccugccgggacaacucuuacaccgcgaagcgcccauucgugaaacugaauguagaaacugauacagccgagauccgauuaaugugcaccgacacguaucuggauacccccagaccuaacgacggcuccauuacagggccaugugagagcaauggagauaaggguucgggcgggauaaaaggaggcuuuguucaccaaaggauggaaucuaagaucggucggugguacucccguacuaugucaaaaaccgagcgcauggggaugggccucuaugugaaguacgacggagaccccugggcagauagugacgcucuugccuucagcggcgucaugguguccaugaaggaaccggggugguacucuuuuggauucgagauuaaagauaagaaaugcgacgugccuuguaucgguauagaaaugguccaugauggcgggaaggagacauggcacagcgcugccacugcaauuuauugccugaugggaucaggccaguugcuaugggacaccguuacagguguggauauggcccuguga

SEQ ID NO: 158210 - RNA, 1401 nt, Artificial Sequence; identical to SEQ ID NO: 157004
  derived and/or modified CDS sequence (opt3) from neuraminidase__InfluenzaB__AHL93855

SEQ ID NO: 158211 - RNA, 1401 nt, Artificial Sequence; identical to SEQ ID NO: 157004
  derived and/or modified CDS sequence (opt3) from neuraminidase__InfluenzaB__AHL93866

SEQ ID NO: 158212 - RNA, 1401 nt, Artificial Sequence; identical to SEQ ID NO: 157004
  derived and/or modified CDS sequence (opt3) from neuraminidase__InfluenzaB__AHL93877

SEQ ID NO: 158213 - RNA, 1401 nt, Artificial Sequence; identical to SEQ ID NO: 157004
  derived and/or modified CDS sequence (opt3) from neuraminidase__InfluenzaB__AHL93888

SEQ ID NO: 158214 - RNA, 1401 nt, Artificial Sequence
  derived and/or modified CDS sequence (opt3) from neuraminidase__InfluenzaB__AHL93899
augcugcccagcaccauccagaugcucacacuuuuccugacuuccggcgggguguuguuaucucuguacgucucagccagucuaagcuaucuccuguacuccgacauucuucugaaguuuucuccuacggagauaaccgcuccaacaaugccguuggauugcgcaaacgccucgaauguucacgcggugaacagaucagcuacuaaaggaguaaccuuccuccugcccgaaccugaguggacauauccaaggcugagcugucccgguaguaccuuucaaaaggcccucuuaaucuccccucaucgguucggcgaaacuaaaggaaauucugcaccacugauuauccgcgagcccuuuauugccugcgaaccuaacgaguguaagcacuucgcucuuacacauuacgcagcccagccagggggcuauuacaaugguacccgaggggaccguaacaaauugagacaccugaucagcgugaagcuaggaaagauaccgacggucgaaaauuccaucuuucauauggcugccuggucaggcagugcgugccacgauggcaaagaguggacuuauauugggguggacggacccgauaacaaugcacuccugaagaucaaauacggugaggccuacaccgacacauaucacagcuacgcuaacaauauucuuaggacucaggaaucugccuguaacugcaucggcgggaauuguuaucugaugauaaccgauggauccgcaucaggcguuagcgagugccgguucuugaagauucgcgaggguagaaucauuaaagaaaucuuuccuacagggagggugaagcauaccgaggaauguacgugcggauucgcuaguaacaagacuaucgagugugccugccgggacaauucuuacacagcgaaacgcccauuugucaagcucaacguggaaaccgauacugccgagauucgacugaugugcacagacaccuauuuagauacgcccagaccugacgauggcuccaccacaggcccaugugagagcaacggggacaaaggaucggguggcauaaaagggggauucguacaccagaggauggcaucuaagaucggccggugguacucccguacuaugucaaagaccgaacgcaaagguauggggcuguauguuaaguacgacggcgaucccuggacagacagugaugcucucgccuuuagaggagugauggucagcaugaaggagccgggcugguacuccuucggguucgaaauuaaagacaagaaaugcgaugugccuuguaucggaauagagauggugcaugacgguggcaaggaaacuuggcacucugcugccaccgcaauuuauugccuuauggggagcggacaacuguugugggauacagucaccggcguugacauggcccuauga

SEQ ID NO: 158215 - RNA, 1401 nt, Artificial Sequence
  derived and/or modified CDS sequence (opt3) from neuraminidase__InfluenzaB__AHL93910
augcugcccagcaccauccagaugcucacacuuuuccugacuuccggcgggguguuguuaucucuguacgucucagccagucuaagcuaucuccuguacuccgacauucuucugaaguuuucuccuacggagauaaccgcuccaacaaugccguuggauugcgcaaacgccucgaauguucacgcggugaacagaucagcuacuaaaggaguaaccuuccuccugcccgaaccugaguggacauauccaaggcugagcugucccgguaguaccuuucaaaaggcccucuuaaucuccccucaucgguucggcgaaacuaaaggaaauucugcaccacugauuauccgcgagcccuuuauugccugcgggccuaacgaauguaagcacuucgcucuuacacauuacgcagcccagccaggcgguuauuacaaugggacccgaggagaccguaacaaauugagacaccugaucagcgugaagcuaggcaagauaccgacggucgaaaauuccaucuuucauauggcugccuggucaggcagugcgugccacgaugggaaagaguggacuuauauuggaguggacggucccgauaacaaugcacuccugaagaucaaauacggcgaggccuacaccgacacauaucacagcuacgcuaacaauauucuuaggacucaggagucugccuguaacugcaucgggggaaauuguuaucugaugauaaccgauggcuccgcaucagguguuagcgaaugccgguucuugaagauucgcgaggggagaaucauuaaagagaucuuuccuacaggaagggugaagcauaccgaagaguguacgugcggcuucgcuaguaacaagacuaucgaauguacaugccgggacaauucuuacaccgccaaacgcccauuugucaagcucaacguggagacugauacagcggaaauucgacugaugugcaccgacacguauuuagauacccccagaccugacgauggcgggauaacaggaccaugugaguccaacggugacaaaggcagcgggggaaucaagggcgguuucguacaccagaggauggccucgaaaauugggcggugguacucucguacuauguccaagaccgagcgcaaaggcaugggacuguauguuaaguacgacggcgaucccuggacagacucagaugcacucgcuuuuagaggggugauggucaguaugaaggaaccgggaugguacagcuucgguuucgagaucaaagacaagaaaugcgaugugccuuguauaggcauugaaauggugcaugacgggggaaaggagacuuggcacuccgccgcuaccgccaucuauugccuuaugggcucuggucaacuguugugggauacagucaccgggguugacauggcacuauga

SEQ ID NO: 158216 - RNA, 1401 nt, Artificial Sequence; identical to SEQ ID NO: 157004
  derived and/or modified CDS sequence (opt3) from neuraminidase__InfluenzaB__AHL93921

SEQ ID NO: 158217 - RNA, 1401 nt, Artificial Sequence
  derived and/or modified CDS sequence (opt3) from neuraminidase__InfluenzaB__AHL93932
augcugcccagcaccauccagacacucacucuuuuccugacguccggcgggguguuguuaucucuguacgucucagccagucuaagcuaucuccuguacuccgacauucuucugaaguuuucuccuaccgagauaacagcuccaacuaugccguuggauugcgcaaacgccucgaauguucaagcggugaacagaucagcuaccaaaggaguaacacuccugcugcccgaaccugaguggaccuauccaaggcucagcugucccgguaguacuuuccagaaggccuuacugaucuccccucaccgguuuggcgaaacaaaaggaaauucugcaccacuuauuauccgcgagcccuucauugccugcgggccuaacgaauguaagcauuuugcuuugacccacuacgcagcccagccaggcgguuauuacaaugggacgcgaggagaccguaacaaacugagacaucuaaucagcgugaagcucggcaagauaccgacugucgaaaauuccaucuuccacauggcugccuggucaggcagugcgugccaugaugggaaagaguggaccuauauuggaguggacggucccgauaacaaugcacugcuuaagguuaaauacggcgaggccuacacagacacuuaucacagcuacgcuaacaagauccugaggacccaggagucugccuguaauugcauugggggaaacuguuauuugauggugacagauggcuccgcaucaggugucagcgaaugccgguuucucaaaauccgcgaggggagaauaauuaaggagaucuucccuaccggaagggugaagcacacggaagaguguacuugcggcuuugcuaguaauaaaacaauugaaugugccugccgggacaacucuuacaccgcgaagcgcccauucguaaaacugaauguugagacugauacagccgaaauccgauuaaugugcaccgacacguaucuggauacccccagaccugacgauggcuccaucacagggccaugugagagcaacggagacaaggguucgggcgggauuaaaggaggcuuugugcaucaaaggauggagucuaagauaggucggugguacucccguacuaugucaaaaaccgaacgcauggggauggagcucuaugucaaguacgacggcgaucccugggcagacagugaugcucuugccuucagcggagugaugguguccaugaaggaaccgggcugguacucuuuuggguucgagaucaaagacaagaaaugcgaugucccuuguauuggaaucgaaaugguucacgacgguggcaaggagacauggcauagcgcugccacugcaauauauugccugauggggucaggacaguugcuaugggauaccgugacaggcguagacauggcccuguga

SEQ ID NO: 158218 - RNA, 1401 nt, Artificial Sequence; identical to SEQ ID NO: 157167
  derived and/or modified CDS sequence (opt3) from neuraminidase__InfluenzaB__AHL93943

SEQ ID NO: 158219 - RNA, 1401 nt, Artificial Sequence; identical to SEQ ID NO: 157004
  derived and/or modified CDS sequence (opt3) from neuraminidase__InfluenzaB__AHL93954

SEQ ID NO: 158220 - RNA, 1401 nt, Artificial Sequence
  derived and/or modified CDS sequence (opt3) from neuraminidase__InfluenzaB__AHL93965
augcugcccagcaccauccagacacucacucuuuuccugacguccggcgggguguuguuaucucuguacgucucagccagucuaagcuaucuccuguacuccgacauucuucugaaguuuucuccuaccgagauaacagcuccagcaaugccguuggauugcgccaacgcgucgaauguucaagcugugaacuguucagccacuaaaggaguaacccuccugcugcccgaaccugaguggacauauccaagacucagcugccccgguaguaccuuccagaaggcauuacugaucuccccucacagguuuggcgaaacuaaaggaaauucugccccacuuauuauccgggagcccuucauugcuugugggccuaacgaaugcaagcauuuugcauugacacacuacgccgcucagccaggcgguuauuacaaugggacccgcggagaccgaaacaaacugcgucaucuaaucagcgugaagcucggcaagauaccgacggucgaaaauuccaucuuccacauggccgcguggucaggcagugcaugucaugaugggaaagaguggacuuauauuggaguggacggucccgauaacaaugcccugcuuaagguuaaauacggcgaggcuuacaccgacacauaucacagcuacgccaacaagauccugagaacucaggagucugcaugcaauuguauugggggaaacugcuauuugaugaucaccgauggcuccgcuucaggugugagcgaauguagguuucucaaaauacgggaggggcgcauuaucaaggagauuuucccuacaggaagagucaagcacaccgaagagugcacguguggcuuugccaguaauaaaacuaucgaaugcgcgugcagggacaacucuuacacagccaagcggccauucgugaaacugaauguagagaccgauacugcagaaauccgcuuaauguguacagacaccuaucuggauacgccccgaccuaacgacggcuccauuaccgggccaugcgagagcgauggagacaaggguaacggcgggauaaaaggaggcuuuguucaucaaagaauggagucgaagaucgguaggugguacucucggacaauguccaaaacugaacguauggggaugggccucuaugugaaguacgacggagaucccugggcugacucagaugcccuugcuuucaguggcgucauggugagcaugaaggagccggggugguacuccuuuggauucgaaauuaaagacaagaaaugugaugugccuugcaucgguauagagaugguccacgacggcgggaaggaaaccuggcauucugccgcaacagccauuuauugucugaugggaagcggccaguugcuaugggauacuguuaccgguguggacauggcucuguga

SEQ ID NO: 158221 - RNA, 1401 nt, Artificial Sequence; identical to SEQ ID NO: 156923
  derived and/or modified CDS sequence (opt3) from neuraminidase__InfluenzaB__AHL93976

SEQ ID NO: 158222 - RNA, 1401 nt, Artificial Sequence; identical to SEQ ID NO: 158194
  derived and/or modified CDS sequence (opt3) from neuraminidase__InfluenzaB__AHL93987

SEQ ID NO: 158223 - RNA, 1401 nt, Artificial Sequence
  derived and/or modified CDS sequence (opt3) from neuraminidase__InfluenzaB__AHL93998
augcugcccagcaccauccagacacucacucuuuuccugacguccggcgggguguuguuaucucuguacgucucagccagucuaagcuaucuccuguacuccgacauucuucugaaguuuucucaaaccgagauaacagcuccuaucaugccauuggauugcgcaaacgccucgaauguucaggcggugaacagaucagcugccaaaggaguaacucuccugcugccggaacccgaguggaccuauccuaggcucagcuguccagguaguacauuccagaaggcauuacugauuucuccccaccgguuuggcgaaaucaaaggaaauuccgccccucuuauuauccgcgagccauucauagcuugcgggcccaccgaauguaagcauuuugcauugacucacuacgccgcucagccuggcgguuauuacaacgggacacgagaggaccguaauaaacugagacaucuaaucagcgugaagcucggaaagauuccaaccgucgagaacuccaucuuccacauggccgcguggucaggcagugcaugccaugauggcaaagaauggacguauauugggguggacggaccggauagcaaugcccugcuuaagaucaaauacggugaggcuuacacugacaccuaucacucuuacgccaagaacauacugaggacacaagaauccgcauguaauugcauuggcggggauuguuauuugaugaucacugacggacccgcuucaggcguuagcgagugccgguuucucaaaauucgcgaggguagaaucaucaaggaaauuuucccuaccgggagggugaagcacacagaggaauguaccugcggauuugccaguaacaaaacgauagagugugcgugccgggauaaucgcuacacugccaagcgaccauucgucaaacugaacguggaaacagacaccgcagagaucagauuaaugugcacugagacauaucuggauacccccaggccuaaugacggcucuauuacgggcccaugugaauccgauggggacaagggaagcgguggcaucaaagggggauuuguacaucagcggauggcuucgaagauaggccguugguacucucgcaccauguccaaaacaaagagaauggguauggggcucuauguuaaguacgacggcgaucccuggacugacucagaggcccuugcucugaguggagugauggucagcauggaggaaccgggcugguacuccuucggguuugaaauuaaagauaagaaaugcgacgugccuuguaucggaaucgagauggugcacgaugguggcaagaccacauggcauucugccgcaacugccauuuauugcuugauggggagcggacagcuacugugggacaccgucacaggcguugauauggcucucuga

SEQ ID NO: 158224 - RNA, 1401 nt, Artificial Sequence
  derived and/or modified CDS sequence (opt3) from neuraminidase__InfluenzaB__AHL94009
augcugcccagcaccauccagaugcucacacuuuuccugacuuccggcgggguguuguuaucucuguacgucucagccagucuaagcuaucuccuguacuccgacauucuucugaaguuuucuccuacggagauaaccgcuccaacaaugccguuggauugcgcaaacgccucgaauguucacgcggugaacagaucagcuacuaaaggaguaaccuuccuccugcccgaaccuaaguggacauauccaaggcugagcugucccgguaguaccuuucaaaaagcccucuuaaucuccccucaucgguucggcgagacuaagggaaauucugcaccacugauuauccgcgaacccuuuauugccugcgggccuaacgagugucgacacuucgcucuuacacauuacgcagcccagccaggcgguuauuacaaugggacccguggagacagaaacaaauugaggcaccugaucagcgugaagcuaggcaagauaccgacggucgaaaauuccaucuuucauauggcugccuggucaggcagugcgugccacgaugggaaagaguggacuuauauuggaguggacggucccgauaacaaugcacuccugaagaucaaauacggcgaggccuacaccgacacauaucacagcuacgcuaacaauauucuucggacucaggaaucugccuguaacugcaucgggggaaauuguuaucugaugauaaccgauggcuccgcaucagguguuagcgagugccgcuucuugaagauuagagaagggaggaucauuaaagagaucuuuccuacaggacgggugaagcauaccgaggaauguacgugcggcuucgcuaguaacaagacuaucgagugugccugccgcgacaauucuuacacagcgaaacgaccauuugucaagcucaacguggaaaccgauacugccgagauuagacugaugugcacagacaccuauuuagauacgcccaggccugacgauggcuccauaaccgggccaugugaaagcaacggagacaaagguucgggcgggaucaagggaggcuucguacaccagcggauggcaucuaaaauuggucguugguacucccgcacaaugucaaagacugagagaaaagggaugggccuguauguuaaguacgacggagaucccuggaccgacagugaugcucucgccuuuaggggcgugauggucagcaugaaggagccggggugguacuccuucggauucgaaaucaaagacaagaaaugcgaugugccuuguauagguauugagauggugcaugacggcgggaaggaaacauggcacucugcugccacugcaaucuauugccuuaugggaagcggccaacuguugugggauaccgucacagguguugacauggcccuauga

SEQ ID NO: 158225 - RNA, 1401 nt, Artificial Sequence; identical to SEQ ID NO: 157004
  derived and/or modified CDS sequence (opt3) from neuraminidase__InfluenzaB__AHL94020

SEQ ID NO: 158226 - RNA, 1401 nt, Artificial Sequence; identical to SEQ ID NO: 157004
  derived and/or modified CDS sequence (opt3) from neuraminidase__InfluenzaB__AHL94031

SEQ ID NO: 158227 - RNA, 1401 nt, Artificial Sequence; identical to SEQ ID NO: 157167
  derived and/or modified CDS sequence (opt3) from neuraminidase__InfluenzaB__AHL94042

SEQ ID NO: 158228 - RNA, 1401 nt, Artificial Sequence
  derived and/or modified CDS sequence (opt3) from neuraminidase__InfluenzaB__AHL94053
augcugcccagcaccauccagacacucacucuuuuccugacguccggcgggguguuguuaucucuguaccuaucagcccuccugaguuaucuucuguacagcgacauuuugcucaaguuuuccccuaccgagauaacagcuccaacuaugucucuggauugcgcaaacgccucgaauguccaagcgguuaacagaucagcuaccaaaggagugacauuccugcucccggaacccgaguggaccuauccuagguuaagcuguccagguaguacuuuucagcgggcccugcuuaucucuccccaccgcuucggcgaaacaaagggaaauuccgcaccuuugauuauccgagagccauuuauugccugcgggcccaacgaauguaaacauuucgcucugacccacuacgcagcccagccuggcgguuauuacaaugggacgcguggagacagaaacaagcuaaggcaucucaucagcguaaaacugggcaagauaccaacuguggaaaauuccaucuuucacauggcugccuggucaggcagugcgugccaugaugggaaggaguggaccuauauuggagucgacgguccggauaacgacgcacuucugaaagugaaguacggcgaggccuacacagauacuuaucacagcuacgcuaauaaaaucuugcggacccaggagucugccuguaacugcauugggggaaauuguuaucucaugaucacagacggcuccgcaucagguguuagcgaaugccgcuuccugaagauaagagaggggaggauuaucaaagagauuuuucccaccggacgggugaagcacacggaagaguguacuugcggcuucgcuaguaacaagacaaucgaaugugccugccgcgauaauucuuacaccgcgaaacgaccuuuugucaaguuaaacguggagacugacacagccgaaaucagacugaugugcaccgauacguaucucgacaccccaaggcccgaugacggcuccauuacagggccuugugagagcaauggagacaaagguucgggcgggauaaagggaggcuucguacaucaacggauggagucuaaaaucggucguugguacucccgcacuaugucaaagaccgaaagaauggggaugggccuuuauguuaaauacgauggagacccaugggcagauagugacgcucuggccuuuagcggcgugauggucuccaugaaggagcccgggugguacucuuucggauucgaaauuaaggauaaaaagugcgacgugccguguaucgguauagagauggugcacgauggcgggaaagaaacauggcauagcgcugccacugcaauuuauugcuugaugggaucaggccagcuacugugggacaccgucacagguguugauauggcccucuga

SEQ ID NO: 158229 - RNA, 1401 nt, Artificial Sequence; identical to SEQ ID NO: 157004
  derived and/or modified CDS sequence (opt3) from neuraminidase__InfluenzaB__AHL94064

SEQ ID NO: 158230 - RNA, 1401 nt, Artificial Sequence; identical to SEQ ID NO: 157004
  derived and/or modified CDS sequence (opt3) from neuraminidase__InfluenzaB__AHL94075

SEQ ID NO: 158231 - RNA, 1401 nt, Artificial Sequence
  derived and/or modified CDS sequence (opt3) from neuraminidase__InfluenzaB__AHL94086
augcugcccagcaccauccagacacucacucuuuuccugacguccggcgggguguuguuaucucuguacgucucagccagucuaagcuaucuccuguacuccgacauucuucugaaguuuucuagaaccgagauaacagcuccuaucaugccauuggauugcgcaaacgccucgaauguucaagcggugaacaggucagcuacuaaaggaguaaccuuccuccugccggaacccgaguggacauauccucggcugagcuguccagguaguaccuuucagaaggcccucuuaauuucuccccaccgcuucggcgaaacuaaaggaaauuccgcaccucugaucauucgagagccauuuguggccugcgggcccaaggaauguaaacauuucgcucuuacacacuacgcagcccagccuggcgguuauuacaacgggacccgugaggacagaaauaaguugaggcaucugaucagcgucaagcuaggaaaaauaccaacgguggagaacuccaucuuucacauggcugccuggucaggcagugcgugccaugauggccgggaauggacuuauauugggguugacggaccggauagcaaugcacuccugaagaucaaauacggugaggccuacaccgacacauaucacucuuacgcuaagaacauucuucgcacucaggaauccgccuguaauugcaucggcggggauuguuaucugaugauaaccgacggacccgcaucaggcauuagcgagugcagauucuugaaaaucagggagggucggauuaucaaggaaaucuuuccuacagggcgcgugaagcacaccgaggaauguacgugcggauucgcuaguaacaaaacuauugagugugccugccgagauaauucuuacacagcgaagagaccauuugucaaacucaacguggaaaccgacacugccgagauaaggcugaugugcacagagaccuauuuagauacgccccggccuaaugacggcuccaucaccggcccaugugaaagcaacggggauaagggaucggguggcauuaaagggggauucguacaucaacguauggcaucuaagaucggccgcugguacuccagaacaaugucaaaaacuaagaggauggguauggggcuguauguuaaguacgacggcgaccccuggaccgauagugaggcucucgcccuuagcggagugauggucuccauggaggaaccgggcugguacucuuuuggguucgaaauaaaagacaagaaaugcgaugugccuuguauuggaaucgagauggugcacgacgguggcaagacaacuuggcauagcgcugccaccgcaaucuauugccugauggggucaggacaguugcuaugggauacagucaccggcguuaauaugacucuguga

SEQ ID NO: 158232 - RNA, 1401 nt, Artificial Sequence; identical to SEQ ID NO: 157167
  derived and/or modified CDS sequence (opt3) from neuraminidase__InfluenzaB__AHL94095

SEQ ID NO: 158233 - RNA, 1401 nt, Artificial Sequence; identical to SEQ ID NO: 157004
  derived and/or modified CDS sequence (opt3) from neuraminidase__InfluenzaB__AHL94106

SEQ ID NO: 158234 - RNA, 1401 nt, Artificial Sequence
  derived and/or modified CDS sequence (opt3) from neuraminidase__InfluenzaB__AHL94117
augcugcccagcaccauccagaugcucacacuuuuccugacuuccggcgggguguuguuaucucuguacgucucagccagucuaagcuaucuccuguacuccgacauucuucugaaguuuucuccuacggagauaaccgcuccaacaaugccguuggauugcgcaaacgccucgaauguucacgcggugaacagaucagcuacuaaaggaguaaccuuccuccugcccgaaccugaguggacauauccaaggcugagcugucccgguaguaccuuucaaaaggcccucuuaaucuccccucaucgguucggcgaaacuaaaggaaauucugcaccacugauuauccgcgagcccuuuauugccugcgggccuaacgaauguaagcacuucgcucuuacacauuacgcagcccagccaggcgguuauuacaaugggacccgaggagaccguaacaaauugagacaccugaucagcgugaagcuaggcaagauaccgacggucgaaaauuccaucuuucauauggcugccuggucaggcagugcgugccacgaugggaaagaguggacuuauauuggaguggacggucccgauaacaaugcacuccugaagaucaaauacggcgaggccuacaccgacacauaucacagcuacgcuaacaauauucuuaggacucaggagucugccuguaacugcaucgggggaaauuguuaucugaugauaaccgauggcuccgcaucagguguuagcgaaugccgguucuugaagauucgcgaggggagaaucauuaaagagaucuuuccuacaggaagggugaagcauaccgaagaguguacgugcggcuucgcuaguaacaagacuaucgaaugugccugccgggacaauucuuacacagcgaaacgcccauuugucaagcucaacguggagaccgauacugccgaaauucgacugaugugcacagacaccuauuuagauacgcccagaccugacgauggcuccauaaccgggccaugugagagcaacggagacaaagguucgggcgggaucaagggaggcuucguacaccagaggauggcaucuaaaauuggucggugguacucccguacaaugucaaagacugagcgcaaagggaugggccugcauguuaaguaugacggagaucccuggaccgacagugaugcucucgccuuuagaggcgugauggucagcaugaaggaaccggggugguacuccuucggauucgagaucaaagacaagaaaugcgaugugccuuguauagguauugaaauggugcacgacggcgggaaggagacauggcacucugcugccacugcaaucuacugccuuaugggaagcggccaacuguugugggauaccgucacagguguuaauauggcccuauga

SEQ ID NO: 158235 - RNA, 1401 nt, Artificial Sequence; identical to SEQ ID NO: 157004
  derived and/or modified CDS sequence (opt3) from neuraminidase__InfluenzaB__AHL94128

SEQ ID NO: 158236 - RNA, 1401 nt, Artificial Sequence
  derived and/or modified CDS sequence (opt3) from neuraminidase__InfluenzaB__AHL94139
augcugcccagcaccauccagacacucacucuuuuccugacguccggcgggguguuguuaucucuguacgucucagcccuacucaguuaucugcuuuacagcgacauucuguugaaguuuuccccuaccgagauaacagcuccaacuaugucucucgauugcgcaaacgccucgaauguucaagcggugaacagaucagcuaccaaaggaguaacauuccugcugccggaacccgaguggaccuauccuaggcucagcuguccagguaguacuuuucagcgggccuuacugaucucuccccaccgcuucggcgaaacaaagggaaauuccgcaccucuuauuauccgagagccauuuauugccugcgggcccaacgaauguaaacauuucgcuuugacccacuacgcagcccagccuggcgguuauuacaaugggacgcguggagacagaaacaagcugaggcaucuaaucagcgugaaacucggcaagauaccaacugucgaaaauuccaucuuucacauggcugccuggucaggcagugcgugccaugaugggaaggaguggaccuauauuggaguggacgguccggauaacgacgcacugcuuaaaguuaaguacggcgaggccuacacagauacuuaucacagcuacgcuaauaaaauccugcggacccaggagucugccuguaacugcauugggggaaauuguuauuugaugaucacagacggcuccgcaucaggugugagcgaaugccgcuuccucaagauaagagaggggaggauuaucaaagagauuuuucccaccggacgggucaagcacacggaagaguguacuugcggcuucgcuaguaacaagacaaucgaaugugccugccgcgauaauucuuacaccgcgaaacgaccuuuugugaagcugaacguagagacugacacagccgaaaucaaauuaaugugcaccgauacguaucuggacaccccaagacccgaugacggcuccauuacagggccuugugagagcaauggagacaaggguucgggcgggauaaaaggaggcuucguucaucaaaggauggagucuaagaucggucggugguacucccguacuaugucaaaaaccgaacgcauggggaugggccucuaugugaaguacgauggagacccaugggcagauagugacgcucuugccuuuagcggcgucaugguguccaugaaggagcccgggugguacucuuucggauucgaaauuaaagauaagaaaugcgacgugccguguaucgguauagagaugguccacgauggcgggaaggaaacauggcauagcgcugccacugcaauuuauugccugaugggaucaggccaguugcuaugggacaccguuacagguguggauauggcccuguga

SEQ ID NO: 158237 - RNA, 1401 nt, Artificial Sequence; identical to SEQ ID NO: 158194
  derived and/or modified CDS sequence (opt3) from neuraminidase__InfluenzaB__AHL94150

SEQ ID NO: 158238 - RNA, 1401 nt, Artificial Sequence
  derived and/or modified CDS sequence (opt3) from neuraminidase__InfluenzaB__AHL94161
augcugcccagcaccauccagaugcucacacuuuuccugacuuccggcgggguguuguuaucucuguacgucucagccagucuaagcuaucuccuguacuccgacauucuucugaaguuuucuccuacggagauaaccgcuccaacaaugccguuggauugcgcaaacgccucgaauguucacgcggugaacagaucagcuacuaaaggaguaaccuuccuccugcccgaaccugaguggacauauccaaggcugagcugucccgguaguaccuuucaaaaggcccucuuaaucuccccucaucgguucggcgaaacuaaaggaaauucugcaccacugauuauccgcgagcccuuuauugccugcgggccuaacgaauguaagcacuucgcucuuacacauuacgcagcccagccaggcgguuauuacaaugggacccgaggagaccguaacaaauugagacaccugaucagcgugaagcuaggcaagauaccgacggucgaaaauuccaucuuucauauggcugccuggucaggcagugcgugccacgaugggaaagaguggacuuauauuggaguggacggucccgauaacaaugcacuccugaagaucaaauacggcgaggccuacaccgacacauaucacagcuacgcuaacaauauucuuaggacucaggagucugccuguaacugcaucgggggaaauuguuaucugaugauaaccgauggcuccgcaucagguguuagcgaaugccgguucuugaagauucgcgaggggagaaucauuaaagagaucuuuccuacaggaagggugaagcauaccgaagaguguacgugcggcuucgcuaguaacaagacuaucgaaugugccugccgggacaauucuuacacagcgaaacgcccauuugucaagcucaacguggagaccgauacugccaaaauucgacugaugugcacagacaccuauuuagauacgcccagaccugacgauggcuccauaaccgggccaugugaaagcaacggagacaaggguucgggcgggaucaaaggaggcuucguacaccagaggauggcaucuaagauuggucggugguacucccguacaaugucaaaaacugagcgcaaggggaugggccuguauguuaaguacgacggagaucccuggaccgacagugaugcucucgccuuuagaggcgugauggucagcaugaaagagccggggugguacuccuucggauucgaaaucaaggacaaaaagugcgaugugccuuguauagguauugagauggugcaugacggcgggaaagaaacauggcacucugcugccacugcaaucuauugccuuaugggaagcggccaacuguugugggauaccgucacagguguugacauggcccuauga

SEQ ID NO: 158239 - RNA, 1401 nt, Artificial Sequence; identical to SEQ ID NO: 158194
  derived and/or modified CDS sequence (opt3) from neuraminidase__InfluenzaB__AHL94183

SEQ ID NO: 158240 - RNA, 1404 nt, Artificial Sequence
  derived and/or modified CDS sequence (opt3) from neuraminidase__InfluenzaB__AHL94194
augcugcccagcaccauccagacacucacucuuuuccugacguccggcgggguguuguuaucucuguacgucucagcccuacucaguuaucugcuuuacagcgacauucuguugaaguuuuccccuaccgagauaacagcuccaacuaugucucucgauugcgcaaacgccucgaauguucaagcggugaacagaucagcuaccaaaggaguaacauuccugcugcucccggaacccgaguggaccuauccuagguuaagcuguccagguaguacuuuucagcgggcccugcuuaucucuccccaccgcuucggcgaaacaaagggaaauuccgcaccuuugauuauccgagagccauuuauugccugcgggcccaacgaauguaaacauuucgcucugacccacuacgcagcccagccuggcgguuauuacaaugggacgcguggagacagaaacaagcuaaggcaucucaucagcgugaaacugggcaagauaccaacugucgaaaauuccaucuuucacauggcugccuggucaggcagugcgugccaugaugggaaggaguggaccuauauuggaguggacgguccggauaacgacgcacuucugaaaguuaaguacggcgaggccuacacagauacuuaucacagcuacgcuaauaaaaucuugcggacccaggagucugccuguaacugcauugggggaaauuguuaucucaugaucacagacggcuccgcaucaggugugagcgaaugccgcuuccugaagauaagagaggggaggauuaucaaagagauuuuucccaccggacgggucaagcacacggaagaguguacuugcggcuucgcuaguaacaagacaaucgaaugugccugccgcgauaauucuuacaccgcgaaacgaccuuuugugaaguuaaacguagagacugacacagccgaaaucagacugaugugcaccgauacguaucucgacaccccaaggcccgaugacggcuccauuacagggccuugugagagcaauggagacaaagguucgggcgggauaaagggaggcuucguucaucaacggauggagucuaaaaucggucguugguacucccgcacuaugucaaagaccgaaagaauggggaugggccuuuaugugaaauacgauggagacccaugggcagauagugacgcucuggccuuuagcggcgucaugguguccaugaaggagcccgggugguacucuuucggauucgaaauuaaggauaaaaagugcgacgugccguguaucgguauagagaugguccacgauggcgggaaagaaacauggcauagcgcugccacugcaauuuauugcuugaugggaucaggccagcuacugugggacaccguuacagguguggauauggcccucuga

SEQ ID NO: 158241 - RNA, 1401 nt, Artificial Sequence; identical to SEQ ID NO: 157004
  derived and/or modified CDS sequence (opt3) from neuraminidase__InfluenzaB__AHL94205

SEQ ID NO: 158242 - RNA, 1401 nt, Artificial Sequence; identical to SEQ ID NO: 157167
  derived and/or modified CDS sequence (opt3) from neuraminidase__InfluenzaB__AHL94214

SEQ ID NO: 158243 - RNA, 1401 nt, Artificial Sequence
  derived and/or modified CDS sequence (opt3) from neuraminidase__InfluenzaB__AHL94224
augcugcccagcaccauccagaugcucacacuuuuccugacuuccggcgggguguuguuaucucuguacgucucagccagucuaagcuaucuccuguacuccgacauucuucugaaguuuucuccuacggagauaaccgcuccaacaaugccguuggauugcgcaaacgccucgaauguucacgcggugaacagaucagcuacuaaaggaguaaccuuccuccugcccgaaccugaguggacauauccaaggcugagcugucccgguaguaccuuucaaaaggcccucuuaaucuccccucaucgguucggcgaaacuaaaggaaauucugcaccacugauuauccgcgagcccuuuauugccugcgggccuaacgaauguaagcacuucgcucuuacacauuacgcagcccagccaggcgguuauuacaaugggacccgaggagaccguaacaaauugagacaccugaucagcgugaagcuaggcaagauaccgacggucgaaaauuccaucuuucauauggcugccuggucaggcagugcgugccacgaugggaaagaguggacuuauauuggaguggacggucccgauaacaaugcacuccugaagaucaaauacggcgaggccuacaccgacacauaucacagcuacgcuaacaauauucuuaggacucaggagucugccuguaacugcaucgggggaaauuguuaucugaugauaaccgauggcuccgcaucagguguuagcgaaugccgguucuugaagauucgcgaggggagaaucauuaaagagaucuuuccuacaggaagggugaagcauaccgaagaguguacgugcggcuucgcuaguaacaagacuaucgaaugugccugccgggacaauucuuacacagcgaaacgcccauuugucaagcucaacguggagaccgauacugccgaaauucgacugaugugcacagacaccuauuuagauacgcccagaccugacgauggcuccauaaccgggccaugugagagcaacggagacaaagguucgggcgggaucaagggaggcuucguacaccagaggauggcaucuaaaauuggucggugguacucccguacaaugucaaagacugagcgcaaagggaugggccuguauguuaaguacgacggagaucccuggaucgacagugaugcucucgccuuuagaggcgugauggucagcaugaaggaaccggggugguacuccuucggauucgagauaaaagacaagaaaugcgaugugccuuguauugguaucgaaauggugcaugacggcgggaaggagaccuggcacucugcugccacagcaaucuauugccuuaugggaagcggccaacuguugugggauacugucaccgguguugacauggcccuauga

SEQ ID NO: 158244 - RNA, 1401 nt, Artificial Sequence; identical to SEQ ID NO: 157004
  derived and/or modified CDS sequence (opt3) from neuraminidase__InfluenzaB__AHL94235

SEQ ID NO: 158245 - RNA, 1401 nt, Artificial Sequence; identical to SEQ ID NO: 157167
  derived and/or modified CDS sequence (opt3) from neuraminidase__InfluenzaB__AHL94246

SEQ ID NO: 158246 - RNA, 1401 nt, Artificial Sequence; identical to SEQ ID NO: 157167
  derived and/or modified CDS sequence (opt3) from neuraminidase__InfluenzaB__AHL94257

SEQ ID NO: 158247 - RNA, 1401 nt, Artificial Sequence; identical to SEQ ID NO: 156865
  derived and/or modified CDS sequence (opt3) from neuraminidase__InfluenzaB__AHL94267

SEQ ID NO: 158248 - RNA, 1401 nt, Artificial Sequence; identical to SEQ ID NO: 156865
  derived and/or modified CDS sequence (opt3) from neuraminidase__InfluenzaB__AHL94278

SEQ ID NO: 158249 - RNA, 1401 nt, Artificial Sequence; identical to SEQ ID NO: 156865
  derived and/or modified CDS sequence (opt3) from neuraminidase__InfluenzaB__AHL94299

SEQ ID NO: 158250 - RNA, 1401 nt, Artificial Sequence
  derived and/or modified CDS sequence (opt3) from neuraminidase__InfluenzaB__AHL94310
augcugcccagcaccauccagacacucacucuuuuccugacguccggcgggguguuguuaucucuguacgucucagccagucuaagcuaucuccuguacuccgacauucuucugaaguuuucuagaaccgagauaacagcuccuaucaugccauuggauugcgcaaacgccucgaauguucaagcggugaacaggucagcuacuaaaggaguaaccccgcuccugcccgaaccugaguggacauauccacggcugagcugucccgguaguaccuuccagaaggcccucuuaauuuccccucaccgcuuuggcgaaacuaaaggaaauucugcaccacugaucauucgagagcccuucaucgccugcgggccuaaggaauguaaacauuuugcucuuacacacuacgcagcccagccaggcgguuauuacaacgggacccgugaggacagaaauaaguugaggcaucugauaagcgugaagcuaggaaaaaucccgacggucgagaacuccauuuuccacauggcugccuggucaggcagugcgugccaugauggccgggaauggacuuauaucgggguggacggacccgauagcaaugcacuccugaagauuaaauacggugaggccuacaccgacacauaucacucuuacgcuaagaacauccuucgcacucaggaauccgccuguaauugcauaggcggggauuguuaucugaugauuaccgacggaucagcaagcggcaucagugagugcagauuuuugaaaauuagggagggucggaucaucaaggaaauuuucccuacagggcgcguuaagcacaccgaggaauguacgugcggauuugcuucuaacaaaacuauagagugugccugccgagauaauuccuacacagcgaagagaccauucgugaaacucaacgucgaaaccgacacugccgagaucaggcugaugugcacagagaccuauuuagauacgccccggccuaaugacggcagcauugcaggcccaugugaaucgaacggggaugagggaucugguggcaucaaagggggauuugugcaucaacguauggcuuccaagauaggccgcugguacucaagaaccaugaguaagacaaaaaggauggguauggggcuguauguaaaguacgacggcgaccccuggacugauagcgaagcccucgcucuuuccggaguuauggugucuauggaggaaccgggcugguacagcuucggguuugagauuaaggacaaaaagugcgaugucccuuguaucggaaucgagauggugcacgacgguggcaaaaccacauggcauucagccgcaacugccauuuauugccugauggggaguggacaguugcuaugggauaccgugacaggcgucaauaugacccuguga

SEQ ID NO: 158251 - RNA, 1401 nt, Artificial Sequence; identical to SEQ ID NO: 158250
  derived and/or modified CDS sequence (opt3) from neuraminidase__InfluenzaB__AHL94321

SEQ ID NO: 158252 - RNA, 1401 nt, Artificial Sequence
  derived and/or modified CDS sequence (opt3) from neuraminidase__InfluenzaB__AHL94332
augcugcccagcaccauccagacacucacucuuuuccugacguccggcgggguguuguuaucucuguacgucucagccagucuaagcuaucuccuguacuccgacauucuucugaaguuuucuagaaccgagauaacagcuccuaucaugccauuggauugcgcaaacgccucgaauguucaagcggugaacaggucagcuacuaaaggaguaaccccgcuccugcccgaaccugaguggacauauccacggcugagcugucccgguaguaccuuccagaaggcccucuuaauuuccccucaccgcuuuggcgaaacuaaaggaaauucugcaccacugaucauucgagagcccuucaucgccugcgggccuaaggaauguaaacauuuugcucuuacacacuacgcagcccagccaggcgguuauuacaacgggacccgugaggacagaaauaaguugaggcaucugauaagcgugaagcuaggaaaaaucccgacggucgagaacuccauuuuccacauggcugccuggucaggcagugcgugccaugauggccgggaauggacuuauaucgggguggacggacccgauagcaaugcacuccugaagauuaaauacggugaggccuacaccgacacauaucacucuuacgcuaagaacauccuucgcacucaggaauccgccuguaauugcauaggcggggauuguuaucugaugauuaccgacggaccugcaucaggcaucagcgagugcagauuuuugaaaauuagggagggucggaucaucaaggaaauuuucccaacagggcgcguuaagcacaccgaggaauguacgugcggauuugcuaguaacaaaacuauagagugugccugccgagauaauucuuacacagcgaagagacccuucgugaaacucaacgucgaaaccgacacugccgagaucaggcugaugugcacagagaccuauuuagauacgccucggccaaaugacggcuccauuaccggccccugugaaagcaacggggaugagggaucggguggcaucaaagggggauuugugcaucaacguauggcaucuaagauaggccgcugguacuccagaacaaugucaaagacuaaaaggauggguauggggcuguauguaaaguacgacggcgacccguggaccgauagugaagcucucgcccuuagcggaguuaugguguccauggaggaaccuggcugguacucuuucggguuugagauuaaggacaaaaagugcgauguccccuguaucggaaucgagauggugcacgacgguggcaaaacaacuuggcauagcgcugccaccgcaauuuauugccugauggggucaggacaguugcuaugggauacagugaccggcgucaauaugacucuguga

SEQ ID NO: 158253 - RNA, 1401 nt, Artificial Sequence; identical to SEQ ID NO: 156865
  derived and/or modified CDS sequence (opt3) from neuraminidase__InfluenzaB__AHL94343

SEQ ID NO: 158254 - RNA, 1401 nt, Artificial Sequence
  derived and/or modified CDS sequence (opt3) from neuraminidase__InfluenzaB__AHL94354
augcugcccagcaccauccagacacucacucuuuuccugacguccggcgggguguuguuaucucuguacgucucagccagucuaagcuaucuccuguacuccgacauucuucugaaguuuucuccuaccgagauaacagcuccaacuaugccguuggauugcgcaaacgccucgaauguucaagcggugaacagaucagcuaccaaaggaguaacacuccugcugcccgaaccugaguggaccuauccaaggcucagcugucccgguaguacuuuccagaaggccuuacugaucuccccucaccgguuuggcgaaacaaaaggaaauucugcaccacuuauuauccgcgagcccuucauugccugcgggccuaacgaauguaagcauuuugcuuugacccacuacgcagcccagccaggcgguuauuacaaugggacgcgaggagaccguaacaaacugagacaucuaaucagcgugaagcucggcaagauaccgacugucgaaaauuccaucuuccacauggcugccuggucaggcagugcgugccaugaugggaaagaguggaccuauauuggaguggacggucccgauaacaaugcacugcuuaagguuaaauacggcgaggccuacacagacacuuaucacagcuacgcuaacaagauccugaggacccaggagucugccuguaauugcauugggggaaacuguuauuugaugaucacagauggcuccgcaucaggugugagcgaaugccgguuucucaaaauacgcgaggggagaauuaucaaggagauuuucccuaccggaagggucaagcacacggaagaguguacuugcggcuuugcuaguaauaaaacaaucgaaugugccugccgggacaaccgcuacaccgcgaagcgaccauucgugaaacugaauguagagacugauacagccgaaaucagauuaaugugcaccgacacguaucuggauacccccaggccuaacgacggcucuauuacagggccaugugaguccgauggagacaaggguagcggcgggauaaaaggaggcuuuguucaucaacggaugaagucgaaaaucggucguugguacucucgcacuauguccaagaccgagagaauggggaugggccucuaugugaaguacgacggagaucccugggcagacucagaugcucuugccuucaguggcgucauggugagcaugaaagaaccggggugguacuccuuuggauucgagauuaaggacaaaaagugcgaugugccuuguaucgguauagaaaugguccacgacggcgggaaagagacauggcauucugcugccacugcaauuuauugccugaugggaagcggccaguugcuaugggauaccguuacagguguggacauggcccuguga

SEQ ID NO: 158255 - RNA, 1401 nt, Artificial Sequence; identical to SEQ ID NO: 158254
  derived and/or modified CDS sequence (opt3) from neuraminidase__InfluenzaB__AHL94365

SEQ ID NO: 158256 - RNA, 1401 nt, Artificial Sequence
  derived and/or modified CDS sequence (opt3) from neuraminidase__InfluenzaB__AHL94387
augcugcccagcaccauccagacacucacucuuuuccugacguccggcgggguguuguuaucucuguacgucucagccagucuaagcuaucuccuguacuccgacauucuucugaaguuuucuccuaccgagauaacagcuccaacuaugccguuggauugcgcaaacgccucgaccguucaagcggugaauagaucagcuacaaaaggaguaacccuccugcugcccgaaccugaguggacuuauccaaggcucagcugucccgguaguacauuccagaaggccuuacugaucuccccucaccgguuuggcgaaaccaaagggaacucugcaccacuuauuauccgcgagcccuucauugccugcggaccuaaugaauguaagcauuuugcuuugacgcacuacgcagcccagccaggcgguuauuacaacgggacucgaggagaccguaauaaacugagacaucuaaucagcgugaagcucggcaagauaccgaccgucgagaacuccaucuuccacauggcugccuggucaggcagugcgugccaugaugggaaagaguggacauaucugggaguggacggucccgauaauaacgcacuucugaagguuaaauacggcgaagccuacacugacaccuaucacagcuacgcuaauaagauuuugaggacacaggagucugccuguaacugcaucgggggaaauuguuaucucaugauuaccgauggcuccgcaucaggugugagcgaaugccgguuucugaaaauccgcgaggggagaauaauuaaggagaucuucccuacgggaagggucaagcacacugaagaguguacaugcggcuuugcuaguaacaaaaccauugaaugugccugccgggacaaucgcuacacugcgaagcgaccauucgugaaauuaaacguagagacagauaccgccgaaaucagacugaugugcacggacaccuaucucgauacacccaggccuaaugacggcucuaucacugggccaugugaguccgauggagacaaggguagcggcgggauuaaaggaggcuuuguucaucaacggaugaagucgaaaauaggucguugguacucucgcaccauguccaagacagagagaauggggaugggccuuuaugugaaguacgacggagaucccugggcagacucagaugcucuggccuucaguggcgucauggugagcaugaaagaaccggggugguacuccuuuggauucgagaucaaggacaaaaagugcgaugugccuuguauugguaucgaaaugguccacgacggcgggaaagagauauggcauucugcugccacugcaauuuauugcuugaugggaagcggccagcuacugugggauaccguuacagguguggacauggcccucuga

SEQ ID NO: 158257 - RNA, 1404 nt, Artificial Sequence
  derived and/or modified CDS sequence (opt3) from neuraminidase__InfluenzaB__AHL94398
augcugcccagcaccauccagacacucacucuuuuccugacguccggcgggguguuguuaucucuguacgucucagccagucuaagcuaucuccuguacuccgacauucuucugaaguuuucuccuaccgagauaacagcuccaacuaugccguuggauugcgcaaacgccucgaauguucaagcggugaacagaucagcuaccaaaggaguaacacuccugcugcuccccgaaccugaguggaccuauccaagguuaagcugucccgguaguacuuuccagaaggcccugcuuaucuccccucaccgguuuggcgaaacaaaaggaaauucugcaccauugauuauccgcgagcccuucauugccugcgggccuaacgaauguaagcauuuugcucugacccacuacgcagcccagccaggcgguuauuacaaugggacgcgaggagaccguaacaaacuaagacaucucaucagcgugaagcugggcaagauaccgacugucgaaaauuccaucuuccacauggcugccuggucaggcagugcgugccaugaugggaaagaguggaccuauauuggaguggacggucccgauaacaaugcacuucugaagguuaaauacggcgaggccuacacagacacuuaucacagcuacgcuaacaagaucuugaggacccaggagucugccuguaauugcauugggggaaacuguuaucucaugaucacagauggcuccgcaucaggugugagcgaaugccgguuucugaaaauacgcgaggggagaauuaucaaggagauuuucccuaccggaagggucaagcacacggaagaguguacuugcggcuuugcuaguaauaaaacaaucgaaugugccugccgggacaaccgcuacaccgcgaagcgaccauucgugaaauuaaauguagagacugauacagccgaaaucagacugaugugcaccgacacguaucucgauacccccaggccuaacgacggcucuauuacagggccaugugaguccgauggagacaaggguagcggcgggauaaaaggaggcuuuguucaucaacggaugaagucgaaaaucggucguugguacucucgcacuauguccaagaccgagagaauggggaugggccuuuaugugaaguacgacggagaucccugggcagacucagaugcucuggccuucaguggcgucauggugagcaugaaagaaccggggugguacuccuuuggauucgagauuaaggacaaaaagugcgaugugccuuguaucgguauagaaaugguccacgacggcgggaaagagacauggcauucugcugccacugcaauuuauugcuugaugggaagcggccagcuacugugggauaccguuacagguguggacauggcccucuga

SEQ ID NO: 158258 - RNA, 1401 nt, Artificial Sequence; identical to SEQ ID NO: 158254
  derived and/or modified CDS sequence (opt3) from neuraminidase__InfluenzaB__AHL94409

SEQ ID NO: 158259 - RNA, 1401 nt, Artificial Sequence
  derived and/or modified CDS sequence (opt3) from neuraminidase__InfluenzaB__AHL94431
augcugcccagcaccauccagacacucacucuuuuccugacguccggcgggguguuguuaucucuguacgucucagccagucuaagcuaucuccuguacuccgacauucuucugaaguuuucucaaaccgagauaacagcuccuaucaugccauuggauugcgcaaacgccucgaauguucaggcggugaaccacucagcugccaaaggaguaacucucauucugccggaacccgaguggaccuauccuagacugagcuguccagguaguacauuccagaaggcacucuuaaucucuccccauagguuuggcgaaauuaaaggaaauuccgccccucugaucauacgggagccauucaucgcuugcgggcccaccgaauguaagcacuuugcacuuacucauuacgccgcucagccuggcgguuauuacaacgggacacgcgaggaccgaaauaaauugcgucaccugauuagcgugaagcuaggaaagaucccaaccgucgagaacuccauuuuccauauggccgcguggucaggcagugcaugccacgauggcaaagaauggacguauaucgggguggacggaccggauagcaaugcccuccugaagauaaaauacggugaggcuuacacugacaccuaucacucuuacgccaagaacauucuuagaacacaagaauccgcauguaauugcaucggcggggauuguuaucugaugauuacugacggacccgcuucaggcguuagcgagugcagguuuuugaaaauccgggagggucgcaucauuaaggaaauauucccuaccgggagagugaagcauacagaggaauguaccugcggauuugccaguaacaaaacgaucgagugugcgugcagggauaaucgguacacugccaagcgcccauucgucaaacucaacguggaaacagacaccgcagagauucgacugaugugcacugagacauauuuagauacccccagaccuaaugacggcucuaucacgggcccaugugaauccgauggggacaagggaagcgguggcauaaaagggggauuuguacaccagaggauggcuucgaagauuggccggugguacucucguaccauguccaaaacaaagcgcauggguauggggcuguauguuaaguacgacggcgaucccuggacugacucagaggcccucgcucuuaguggagugaugaucagcauggaggaaccgggcugguacuccuucggguuugaaaucaaagauaagaaaugcgacgucccuuguauuggaaucgagauggugcaugaugguggcaagaccacauggcacucugccgcaacugccauuuauugccugauggggagcggacaguugcuaugggacaccgugacaggcgucgauauggcucuguga

SEQ ID NO: 158260 - RNA, 1401 nt, Artificial Sequence
  derived and/or modified CDS sequence (opt3) from neuraminidase__InfluenzaB__AHL94442
augcugcccagcaccauccagacacucacucuuuuccugacguccggcgggguguuguuaucucuguacaugucagccagucuaagcuaucuccuguacuccgacauucuucugaaguuuucuagaaccgagauaacagcuccuaucaugccauuggauugcgcaaacgccucgaauguccaagcgguuaacaggucagcuacuaaaggagugaccccgcuccugcccgaaccugaguggacauauccacggcugagcugucccgguaguaccuuccagaaggcccucuuaauuuccccucaccgcuuuggcgaaacuaaaggaaauucugcaccacugaucauucgagagcccuucaucgccugcgggccuaaggaauguaaacauuuugcucuuacacacuacgcagcccagccaggcgguuauuacaacgggacccgugaggacagaaauaaguugaggcaucugauaagcguaaagcuaggaaaaaucccgacgguggagaacuccauuuuccacauggcugccuggucaggcagugcgugccaugauggccgggaauggacuuauaucggggucgacggacccgauagcaaugcacuccugaagauuaaauacggugaggccuacaccgacacauaucacucuuacgcuaagaacauccuucgcacucaggaauccgccuguaauugcauaggcggggauuguuaucugaugauuaccgacggaucagcaagcggcaucagugagugcagauuuuugaaaauuagggagggucggaucaucaaggaaauuuucccuacagggcgcgugaagcacaccgaggaauguacgugcggauuugcuucuaacaaaacuauagagugugccugccgagauaauuccuacacagcgaagagaccauucguuaaacucaacguggaaaccgacacugccgagaucaggcugaugugcacagagaccuauuuagauacgccccggccuaaugacggcagcauugcaggcccaugugaaucgaacggggaugagggaucugguggcaucaaagggggauuuguccaucaacguauggcuuccaagauaggccgcugguacucaagaaccaugaguaagacaaaaaggauggguauggggcuguaugugaaguacgacggcgaccccuggacugauagcgaagcccucgcucuuuccggaguaaugguuucuauggaggaaccgggcugguacagcuucggguuugagauuaaggacaaaaagugcgaugugccuuguaucggaaucgagaugguccacgacgguggcaaaaccacauggcauucagccgcaacugccauuuauugccugauggggaguggacaguugcuaugggauaccgugacaggcgugaauaugacccuguga

SEQ ID NO: 158261 - RNA, 1401 nt, Artificial Sequence; identical to SEQ ID NO: 158250
  derived and/or modified CDS sequence (opt3) from neuraminidase__InfluenzaB__AHL94464

SEQ ID NO: 158262 - RNA, 1401 nt, Artificial Sequence; identical to SEQ ID NO: 156865
  derived and/or modified CDS sequence (opt3) from neuraminidase__InfluenzaB__AHL94475

SEQ ID NO: 158263 - RNA, 1401 nt, Artificial Sequence; identical to SEQ ID NO: 158254
  derived and/or modified CDS sequence (opt3) from neuraminidase__InfluenzaB__AHL94486

SEQ ID NO: 158264 - RNA, 1401 nt, Artificial Sequence; identical to SEQ ID NO: 156865
  derived and/or modified CDS sequence (opt3) from neuraminidase__InfluenzaB__AHL94497

SEQ ID NO: 158265 - RNA, 1401 nt, Artificial Sequence; identical to SEQ ID NO: 158250
  derived and/or modified CDS sequence (opt3) from neuraminidase__InfluenzaB__AHL94508

SEQ ID NO: 158266 - RNA, 1401 nt, Artificial Sequence
  derived and/or modified CDS sequence (opt3) from neuraminidase__InfluenzaB__AHL94519
augcugcccagcaccauccagacacucacucuuuuccugacguccggcgggguguuguuaucucuguacgucucagccagucuaagcuaucuccuguacuccgacauucuucugaaguuuucuccuaccgagauaacagcuccaacuaugccguuggauugcgcaaacgccucgaauguucaagcggugaacagaucagcuaccaaaggaguaacacuccugcugcccgaaccugaguggaccuauccaaggcucagcugucccgguaguacuuuccagaaggccuuacugaucuccccucaccgguuuggcgaaacaaaaggaaauucugcaccacuuauuauccgcgagcccuucauugccugcgggccuaacgaauguaagcauuuugcuuugacccacuacgcagcccagccaggcgguuauuacaaugggacgcgaggagaccguaacaaacugagacaucuaaucagcgugaagcucggcaagauaccgacugucgaaaauuccaucuuccacauggcugccuggucaggcagugcgugccaugaugggaaagaguggaccuauauuggaguggacggucccgauaacaaugcacugcuuaagguuaaauacggcgaggccuacacagacacuuaucacagcuacgcuaacaagauccugaggacccaggagucugccuguaauugcauugggggaaacuguuauuugaugaucacagauggcuccgcaucaggugugagcgaaugccgguuucucaaaauacgcgaggggagaauuaucaaggagauuuucccuaccggaagggucaagcacacggaagaguguacuugcggcuuugcuaguaauaaaacaaucgaaugugccugccgggacaacucuuacaccgcgaagcgcccauucgugaaacugaauguagagacugauacagccgaaauccgauuaaugugcaccgacacguaucuggauacccccagaccuaacgacggcuccauuacagggccaugugagagcgauggagacaaggguucgggcgggauaaaaggaggcuuuguucaucaaaggauggagucuaagaucggucggugguacucccguacuaugucaaaaaccgaacgcauggggaugggccucuaugugaaguacgacggagaucccuggacagacagugaugcacuugcuuucagcggcgucaugguguccaugaaggagccggggugguacucuuuuggauucgaaauuaaagacaagaaaugcgaugugccuuguaucgguauagagaugguccacgacggcgggaaggaaacuuggcauagcgccgcuaccgccauuuauugccugaugggaucaggccaguugcuaugggauacaguuaccgguguggacauggcacuguga

SEQ ID NO: 158267 - RNA, 1401 nt, Artificial Sequence; identical to SEQ ID NO: 158250
  derived and/or modified CDS sequence (opt3) from neuraminidase__InfluenzaB__AHL94530

SEQ ID NO: 158268 - RNA, 1401 nt, Artificial Sequence; identical to SEQ ID NO: 158254
  derived and/or modified CDS sequence (opt3) from neuraminidase__InfluenzaB__AHL94541

SEQ ID NO: 158269 - RNA, 1401 nt, Artificial Sequence
  derived and/or modified CDS sequence (opt3) from neuraminidase__InfluenzaB__AHL94563
augcugcccagcaccauccagacacucacucuuuuccugacguugggcgggguguuacugucccuauacgucucugccucacucaguuaucugcuuuacagcgacauucuguugaaguuuuccagaaccgagauaacagcuccuaucaugccacucgauugcgcaaacgccucuaauguucaagcggugaacaggucggcuacuaaaggaguaacccugcugcucccggaacccgaguggacauauccucgguuaucauguccagguagcaccuuccagaaggcccugcuuauuaguccccaccgcuuuggcgaaacuaaaggaaauuccgcaccuuugaucauucgagagccauucaucgccugcgggcccaaggaauguaaacauuuugcucugacacacuacgcagcccagccuggcgguuauuacaacgggacccgugaggacagaaauaagcuaaggcaucucauaucugugaagcugggaaaaaucccaacggucgagaacagcauuuuccacauggcugccugguccggcucagcgugccaugauggccgggaauggacuuauaucgggguggacggaccggauaguaaugcacuucugaagauuaaauacggugaggccuacaccgacacauaucacagcuacgcuaagaacaucuugcgcacucaggaaucugccuguaauugcauaggcggggauuguuaucucaugauuaccgacggacccgcauccggcaucucagagugcagauuucugaaaauuagggagggucggaucaucaaggaaauuuucccuacagggcgcguuaagcacaccgaggaauguacgugcggauuugcuagcaacaaaacuauagagugugccugccgagauaauaguuacacagcgaagagaccauucgugaaauuaaacgucgaaaccgacacugccgagaucaggcugaugugcacagagaccuaucucgauacgccccggccuaaugacggcucuauuaccggcccaugugaauccaacggggauaagggaagcgguggcaucaaagggggauuugugcaucaacguauggcaucgaagauaggccgcugguacucuagaacaauguccaaaacuaagaggauggguauggggcuuuauguaaaguacgacggcgaccccuggaccgauucagaggcucuggccuugaguggaguuauggugagcauggaggaaccgggcugguacuccuucggguuugaaauuaaagacaagaaaugcgaugucccuuguaucggaaucgagauggugcacgacgguggcaagacaacuuggcauucugcugccaccgcaauuuauugccuaauggggagcggacagcugcucugggauacagugaccggcgucaauaugacucuguga

SEQ ID NO: 158270 - RNA, 1401 nt, Artificial Sequence; identical to SEQ ID NO: 158223
  derived and/or modified CDS sequence (opt3) from neuraminidase__InfluenzaB__AHL94574

SEQ ID NO: 158271 - RNA, 1401 nt, Artificial Sequence
  derived and/or modified CDS sequence (opt3) from neuraminidase__InfluenzaB__AHL94585
augcugcccagcaccauccagacacucacucuuuuccugacguccggcgggguguuguuaucucuguacgucucagccagucuaagcuaucuccuguacuccgacauucuucugaaguuuucucaaaccgagauaacagcuccuaucaugccauuggauugcgcaaacgccucgaauguucaggcggugaacagaucagcugccaaaggaguaacucuccugcugccggaacccgaguggaccuauccuaggcucagcuguccagguaguacauuccagaaggcauuacugauuucuccccaccgguuuggcgaaaucaaaggaaauuccgccccucuuauuauccgcgagccauucauagcuugcgggcccaccgaauguaagcauuuugcauugacucacuacgccgcucagccuggcgguuauuacaacgggacacgagaggaccguaauaaacugagacaucuaaucagcgugaagcucggaaagauuccaaccgucgagaacuccaucuuccacauggccgcguggucaggcagugcaugccaugauggcaaagaauggacguauauugggguggacggaccggauagcaaugcccugcuuaagaucaaauacggugaggcuuacacugacaccuaucacucuuacgccaagaacauacugaggacacaagaauccgcauguaauugcauuggcggggauuguuauuugaugaucacugacggacccgcuucaggcguuagcgagugccgguuucucaaaauucgcgaggguagaaucaucaaggaaauuuucccuaaggggagggugaaacacaccgaggaauguacaugcggauuugccaguaacaagaccauagagugugcgugccgggauaaucgcuacacggccaaacgaccauucgucaagcugaacguggaaacugacacagcagagaucagauuaaugugcaccgagacuuaucuggauacacccaggccuaaugacggcucuauuaccggcccaugugaauccgauggggacaaaggaagcgguggcaucaaagggggauuuguacaucagcggauggcuucgaagauaggccguugguacucucgcacgauguccaagaccaagagaauggguauggggcucuauguuaaauacgacggcgaucccuggacagacucagaggcccuugcucugaguggagugauggucagcauggaggaaccgggcugguacuccuucggguuugaaauuaaggauaaaaagugcgacgugccuuguaucggaaucgagauggugcacgaugguggcaaaacuaccuggcauucugccgcaacagccauuuauugcuugauggggagcggacagcuacugugggacacugucaccggcguugauauggcucucuga

SEQ ID NO: 158272 - RNA, 1401 nt, Artificial Sequence; identical to SEQ ID NO: 158223
  derived and/or modified CDS sequence (opt3) from neuraminidase__InfluenzaB__AHL94596

SEQ ID NO: 158273 - RNA, 1401 nt, Artificial Sequence
  derived and/or modified CDS sequence (opt3) from neuraminidase__InfluenzaB__AHL94607
augcugcccagcaccauccagacacucacucuuuuccugacguccggcgggguguuguuaucucuguacgucucagccagucuaagcuaucuccuguacuccgacauucuucugaaguuuucuccuaccgagauaacagcuccaacuaugccguuggauugcgcaaacgccucgaauguucaagcggugaacagaucagcuaccaaaggaguaacacuccugcugcccgaaccugaguggaccuauccaaggcucagcugucccgguaguacuuuccagaaggccuuacugaucuccccucaccgguuuggcgaaacaaaaggaaauucugcaccacuuauuauccgcgagcccuucauugccugcgggccuaacgaauguaagcauuuugcuuugacccacuacgcagcccagccaggcgguuauuacaaugggacgcgaggagaccguaacaaacugagacaucuaaucagcgugaagcucggcaagauaccgacugucgaaaauuccaucuuccacauggcugccuggucaggcagugcgugccaugaugggaaagaguggaccuauauuggaguggacggucccgauaacaaugcacugcuuaagguuaaauacggcgaggccuacacagacacuuaucacagcuacgcuaacaagauccugaggacccaggagucugccuguaauugcauugggggaaacuguuauuugaugaucacagauggcuccgcaucaggugugagcgaaugccgguuucucaaaauacgcgaggggagaauuaucaaggagauuuucccuaccggaagggucaagcacacggaagaguguacuugcggcuuugcuaguaauaaaacaaucgaaugugccugccgggacaaccgcuacaccgcgaagcgaccauucgugaaacugaauguagagacugauacagccgaaaucagauuaaugugcaccgacacguaucuggauacccccaggccuaacgacggcucuauuacagggccaugugaguccgauggagacaaggguagcggcgggauaaaaggaggcuuuguucaucaacggcucaagucgaaaaucggucguugguacucucgcacuauguccaagaccgagagaauggggaugggccuuuaugugaaguacgacggagaucccugggcagacucagaugcucugacauucaguggcgucauggugagcaugaaagaaccggggugguacuccuuuggauucgagauuaaggacaaaaagugcgaugugccuuguaucgguauagaaaugguccacgacggcgggaaagagacuuggcauucugccgcuaccgccauuuauugcuugaugggaagcggccagcuacugugggauacaguuaccgguguggacauggcacucuga

SEQ ID NO: 158274 - RNA, 1401 nt, Artificial Sequence; identical to SEQ ID NO: 158254
  derived and/or modified CDS sequence (opt3) from neuraminidase__InfluenzaB__AHL94618

SEQ ID NO: 158275 - RNA, 1401 nt, Artificial Sequence; identical to SEQ ID NO: 158250
  derived and/or modified CDS sequence (opt3) from neuraminidase__InfluenzaB__AHL94628

SEQ ID NO: 158276 - RNA, 1401 nt, Artificial Sequence; identical to SEQ ID NO: 158254
  derived and/or modified CDS sequence (opt3) from neuraminidase__InfluenzaB__AHL94639

SEQ ID NO: 158277 - RNA, 1401 nt, Artificial Sequence
  derived and/or modified CDS sequence (opt3) from neuraminidase__InfluenzaB__AHL94650
augcugcccagcaccauccagacacucacucuuuuccugacguccggcgggguguuguuaucucuguacgucucagccagucuaagcuaucuccuguacuccgacauucuucugaaguuuucuccuaccgagauaacagcuccaacuaugccguuggauugcgcaaacgccucgaauguucaagcggugaacagaucagcuaccaaaggaguaacacuccugcugcccgaaccugaguggaccuauccaaggcucagcugucccgguaguacuuuccagaaggccuuacugaucuccccucaccgguuuggcgaaacaaaaggaaauucugcaccacuuauuauccgcgagcccuucauugccugcgggccuaacgaauguaagcauuuugcuuugacccacuacgcagcccagccaggcgguuauuacaaugggacgcgaggagaccguaacaaacugagacaucuaaucagcgugaagcucggcaagauaccgacugucgaaaauuccaucuuccacauggcugccuggucaggcagugcgugccaugaugggaaagaguggaccuauauuggaguggacggucccgauaacaaugcacugcuuaagguuaaauacggcgaggccuacacagacacuuaucacagcuacgcuaacaagauccugaggacccaggagucugccuguaauugcauugggggaaacuguuauuugaugaucacagauggcuccgcaucaggugugagcgaaugccgguuucucaaaauacgcgaggggagaauuaucagggagauuuucccuaccggacgggucaagcacacggaagaguguacuugcggcuuugcuaguaauaagacaaucgaaugugccugccgcgacaaccgauacaccgcgaaaagaccauucgugaagcugaauguagagacugauacagccgaaaucagguuaaugugcaccgacacguaucuggauacaccccggccuaacgacggcucuauuaccgggccaugugaguccgauggagacaaagguagcggcgggauaaagggaggcuuuguucaucaacguaugaaaucgaagaucggucgcugguacucuagaacuauguccaaaaccgagaggauggggaugggccucuaugugaaguacgacggagaucccugggcagacucagaugcucuugccuucaguggcgucauggugagcaugaaggaaccggggugguacuccuuuggauucgagauuaaagacaagaaaugcgaugugccuuguaucgguauagaaaugguccacgacggcgggaaggagacauggcauucugcugccacugcaauuuauugccugaugggaagcggccaguugcuaugggauaccguuacagguguggacauggcccuguga

SEQ ID NO: 158278 - RNA, 1401 nt, Artificial Sequence
  derived and/or modified CDS sequence (opt3) from neuraminidase__InfluenzaB__AHL94661
augcugcccagcaccauccagacacucacucuuuuccugacguccggcgggguguuguuaucucuguacgucucagccagucuaagcuaucuccuguacuccgacauucuucugaaguuuccuucuaccgagauaacagcuccaacuaugccguuggauugcgcaaacgccucgaauguucaagcggugaacagaucagcuaccaaaggaguaacacuccugcugcccgaaccugaguggaccuauccaaggcucagcugucccgguaguacuuuccagaaggccuuacugaucuccccucaccgguuuggcgaaacaaaaggaaauucugcaccacuuauuauccgcgagcccuucauugccugcgggccuaaggaauguaaacauuuugcuuugacccacuacgcagcccagccaggcgguuauuacaacgggacgcgaggagaccguaauaagcugagacaucuaaucagcgugaagcucggcaaaauaccgacugucgagaacuccaucuuccacauggcugccuggucaggcagugcgugccaugaugggaaggaguggaccuauauuggaguggacggucccgauaauaacgcacugcuuaaaaucaaguacggcgaagccuacacagacacuuaucacagcuacgcuaauaacauucugaggacccaggagucugccuguaauugcaucgggggaaacuguuauuugaugauaacagauggcuccgcaucagguguuagcgaaugccgguuucucaaaauucgcgaggggagaaucauuaaggagaucuucccuaccggaaggauccaacacacggaagaguguacuugcggcuuugcuaguaauaagacaauugaaugugccugccgggacaacucuuacaccgcgaaacgcccauucgugaagcugaaugucgagacugauacagccgaaauacgauuaaugugcaccaaaacguaucuggacacccccagaccugaggauggcuccaucacagggccaugugagagcaacggagguaagggcucugggggaauuaaaggcgguuuugugcaucagaggauggcaucgaagaucgggcggugguacucccguacuaugucaaaaaccgaacgcaagggcaugggacucuauguaaaguacaacggcgaccccugggcugauagugacgcccuuguuuucagcggggugauggucuccauggaggaaccgggaugguacucuuuugguuucgagauaaaagacaagaaaugcgaugugccuuguauuggcaucgaaauggugcacgacgggggaaaggagacauggcauagcgcugccacugcaaucuauugccugaugggcucaggucaguugcuaugggauaccgucacagggguuaauaugacccuguga

SEQ ID NO: 158279 - RNA, 1401 nt, Artificial Sequence
  derived and/or modified CDS sequence (opt3) from neuraminidase__InfluenzaB__AHL94672
augcugcccagcaccauccagacacucacucuuuuccugacguccggcgggguguuguuaucucuguacgucucagccagucuaagcuaucuccuguacuccgacauucuucugaaguuuucuagaaccgagauaacagcuccuaucaugccauuggauugcgcaaacgccucgaauguucaagcggugaacaggucagcuacuaaaggaguaaccccgcuccugcccgaaccugaguggacauauccacggcugagcugucccgguaguaccuuccagaaggcccucuuaauuuccccucaccgcuuuggcgaaacuaaaggaaauucugcaccacugaucauucgagagcccuucaucgccugcgggccuaaggaauguaaacauuuugcucuuacacacuacgcagcccagccaggcgguuauuacaacgggacccgugaggacagaaauaaguugaggcaucugauaagcgugaagcuaggaaaaaucccgacggucgagaacuccauuuuccacauggcugccuggucaggcagugcgugccaugauggccgggaauggacuuauaucgggguggacggacccgauagcaaugcacuccugaagauuaaauacggugaggccuacaccgacacauaucacucuuacgcuaagaacauccuucgcacucaggaauccgccuguaauugcauaggcggggauuguuaucugaugauuaccgacggaucagcaagcggcaucagugagugcagauuuuugaaaauuagggagggucggaucaucaaggaaauuuucccuacagggcgcguuaagcacaccgaggaauguacgugcggauuugcuucuaacaaaacuauagagugugccugccgagauaauuccuacacagcgaagagaccauucgugaaacucaacgucgaaaccgacacugccgagaucaggcugaugugcacagagaccuauuuagauacgccccggccuaaugacggcagcauuucgggcccaugugaaucuaacggggaugagggauccgguggcaucaaagggggauuugugcaucaacguauggcaucaaagauaggccgcugguacaguagaaccaugagcaagacaaaaaggauggguauggggcuguauguaaaguacgacggcgaccccuggacugauuccgaagcucucgcccuuucuggaguuauggugagcauggaggaaccgggcugguacucauucggguuugagauuaaggacaaaaagugcgaugucccuuguaucggaaucgagauggugcacgacgguggcaaaaccacauggcauagugcugccacugcaauuuauugccugaugggguccggacaguugcuaugggauaccgugacaggcgucaauaugacccuguga

SEQ ID NO: 158280 - RNA, 1401 nt, Artificial Sequence
  derived and/or modified CDS sequence (opt3) from neuraminidase__InfluenzaB__AHL94683
augcugcccagcaccauccagacacucacucuuuuccugacguccggcgggguguuguuaucucuguacgucucagccagucuaagcuaucuccuguacuccgacauucuucugaaguuuucuagaaccgagauaacagcuccuaucaugccauuggauugcgcaaacgccucgaauguucaagcggugaacaggucagcuacuaaaggaguaaccccgcuccugcccgaaccugaguggacauauccacggcugagcugucccgguaguaccuuccagaaggcccucuuaauuuccccucaccgcuuuggcgaaacuaaaggaaauucugcaccacugaucauucgagagcccuucaucgccugcgggccuaaggaauguaaacauuuugcucuuacacacuacgcagcccagccaggcgguuauuacaacgggacccgugaggacagaaauaaguugaggcaucugauaagcgugaagcuaggaaaaaucccgacggucgagaacuccauuuuccacauggcugccuggucaggcagugcgugccaugauggccgggaauggacuuauaucgggguggacggacccgauagcaaugcacuccugaagauuaaauacggugaggccuacaccgacacauaucacucuuacgcuaagaacauccuucgcacucaggaauccgccuguaauugcauaggcggggauuguuaucugaugauuaccgacggaucagcaagcggcaucagugagugcagauuuuugaaaauuagggagggucggaucaucaaggaaauuuucccuacagggcgcguuaagcacaccgaggaauguacgugcggauuugcuucuaacaaaacuauagagugugccugccgagauaauuccuacacagcgaagagaccauucgugaaacucaacgucgaaaccgacacugccgagaucaggcugaugugcacagagaccuauuuagauacgccccggccuaaugacggcagcauuaccggcccaugugaaucgaacgggggagaggguucuggcgggaucaagggaggcuuugugcaucaacguauggcauccaaaauaggucgcugguacucaagaacaaugaguaagacuaaaaggauggggaugggccuguauguaaaguacgauggagaccccuggaccgacagcgaagcucucgcccuuuccggcguuauggugucuauggaggaaccggggugguacagcuucggauuugagauuaaggauaaaaagugcgacgucccuuguaucgguaucgagauggugcacgauggcgggaaaacaacuuggcauucagcugccaccgcaauuuauugccugaugggaaguggccaguugcuaugggacacagugaccggugucaauaugacucuguga

SEQ ID NO: 158281 - RNA, 1401 nt, Artificial Sequence
  derived and/or modified CDS sequence (opt3) from neuraminidase__InfluenzaB__AHL94694
augcugcccagcaccauccagacacucacucuuuuccugacguccggcgggguguuguuaucucuguacgucucagccagucuaagcuaucuccuguacuccgacauucuucugaaguuuucuccuaccgagauaacagcuccaacuaugccguuggauugcgcaaacgccucgaauguucaagcggugaacagaucagcuaccaaaggaguaacacuccugcugcccgaaccugaguggaccuauccaaggcucagcugucccgguaguacuuuccagaaggccuuacugaucuccccucaccgguuuggcgaaacaaaaggaaauucugcaccacuuauuauccgcgagcccuucauugccugcgggccuaacgaauguaagcauuuugcuuugacccacuacgcagcccagccaggcgguuauuacaaugggacgcgaggagaccguaacaaacugagacaucuaaucagcgugaagcucggcaagauaccgacugucgaaaauuccaucuuccacauggcugccuggucaggcagugcgugccaugaugggaaagaguggaccuauauuggaguggacggucccgauaacaaugcacugcuuaagguuaaauacggcgaggccuacacagacacuuaucacagcuacgcuaacaagauccugaggacccaggagucugccuguaauugcauugggggaaacuguuauuugaugaucacagauggcuccgcaucaggugugagcgaaugccgguuucucaaaauacgcgaggggagaauuaucaaggagauuuucccuaccggaagggucaagcacacggaagaguguacuugcggcuuugcuaguaauaaaacaaucgaaugugccugccgggacaaccgcuacaccgcgaagcgaccauucgugaaacugaauguagagacugauacagccgaaaucagauuaaugugcaccgacacguaucuggauacccccaggccuaacgacggcucuauuacagggccaugugaguccgauggagacaaggguagcggcgggauaaaaggaggcuuuguucaucaacggaugaagucgaaaaucggucguugguacucucgcacuauguccaagaccgagagaauggggaugggccucuaugugaaguacgacggagaucccugggcagacucagaugcucuuacauucaguggcgucauggugagcaugaaagaaccggggugguacuccuuuggauucgagauuaaggacaaaaagugcgaugugccuuguaucgguauagaaaugguccacgacggcgggaaagagacuuggcauucugccgcuaccgccauuuauugccugaugggaagcggccaguugcuaugggauacaguuaccgguguggacauggcacuguga

SEQ ID NO: 158282 - RNA, 1401 nt, Artificial Sequence; identical to SEQ ID NO: 158254
  derived and/or modified CDS sequence (opt3) from neuraminidase__InfluenzaB__AHL94705

SEQ ID NO: 158283 - RNA, 1401 nt, Artificial Sequence; identical to SEQ ID NO: 156865
  derived and/or modified CDS sequence (opt3) from neuraminidase__InfluenzaB__AHL94716

SEQ ID NO: 158284 - RNA, 1401 nt, Artificial Sequence
  derived and/or modified CDS sequence (opt3) from neuraminidase__InfluenzaB__AHL94727
augcugcccagcaccauccagacacucacucuuuuccugacguccggcgggguguuguuaucucuguacgucucagccagucuaagcuaucuccuguacuccgacauucuucugaaguuuccuucuaccgagauaacagcuccaacuaugccguuggauugcgcaaacaccucgaauguucaagccgugaacagaucagcgacaaaaggaguaacccuccugcugcccgaaccugaguggacuuauccaaggcucagcugucccgguaguacauuccagaaggcuuuacugaucuccccucaccgguuuggcgaaaccaaaggaaauucugccccacuuauuauccgcgagcccuucauugcaugcgggccuaaggaauguaaacauuuugccuugacgcacuacgcugcacagccaggcgguuauuacaacgggacucgaggagaccguaauaagcugagacaucuaaucagcgugaagcucggcaaaauaccgaccgucgagaacuccaucuuccacauggccgcuuggucaggcagugccugccaugaugggaaggaguggacauauauuggaguggacggucccgauaauaacgcgcugcuuaaaaucaaguacggcgaagcauacacugacaccuaucacagcuacgccaauaacauucugaggacacaggagucugcuuguaauugcaucgggggaaacuguuauuugaugauaaccgauggcuccgccucagguguuagcgaaugccgguuucucaaaauucgcgaggggagaaucauuaaggagaucuucccuacgggaaggauccaacacacugaagaguguacaugcggcuuugcaaguaauaagaccauugaaugugcuugccgggacaacucuuacacugccaaacgcccauucgugaagcugaaugucgagacagauaccgcggaaauacgauuaaugugcacgaaaaccuaucuggacacacccagaccugaggauggcuccaucacugggccaugugagagcaacggagguaagggcucugggggaauuaaaggcgguuuugugcaucagaggauggccucgaagaucgggcggugguacucccguaccaugucaaaaacagaacgcaagggcaugggacucuauguaaaguacaacggcgaccccugggcagauagugacgcucuuguuuucagcggggugauggucuccauggaggaaccgggaugguacucuuuugguuucgagauaaaagacaagaaaugcgaugugccuuguauuggcaucgaaauggugcacgacgggggaaaggagacuuggcauagcgccgcuaccgccaucuauugccugaugggcucaggucaguugcuaugggauacagucaccgggguuaauaugacucuguga

SEQ ID NO: 158285 - RNA, 1401 nt, Artificial Sequence; identical to SEQ ID NO: 156865
  derived and/or modified CDS sequence (opt3) from neuraminidase__InfluenzaB__AHL94738

SEQ ID NO: 158286 - RNA, 1401 nt, Artificial Sequence
  derived and/or modified CDS sequence (opt3) from neuraminidase__InfluenzaB__AHL94749
augcugcccagcaccauccagacacucacucuuuuccugacguccggcgggguguuguuaucucuguacgucucagccagucuaagcuaucuccuguacuccgacauucuucugaaguuuucuccuaccgagauaacagcuccaacuaugccguuggauugcgcaaacgccucgaauguucaagcggugaacagaucagcuaccaaaggaguaacacuccugcugcccgaaccugaguggaccuauccaaggcucagcugucccgguaguacuuuccagaaggccuuacugaucuccccucaccgguuuggcgaaacaaaaggaaauucugcaccacuuauuauccgcgagcccuucauugccugcgggccuaacgaauguaagcauuuugcuuugacccacuacgcagcccagccaggcgguuauuacaaugggacgcgaggagaccguaacaaacugagacaucuaaucagcgugaagcucggcaagauaccgacugucgaaaauuccaucuuccacauggcugccuggucaggcagugcgugccaugaugggaaagaguggaccuauauuggaguggacggucccgauaacaaugcacugcuuaagguuaaauacggcgaggccuacacagacacuuaucacagcuacgcuaacaagauccugaggacccaggagucugccuguaauugcauugggggaaacuguuauuugaugaucacagauggcuccgcaucaggugugagcgaaugccgguuucucaaaauacgcgaggggagaauuaucaaggagauuuucccuaccggaagggucaagcacacggaagaguguacuugcggcuuugcuaguaauaaaacaaucgaaugugccugccgggacaaccgcuacaccgcgaagcgaccauucgugaaacugaauguagagacugauacagccgaaaucagauuaaugugcaccgacacguaucuggauacccccaggccuaacgacggcucuauuacagggccaugugaguccgauggagacaaggguagcggcgggauaaaaggaggcuuuguucaucaacggaugaagucgaaaaucggucguugguacucucgcacuauguccaagaccgagagaauggggaugggccucuaugugaaguacgacggagaucccugggcagacucagaugcucuugccuucaguggcgucauggugagcaugaaagaaccggggugguacuccuuuggauucgagauuaaggacaaaaagugcgaugugccuuguaucggugucgaaaugguucacgacggcgggaaagagacauggcauucugcugccacugcaauauauugccugaugggaagcggccaguugcuaugggauaccgugacagguguagacauggcccuguga

SEQ ID NO: 158287 - RNA, 1401 nt, Artificial Sequence
  derived and/or modified CDS sequence (opt3) from neuraminidase__InfluenzaB__AHL94760
augcugcccagcaccauccagacacucacucuuuuccugacguccggcgggguguuguuaucucuguacgucucagccagucuaagcuaucuccuguacuccgacauucuucugaaguuuucucaaaccgagauaacagcuccuaucaugccauuggauugcgcaaacgccucgaauguucaggcggugaaccacucagcugccaaaggaguaacucuccugcugccggaacccgaguggaccuauccuagacucagcuguccagguaguacauuccagaaggcauuacugauuucuccccauagguuuggcgaaaucaaaggaaauuccgccccucuuauuauccgggagccauucauagcuugcgggcccaccgaauguaagcacuuugcauugacucauuacgccgcucagccuggcgguuauuacaacgggacacgcgaggaccgaaauaaacugcgucaccuaaucagcgugaagcucggaaagauuccaaccgucgagaacuccaucuuccauauggccgcguggucaggcagugcaugccacgauggcaaagaauggacguauauugggguggacggaccggauagcaaugcccugcuuaagaucaaauacggugaggcuuacacugacaccuaucacucuuacgccaagaacauacugagaacacaagaauccgcauguaauugcauuggcggggauuguuauuugaugaucacugacggacccgcuucaggcguuagcgagugcagguuucucaaaauucgggagggucgcaucaucaaggaaauuuucccuaccgggagagugaagcauacagaggaauguaccugcggauuugccaguaacaaaacgauagagugugcgugcagggauaaucgguacacugccaagcgcccauucgucaaacugaacguggaaacagacaccgcagagauccgauuaaugugcacugagacauaucuggauacccccagaccuaaugacggcucuauuacgggcccaugugaauccgauggggacaagggaagcgguggcaucaaagggggauuuguacaccagaggauggcuucgaagauaggccggugguacucucguaccauguccaaaacaaagcgcauggguauggggcucuauguuaaguacgacggcgaucccuggacugacucagaggcccuugcucugaguggagugauggucagcauggaggaaccgggcugguacuccuucggguuugaaauuaaagauaagaaaugcgacaucccuuguaucggaauugagauggugcaugaugguggcaagaccacauggcacucugccgcaacugccaucuauugcuugauggggagcggacagcuacugugggacaccgugacaggcgucgauauggcucucuga

SEQ ID NO: 158288 - RNA, 1401 nt, Artificial Sequence; identical to SEQ ID NO: 158254
  derived and/or modified CDS sequence (opt3) from neuraminidase__InfluenzaB__AHL94770

SEQ ID NO: 158289 - RNA, 1401 nt, Artificial Sequence; identical to SEQ ID NO: 158252
  derived and/or modified CDS sequence (opt3) from neuraminidase__InfluenzaB__AHL94781

SEQ ID NO: 158290 - RNA, 1401 nt, Artificial Sequence; identical to SEQ ID NO: 158250
  derived and/or modified CDS sequence (opt3) from neuraminidase__InfluenzaB__AHL94791

SEQ ID NO: 158291 - RNA, 1401 nt, Artificial Sequence; identical to SEQ ID NO: 158281
  derived and/or modified CDS sequence (opt3) from neuraminidase__InfluenzaB__AHL94801

SEQ ID NO: 158292 - RNA, 1401 nt, Artificial Sequence; identical to SEQ ID NO: 158250
  derived and/or modified CDS sequence (opt3) from neuraminidase__InfluenzaB__AHL94812

SEQ ID NO: 158293 - RNA, 1401 nt, Artificial Sequence; identical to SEQ ID NO: 158250
  derived and/or modified CDS sequence (opt3) from neuraminidase__InfluenzaB__AHL94821

SEQ ID NO: 158294 - RNA, 1401 nt, Artificial Sequence; identical to SEQ ID NO: 158254
  derived and/or modified CDS sequence (opt3) from neuraminidase__InfluenzaB__AHL94831

SEQ ID NO: 158295 - RNA, 1401 nt, Artificial Sequence
  derived and/or modified CDS sequence (opt3) from neuraminidase__InfluenzaB__AHL94840
augcugcccagcaccauccagacacucacucuuuuccugacguccggcgggguguuguuaucucuguacgucucagccagucuaagcuaucuccuguacuccgguauucuucugaaguuuucuagaaccgagauaacagcuccuaucaugccauuggacugcgcaaacgccucgaauguucaagcggugaacaggucagcuacuaaaggaguaacccuccugcugccggaacccgaguggacauauccucggcucagcuguccaggcaguaccuuccagaaggccuuacugauuucuccccaccgcuuuggggaaacuaaaggaaauuccgcaccucuuaucauucgagagccauucaucgccugcggccccaaggaauguaaacauuuugcuuugacacacuacgcagcccagccugguggguauuacaacggaacccgugaggauagaaauaagcugaggcaucuaauaagcgugaagcucggcaaaaucccaacggucgagaacuccauuuuccacauggcugccuggucaggcagugcgugccaugacgggcgggaauggacuuauaucggaguggaugguccggacagcaaugcacugcuuaagauuaaauacggcgaggccuacaccgauacauaucacucuuacgcuaagaacauccugcgcacucaggaauccgccuguaauugcauagggggagacuguuauuugaugauuaccgauggccccgcaucagguaucagcgagugcagauuucucaaaauuagggaggggcggaucaucaaggaaauuuucccuacaggacgcguuaagcacaccgaggaauguacgugcggcuuugcuaguaacaaaacuauagagugugccugccgagacaauucuuacacagcgaagagaccauucgugaaacugaacgucgaaaccgauacugccgagaucagguuaaugugcacagagaccuaucuggacacgccccggccuaaugauggcuccauuaccgggccaugugaaagcaacggagacaaggguucgggcgggaucaaaggaggcuuugugcaucaacguauggcaucuaagauaggucgcugguacuccagaacaaugucaaaaacuaagaggauggggaugggccucuauguaaaguacgauggagaccccuggaccgacagugaggcucuugcccugagcggcguuaugguguccauggaggaaccggggugguacucuuucggauuugaaauuaaagauaagaaaugcgacgucccuuguaucgguaucgagauggugcacgauggcgggaagacaacuuggcauagcgcugccaccgcaauuuauugcuugaugggaucaggccagcuacugugggacacagugaccggugucaauaugacucucuga

SEQ ID NO: 158296 - RNA, 1401 nt, Artificial Sequence
  derived and/or modified CDS sequence (opt3) from neuraminidase__InfluenzaB__AHL94851
augcugcccagcaccauccagacacucacucuuuuccugacguccggcgggguguuguuaucucuguacgucucagccagucuaagcuaucuccuguacuccgacauucuucugaaguuuucucaaaccgagauaacagcuccuaucaugccauuggauugcacuaacgcaucgaauguucaggccgugaacagaucagcggcuaaaggaguaacccuccugcugccggaacccgaguggacauauccuaggcucagcuguccagguaguaccuuccagaaggccuuacugauuucuccccaccgguuuggcgaaaucaaaggaaauuccgcaccucuuauuauccgcgagccauucauagccugcgggcccacugaauguaagcauuuugcuuugacacacuacgcagcccagccuggcgguuauuacaacgggacccgagaggaccguaauaaacugagacaucuaaucagcgugaagcucggaaagauuccaacggucgagaacuccaucuuccacauggcugccuggucaggcagugcgugccaugauggcaaagaauggacuuauauugggguggacggaccggauagcaaugcacugcuuaagaucaaauacggugaggccuacaccgacacauaucacucuuacgcuaagaacauacugaggacucaagaauccgccuguaauugcauuggcggggauuguuauuugaugaucaccgacggacccgcaucaggcguuagcgagugccgguuucucaaaauucgcgaggguagaaucaucaaggaaauuuucccuacagggagggugaagcacaccgaggaauguacgugcggauuugcuaguaacaaaacuauagagugugccugccgggauaaucgcuacacagcgaagcgaccauucgucaaacugaacguggaaaccgacacugccgagaucagauuaaugugcacagagaccuaucuggauacgcccaggccuaaugacggcucuauuaccggcccaugugaauccgauggggacaagggaagcgguggcaucaaagggggauuuguacaucagcggaugacaucgaagauaggccguugguacucucgcacuauguccaaaaccaagagaauggguauggggcucuauguuaaguacgacggcgaucccuggacagacucagaggcacuugcucugaguggagugauggucagcauggaggaaccgggcugguacuccuucggguuugaaauuaaagauaagaaaugcgacgugccuuguaucggaaucgagauggugcacgaugguggcaagacuaccuggcauucugccgcuacagccauuuauugcuugauggggagcggacagcuacugugggacaccgucacuggcguugauauggcacucuga

SEQ ID NO: 158297 - RNA, 1401 nt, Artificial Sequence; identical to SEQ ID NO: 156683
  derived and/or modified CDS sequence (opt3) from neuraminidase__InfluenzaB__AHL94862

SEQ ID NO: 158298 - RNA, 1401 nt, Artificial Sequence; identical to SEQ ID NO: 156865
  derived and/or modified CDS sequence (opt3) from neuraminidase__InfluenzaB__AHL94873

SEQ ID NO: 158299 - RNA, 1401 nt, Artificial Sequence; identical to SEQ ID NO: 158169
  derived and/or modified CDS sequence (opt3) from neuraminidase__InfluenzaB__AHL94884

SEQ ID NO: 158300 - RNA, 1401 nt, Artificial Sequence; identical to SEQ ID NO: 157009
  derived and/or modified CDS sequence (opt3) from neuraminidase__InfluenzaB__AHL94893

SEQ ID NO: 158301 - RNA, 1401 nt, Artificial Sequence; identical to SEQ ID NO: 157009
  derived and/or modified CDS sequence (opt3) from neuraminidase__InfluenzaB__AHL94904

SEQ ID NO: 158302 - RNA, 1401 nt, Artificial Sequence
  derived and/or modified CDS sequence (opt3) from neuraminidase__InfluenzaB__AHL94915
augcugcccagcaccauccagacacucacucuuuuccugacguccggcgggguguuguuaucucuguacgucucagccagucuaagcuaucuccuguacuccgacauucuucugaaguuuucuccuaccgagauaacagcuccaacuaugccguuggauugcgcaaacgccucgaauguucaagugguaaacagaucagcgaccaaaggagugacacuccugcugcccgaaccugaguggaccuauccaaggcucagcugucccgguaguacuuuccagaaggcuuuacugaucuccccucaccgguuuggcgaaacaaaaggaaauucugccccacuuauuauccgcgagcccuucauugcaugcgggccuaacgaauguaagcauuuugccuugacccacuacgcugcacagccaggcgguuauuacaaugggacgcgaggagaccguaacaaacugagacaucuaaucagcgucaagcucggcaagauaccgacuguggaaaauuccaucuuccacauggccgcuuggucaggcagugccugccaugaugggaaagaguggaccuauauuggaguugacggucccgauaacaaugcgcugcuuaaggugaaauacggcgaggcauacacagacacuuaucacagcuacgccaacaagauccugaggacccaggagucugcuuguaauugcauugggggaaacuguuauuugaugaucacagauggcuccgccucaggugucagcgaaugccgguuucucaaaauacgcgaggggagaauuaucaaggagauuuucccuaccggaagggugaagcacacggaagaguguacuugcggcuuugcaaguaauaaaacaaucgaaugugcuugccgggacaacucuuacaccgccaagcgcccauucguaaaacugaauguugagacugauacagcggaaauccgauuaaugugcaccgacacguaucuggauacccccagaccugacgauggcuccauuacagggccaugugagagcaacggagacaaggguucgggcgggauaaaaggaggcuuugugcaucaaaggauggagucuaagaucggucggugguacucccguacuaugucaaaaaccgaacgcauggggaugggccucuaugucaaguacgacggagaucccugggccgacagugaugcacuugcuuucagcggcgugaugguguccaugaaggagccggggugguacucuuuuggauucgaaauuaaagacaagaaaugcgaugucccuuguaucgguauagagaugguucacgacggcgggaaggaaacauggcauagcgccgcuacugccauuuauugccugaugggaucaggccaguugcuaugggauaccgugacagguguagacauggcacuguga

SEQ ID NO: 158303 - RNA, 1401 nt, Artificial Sequence; identical to SEQ ID NO: 158169
  derived and/or modified CDS sequence (opt3) from neuraminidase__InfluenzaB__AHL94926

SEQ ID NO: 158304 - RNA, 1401 nt, Artificial Sequence
  derived and/or modified CDS sequence (opt3) from neuraminidase__InfluenzaB__AHL94937
augcugcccagcaccauccagacacucacucuuuuccugacguccggcgggguguuguuaucucuguacgucucagccagucuaagcuaucuccuguacuccgacauucuucugaaguuuucuccuaccgagauaacagcuccaacuuugccgcucgauugcgcaaacgccucgaauguucaagcggugaacagaucagcuaccaaaggaguaacacugcugcuccccgaaccugaguggaccuauccaagguuaagcugucccgguaguacuuuccagaaggcccugcuuaucuccccucaccgguuuggcgaaacaaaaggaaauucugcaccauugauuauccgcgagcccuucauugccugcgggccuaacgaauguaagcauuuugcucugacccacuacgcagcccagccaggcgguuauuacaaugggacgcgaggagaccguaacaaacuaagacaucucaucagcgugaagcugggcaagauaccgacugucgaaaauuccaucuuccacauggcugccuggucaggcagugcgugccaugaugggaaagaguggaccuauauuggaguggacggucccgauaacaaugcacuucugaagguuaaauacggcgaggccuacacagacacuuaucacagcuacgcuaacaagaucuugaggacccaggagucugccuguaauugcauugggggaaacuguuaucucaugaucacagauggcuccgcaucaggugugagcgaaugccgguuucugaaaauacgcgaggggagaauuaucaaggagauuuucccuaccggaagggucaagcacacggaagaguguacuugcggcuuugcuaguaauaaaacaaucgaaugugccugccgggacaacucuuacaccgcgaagcgcccauucgugaaauuaaauguagagacugauacagccgaaauccgacugaugugcaccgacacguaucucgauacccccagaccuaacgacggcuccauuacagggccaugugagagcaacggagauaaggguucgggcgggauaaaaggaggcuuuguucaucaaaggauggagucuaagaucggucggugguacucccguacuaugucaaaaaccgaacgcauggggaugggccuuuaugugaaguacgacggagaccccugggcagauagugacgcucuggccuucagcggcgucaugguguccaugaaggagccggggugguacucuuuuggauucgaaauuaaagauaagaaaugcgacgugccuuguaucgguauagagaugguccacgauggcgggaaggaaacauggcauagcgcugccacugcaauuuauugcuugaugggaucaggccagcuacugugggacaccguuacagguguggauauggcccucuga

SEQ ID NO: 158305 - RNA, 1401 nt, Artificial Sequence; identical to SEQ ID NO: 158188
  derived and/or modified CDS sequence (opt3) from neuraminidase__InfluenzaB__AHL94948

SEQ ID NO: 158306 - RNA, 1401 nt, Artificial Sequence; identical to SEQ ID NO: 157004
  derived and/or modified CDS sequence (opt3) from neuraminidase__InfluenzaB__AHL94959

SEQ ID NO: 158307 - RNA, 1401 nt, Artificial Sequence; identical to SEQ ID NO: 157004
  derived and/or modified CDS sequence (opt3) from neuraminidase__InfluenzaB__AHL94969

SEQ ID NO: 158308 - RNA, 1401 nt, Artificial Sequence; identical to SEQ ID NO: 157004
  derived and/or modified CDS sequence (opt3) from neuraminidase__InfluenzaB__AHL94978

SEQ ID NO: 158309 - RNA, 1401 nt, Artificial Sequence
  derived and/or modified CDS sequence (opt3) from neuraminidase__InfluenzaB__AHM00990
augcugcccagcaccauccagacacucacucuuuuccugacguccggcgggguguuguuaucucuguacgucucagccagucuaagcuaucuccuguacuccgacauucuucugaaguuuucucaaaccgagauaacagcuccuaucaugccauuggauugcacuaacgcaucgaauguucaggccgugaaccacucagcggcuaaaggaguaacccuccugcugccggaacccgaguggacauauccuagacucagcuguccagguaguaccuuccagaaggccuuacugauuucuccccauagguuuggcgaaaucaaaggaaauuccgcaccucuuauuauccgggagccauucauagccugcgggcccacugaauguaagcacuuugcuuugacacauuacgcagcccagccuggcgguuauuacaacgggacccgcgaggaccgaaauaaacugcgucaccuaaucagcgugaagcucggaaagauuccaacggucgagaacuccaucuuccauauggcugccuggucaggcagugcgugccacgauggcaaagaauggacuuauauugggguggacggaccggauagcaaugcacugcuuaagaucaaauacggugaggccuacaccgacacauaucacucuuacgcuaagaacauacugagaacucaagaauccgccuguaauugcauuggcggggauuguuauuugaugaucaccgacggacccgcaucaggcguuagcgagugcagguuucucaaaauucgggagggucgcaucaucaaggaaauuuucccuacagggagagugaagcauaccgaggaauguacgugcggauuugcuaguaacaaaacuauagagugugccugcagggauaaucgguacacagcgaagcgcccauucgucaaacugaacguggaaaccgacacugccgagauccgauuaaugugcacagagaccuaucuggauacgcccagaccuaaugacggcucuauuaccggcccaugugaauccgauggggacaagggaagcgguggcaucaaagggggauuuguacaccagaggauggcaucgaagauaggccggugguacucucguacaauguccaaaacuaagcgcauggguauggggcucuauguuaaguacgacggcgaucccuggaccgacucagaggcucuugcccugaguggagugauggucagcauggaggaaccgggcugguacuccuucggguuugaaauuaaagauaagaaaugcgacgugccuuguaucggaaucgagauggugcaugaugguggcaagacaacuuggcacucugcugccaccgcaauuuauugcuugauggggagcggacagcuacugugggacacagucaccggcguugauauggcccucuga

SEQ ID NO: 158310 - RNA, 1401 nt, Artificial Sequence; identical to SEQ ID NO: 158254
  derived and/or modified CDS sequence (opt3) from neuraminidase__InfluenzaB__AHM01001

SEQ ID NO: 158311 - RNA, 1401 nt, Artificial Sequence
  derived and/or modified CDS sequence (opt3) from neuraminidase__InfluenzaB__AHM01012
augcugcccagcaccauccagacacucacucuuuuccugacguccggcgggguguuguuaucucuguacgucucagccagucuaagcuaucuccuguacuccgacauucuucugaaguuuucuccuaccgagauaacagcuccaacuaugccguuggauugcgcaaacgccucgaauguucaagcggugaacagaucagcuaccaaaggaguaacacuccugcugcccgaaccugaguggaccuauccaaggcucagcugucccgguaguacuuuccagaaggccuuacugaucuccccucaccgguuuggcgaaacaaaaggaaauucugcaccacuuauuauccgcgagcccuucauugccugcgggccuaacgaauguaagcauuuugcuuugacccacuacgcagcccagccaggcgguuauuacaaugggacgcgaggagaccguaacaaacugagacaucuaaucagcgugaagcucggcaagauaccgacugucgaaaauuccaucuuccacauggcugccuggucaggcagugcgugccaugaugggaaagaguggaccuauauuggaguggacggucccgauaacaaugcacugcuuaagguuaaauacggcgaggccuacacagacacuuaucacagcuacgcuaacaagauccugaggacccaggagucugccuguaauugcauugggggaaacuguuauuugaugaucacagauggcuccgcaucaggugugagcgaaugccgguuucucaaaauacgcgaggggagaauuaucaaggagauuuucccuaccggaagggucaagcacacggaagaguguacuugcggcuuugcuaguaauaaaacaaucgaaugugccugccgggacaaccgcuacaccgcgaagcgaccauucgugaaacugaauguagagacugauacagccgaaaucagauuaaugugcaccgacacguaucuggauacccccaggccuaacgacggcucuauuacagggccaugugaguccgauggagacaaggguagcggcgggauaaaaggaggcuuuguucaucaacggaugaagucgaaaaucggucguugguacucucgcacuauguccaagaccgagagaauggggaugggccucuaugugaaguacgacggagaucccuggacagacucagaugcacuugcuuucaguggcgucauggugagcaugaaagaaccggggugguacuccuuuggauucgagauuaaggacaaaaagugcgaugugccuuguaucgguauagaaaugguccacgacggcgggaaagagacuuggcauucugccgcuaccgccauuuauugccugaugggaagcggccaguugcuaugggauacaguuaccgguguggacauggcacuguga

SEQ ID NO: 158312 - RNA, 1401 nt, Artificial Sequence; identical to SEQ ID NO: 158254
  derived and/or modified CDS sequence (opt3) from neuraminidase__InfluenzaB__AHM01023

SEQ ID NO: 158313 - RNA, 1401 nt, Artificial Sequence; identical to SEQ ID NO: 158254
  derived and/or modified CDS sequence (opt3) from neuraminidase__InfluenzaB__AHM01034

SEQ ID NO: 158314 - RNA, 1401 nt, Artificial Sequence
  derived and/or modified CDS sequence (opt3) from neuraminidase__InfluenzaB__AHM01045
augcugcccagcaccauccagacacucacucuuuuccugacguccggcgggguguuguuaucucuguacgucucagccagucuaagcuaucuccuguacuccgacauucuucugaaguuuucuccuaccgagauaacagcuccaacuaugccguuggauugcgcaaacgccucgaauguucaagcggugaacagaucagcuaccaaaggaguaacacuccugcugcccgaaccugguuggaccuauccaaggcucagcugucccggcaguacuuuccagaaggccuuacugaucuccccucaccgguuuggggagacaaaaggaaauucugcaccacuuauuauccgcgaacccuucauugccugcggcccuaacgaguguaagcauuuugcuuugacccacuacgcagcccagccagguggguauuacaauggaacgcgaggcgaccguaacaaacugagacaucuaaucagcgugaagcucggcaagauaccgacugucgaaaauuccaucuuccacauggcugccuggucagggagugcgugccaugauggaaaagaguggaccuauauugguguggacggccccgauaacaaugcacugcuuaagguuaaauacggggaggccuacacagacacuuaucacagcuacgcuaacaagauccugaggacccaggaaucugccuguaauugcauuggaggcaacuguuauuugaugaucacagaugguuccgcaucaggggugagcgagugccgguuucucaaaauacgcgaaggaagaauuaucaaggagauuuucccuaccggcagggucaagcacacggaggaauguacuugcggcuuugcuaguaauaaaacaaucgagugugccugccgggacaaccgcuacaccgcgaagcgaccauucgugaaacugaauguagaaacugauacagccgagaucagauuaaugugcaccgacacguaucuggauacccccaggccuaacgacgggucuauuacaggaccaugugaauccgauggugacaagggcagcgggggaauaaaaggcgguuuuguucaucaacggaugaagucgaaaaucgggcguugguacucucgcacuauguccaagaccgagagaaugggcaugggacucuaugugaaguacgacggcgaucccugggcagacucagaugcucuugccuucaguggggucauggugagcaugaaagagccgggaugguacuccuuugguuucgaaauuaaggacaaaaagugcgaugugccuuguaucggcauagagaugguccacgacgggggaaaagaaacauggcauucugcugccacugcaauuuauugccugaugggcagcggucaguugcuaugggauaccguugccgggguggacauggcucuguga

SEQ ID NO: 158315 - RNA, 1401 nt, Artificial Sequence
  derived and/or modified CDS sequence (opt3) from neuraminidase__InfluenzaB__AHM01056
augcugcccagcaccacacagacucucacgcuuuuccugaccuccggcgggguguuguuaucucuguacgucucagccagucuaagcuaucuccuguacuccgacauccuucugaaguuuucuccuacagagauuacugcuccaaccaugccguuggauugcgcaaacgccucgaauguucaagcggugaacagaucagcuacaaaaggaguaacccuccugcugcccgaaccugaguggacuuauccaaggcucagcugucccgguaguacauuccagaaggccuuacugauauccccucaccgguuuggcgaaaccaaaggaaauucugcaccacuuaucauucgcgagcccuucaucgccugcgggccuaacgaauguaagcauuuugcuuugacgcacuacgcagcccagccaggcgguuauuacaaugggacucgaggagaccguaacaaacugagacaucuaauuagcgugaagcucggcaagaucccgaccgucgaaaauuccauauuccacauggcugccuggucaggcagugcgugccaugaugggaaagaguggacauauaucggaguggacggucccgauaacaaugcacugcuuaagguuaaauacggcgaggccuacacugacaccuaucacagcuacgcuaacaagauucugaggacacaggagucugccuguaauugcaucgggggaaacuguuauuugaugauuaccgauggcuccgcaucaggugugagcgaaugccgguuucucaaaauccgcgaggggagaauaauuaaggagaucuucccuacgggaagggucaagcacacugaagaguguacaugcggcuuugcuaguaauaaaaccauugaaugugccugccgggacaaccgcuacacugcgaagcgaccauucgugaaacugaauguagagacagauaccgccgaaaucagauuaaugugcacggacaccuaucuggauacacccaggccuaacgacggcucuaucacugggccaugugaguccgauggagacaaggguagcggcgggauuaaaggaggcuuuguucaucaacggaugaagucgaaaauaggucguugguacucucgcaccauguccaagacagagagaauggggaugggccucuaugugaaguacgacggagaucccugggcagacucagaugcucuugucuucaguggcgugauggugagcaugaaagaaccggggugguacuccuuuggauucgagaucaaggacaaaaagugcgaugucccuuguauugguaucgaaaugguucacgacggcgggaaagagacuuggcauucugccgcuaccgccauauauugccugaugggaagcggccaguugcuaugggauacagugaccgguguagacauggcacuguga

SEQ ID NO: 158316 - RNA, 1401 nt, Artificial Sequence; identical to SEQ ID NO: 158254
  derived and/or modified CDS sequence (opt3) from neuraminidase__InfluenzaB__AHM01067

SEQ ID NO: 158317 - RNA, 1401 nt, Artificial Sequence; identical to SEQ ID NO: 158223
  derived and/or modified CDS sequence (opt3) from neuraminidase__InfluenzaB__AHM01078

SEQ ID NO: 158318 - RNA, 1401 nt, Artificial Sequence
  derived and/or modified CDS sequence (opt3) from neuraminidase__InfluenzaB__AHM01089
augcugcccagcaccauccagacacucacucuuuuccugacguccggcgggguguuguuaucucuguacgucucagccagucuaagcuaucuccuguacuccgacauucuucugaaguuuucuccuaccgagauaacagcuccaacuaugccguuggauugcgcaaacgccucgaauguucaagcggugaacagaucagcugccaaaggaguaacccuccugcugcccgaaccugaguggacauauccaaggcucagcugucccgguaguaccuuccagaaggcauuacugaucuccccucaccgguuuggcgaaacuaaaggaaauucugccccacuuauuauccgcgagcccuucauugcuugcgggccuaacgaauguaagcauuuugcauugacacacuacgccgcucagccaggcgguuauuacaaugggacccgaggagaccguaacaaacugagacaucuaaucagcgugaagcucggcaagauaccgacggucgaaaauuccaucuuccacauggccgcguggucaggcagugcaugccaugaugggaaagaguggacuuauauuggaguggacggucccgauaacaaugcccugcuuaagguuaaauacggcgaggcuuacaccgacacauaucacagcuacgccaacaagauccugaggacucaggagucugcauguaauugcauugggggaaacuguuauuugaugaucaccgauggcuccgcuucaggugugagcgaaugccgguuucucaaaauacgcgaggggagaauuaucaaggagauuuucccuacaggaagggucaagcacaccgaagaguguacgugcggcuuugccaguaauaaaacuaucgaaugugcgugccgggacaaccgcuacacagccaagcgaccauucgugaaacugaauguagagaccgauacugcagaaaucagauuaaugugcacagacaccuaucuggauacgcccaggccuaacgacggcucuauuaccgggccaugugaguccgauggagacaaggguagcggcgggauaaaaggaggcuuuguucaucaacggaugaagucgaaaaucggucguugguacucucgcacaauguccaagacugagagaauggggaugggccucuaugugaaguacgacggagaucccugggcugacucagaugcccuugcuuucaguggcgucauggugagcaugaaagaaccggggugguacuccuuuggauucgagauuaaggacaaaaagugcgaugugccuuguaucgguauagaaaugguccacgacggcgggaaagagaccuggcauucugccgcaacagccauuuauugccugaugggaagcggccaguugcuaugggauacuguuaccgguguggacauggcucuguga

SEQ ID NO: 158319 - RNA, 1401 nt, Artificial Sequence; identical to SEQ ID NO: 158223
  derived and/or modified CDS sequence (opt3) from neuraminidase__InfluenzaB__AHM01100

SEQ ID NO: 158320 - RNA, 1401 nt, Artificial Sequence; identical to SEQ ID NO: 158254
  derived and/or modified CDS sequence (opt3) from neuraminidase__InfluenzaB__AHM01111

SEQ ID NO: 158321 - RNA, 1401 nt, Artificial Sequence
  derived and/or modified CDS sequence (opt3) from neuraminidase__InfluenzaB__AHM01122
augcugcccagcaccauccagacacucacucuuuuccugacguccggcgggguguuguuaucucuguacgucucagccagucuaagcuaucuccuguacuccgacauucuucugaaguuuucuccuaccgagauaacagcuccaacuaugccguuggauugcgcaaacgccucgaauguucaagcggugaacagaucagcuaccaaaggaguaaagcuccugcugcccgaaccugaguggacauauccaaggcucagcugucccgguaguaccuuccagaaagccuuacugaucuccccucaccgguuuggcgaaacuaagggaaauucugcaccacuuauuauccgcgagcccuucauugccugcgggccuaacgaauguaaacauuuugcuuugacacacuacgcagcccagccaggcgguuauuacaaugggacccgaggagaccguaacaagcugagacaucuaaucagcgugaagcucggcaaaauaccgacggucgaaaauuccaucuuccacauggcugccuggucaggcagugcgugccaugaugggaaggaguggacuuauauuggaguggacggucccgauaacaaugcacugcuuaaaguuaaguacggcgaggccuacaccgacacauaucacagcuacgcuaacaaaauccugaggacucaggagucugccuguaauugcauugggggaaacuguuauuugaugaucaccgauggcuccgcaucaggugugagcgaaugccgguuucucaagauacgcgaggggagaauuaucaaggagauuuucccuacaggaagggucaaacacaccgaagaguguacgugcggcuuugcuaguaauaagacuaucgaaugugccugccgggacaaccgcuacacagcgaaacgaccauucgugaagcugaauguagagaccgauacugccgaaaucagauuaaugugcacagacaccuaucuggauacgcccaggccuaacgacggcucuauuaccgggccaugugaguccgauggagacaaagguagcggcgggauaaagggaggcuuuguucaucaacggaugaaaucgaagaucggucguugguacucucgcacaauguccaagacugagagaauggggaugggccucuaugugaaauacgacggagaucccugggcagacucagaugcucuugccuucaguggcgucauggugagcaugaaggaaccggggugguacuccuuuggauucgagauuaaagacaagaaaugcgaugugccuuguaucgguauagaaaugguccacgacggcgggaaggagaccuggcauucugcugccacagcaauuuauugccugaugggaagcggccaguugcuaugggauacuguuaccgguguggacauggcccuguga

SEQ ID NO: 158322 - RNA, 1401 nt, Artificial Sequence; identical to SEQ ID NO: 158254
  derived and/or modified CDS sequence (opt3) from neuraminidase__InfluenzaB__AHM01133

SEQ ID NO: 158323 - RNA, 1401 nt, Artificial Sequence
  derived and/or modified CDS sequence (opt3) from neuraminidase__InfluenzaB__AHM01144
augcugcccagcaccauccagacacucacucuuuuccugacguccggcgggguguuguuaucucuguacgucucagccagucuaagcuaucuccuguacuccgacauucuucugaaguuuucuccuaccgagauaacagcuccaacuaugccguuggauugcgcaaacgccucgaauguucaagcggugaacagaucagcugccaaaggaguaacccuccugcugcccgaaccugaguggacauauccaaggcucagcugucccgguaguaccuuccagaaggcauuacugaucuccccucaccgguuuggcgaaacuaaaggaaauucugccccacuuauuauccgcgagcccuucauugcuugcgggccuaacgaauguaagcauuuugcauugacacacuacgccgcucagccaggcgguuauuacaaugggacccgaggagaccguaacaaacugagacaucuaaucagcgugaagcucggcaagauaccgacggucgaaaauuccaucuuccacauggccgcguggucaggcagugcaugccaugaugggaaagaguggacuuauauuggaguggacggucccgauaacaaugcccugcuuaagguuaaauacggcgaggcuuacaccgacacauaucacagcuacgccaacaagauccugaggacucaggagucugcauguaauugcauugggggaaacuguuauuugaugaucaccgauggcuccgcuucagguauaagcgaaugccgguuucucaaaauucgcgaggggagaaucauuaaggagaucuucccuacaggaagggugaagcacaccgaagaguguacgugcggcuuugccaguaauaaaacuaucgaaugugcgugccgggacaaccgcuacacagccaagcgaccauucgucaaacugaauguggagaccgauacugcagaaauuagauuaaugugcacagacaccuaucuggauacgcccaggccuaacgacggcucuauaaccgggccaugugaguccgauggagacaaggguagcggcgggaucaaaggaggcuuuguacaucaacggaugaagucgaaaauuggucguugguacucucgcacaauguccaagacugagagaauggggaugggccucuauguuaaguacgacggagaucccugggcugacucagaugcccuugcuuucaguggcgugauggucagcaugaaagaaccggggugguacuccuuuggauucgagaucaaggacaaaaagugcgaugugccuuguauagguauugaaauggugcacgacggcgggaaagagaccuggcauucugccgcaacagccaucuauugccugaugggaagcggccaguugcuaugggauacugucaccgguguugacauggcucuguga

SEQ ID NO: 158324 - RNA, 1401 nt, Artificial Sequence; identical to SEQ ID NO: 158254
  derived and/or modified CDS sequence (opt3) from neuraminidase__InfluenzaB__AHM01166

SEQ ID NO: 158325 - RNA, 1401 nt, Artificial Sequence
  derived and/or modified CDS sequence (opt3) from neuraminidase__InfluenzaB__AHM01188
augcugcccagcaccauccagacacucacucuuuuccugacguccggcgggguguuguuaucucuguacgucucagccagucuaagcuaucuccuguacuccgacauucuucugaaguuuucuccuaccgagauaacagcuccaacuaugccguuggauugcgcaaacgccucgaauguucaagcggugaaccacucagcuaccaaaggaguaacacuccugcugcccgaaccugaguggaccuauccaagacucagcugucccgguaguacuuuccagaaggccuuacugaucuccccucauagguuuggcgaaacaaaaggaaauucugcaccacuuauuauccgggagcccuucauugccugcgggccuaacgaauguaagcacuuugcuuugacccauuacgcagcccagccaggcgguuauuacaaugggacgcgcggagaccgaaacaaacugcgucaccuaaucagcgugaagcucggcaagauaccgacugucgaaaauuccaucuuccauauggcugccuggucaggcagugcgugccacgaugggaaagaguggaccuauauuggaguggacggucccgauaacaaugcacugcuuaagguuaaauacggcgaggccuacacagacacuuaucacagcuacgcuaacaagauccugagaacccaggagucugccuguaauugcauugggggaaacuguuauuugaugaucacagauggcuccgcaucaggugugagcgaaugcagguuucucaaaauacgggaggggcgcauuaucaaggagauuuucccuaccggaagagucaagcauacggaagaguguacuugcggcuuugcuaguaauaaaacaaucgaaugugccugcagggacaaccgguacaccgcgaagcgcccauucgugaaacugaauguagagacugauacagccgaaauccgauuaaugugcaccgacacguaucuggauacccccagaccuaacgacggcucuauuacagggccaugugaguccgauggagacaaggguagcggcgggauaaaaggaggcuuuguucaccaaaggaugaagucgaaaaucggucggugguacucucguacuauguccaagaccgagcgcauggggaugggccucuaugugaaguacgacggagaucccugggcagacucagaugcucuugucuucaguggcgugauggugagcaugaaagaaccggggugguacuccuuuggauucgagauuaaggacaaaaagugcgaugucccuuguaucgguauagaaaugguucaugacggcgggaaagagacauggcacucugccgcuacugccauuuauugccugaugggaagcggccaguugcuaugggauaccgugacagguguagacauggcacuguga

SEQ ID NO: 158326 - RNA, 1401 nt, Artificial Sequence; identical to SEQ ID NO: 158318
  derived and/or modified CDS sequence (opt3) from neuraminidase__InfluenzaB__AHM01199

SEQ ID NO: 158327 - RNA, 1401 nt, Artificial Sequence
  derived and/or modified CDS sequence (opt3) from neuraminidase__InfluenzaB__AHM01210
augcugcccagcaccauccagacacucacucuuuuccugacguccggcgggguguuguuaucucuguacgucucagccagucuaagcuaucuccuguacuccgacauucuucugaaguuuucuccuaccgagauaacagcuccaacuaugccguuggauugcgcaaacgccucgaauguucaagcggugaacagaucagcuaccaaaggaguaacacuccugcugcccgaaccugguuggaccuauccaaggcucagcugucccggcaguacuuuccagaaggccuuacugaucuccccucaccgguuuggggaggcaaaaggaaauucugccccacuuauuauccgcgaacccuucauugcuugcggcccuaacgaguguaagcauuuugcauugacacacuacgccgcucagccagguggguauuacaauggaacccgaggcgaccguaacaaacugagacaucuaaucagcgugaagcucggcaagauaccgacggucgaaaauuccaucuuccacauggccgcguggucagggagugcaugccaugauggaaaagaguggacuuauauugguguggacggccccgauaacaaugcccugcuuaagguuaaauacggggaggcuuacaccgacacauaucacagcuacgccaacaagauccugaggacucaggaaucugcauguaauugcauuggaggcaacuguuauuugaugaucaccgaugguuccgcuucaggggugagcgagugccgguuucucaaaauacgcgaaggaagaauuaucaaggagauuuucccuacaggcagggucaagcacaccgaggaauguacgugcggcuuugccaguaauaaaacuaucgagugugcgugccgggacaaccgcuacacagccaagcgaccauucgugaaacugaauguagaaaccgauacugcagagaucagauuaaugugcacagacaccuaucuggauacgcccaggccuaacgacgggucuauuaccggaccaugugaauccgauggugacaagggcagcgggggaauaaaaggcgguuuuguucaucaacggaugaagucgaaaaucgggcguugguacucucgcacaauguccaagacugagagaaugggcaugggacucuaugugaaguacgacggcgaucccugggcugacucagaugcccuugcuuucaguggggucauggugagcaugaaagagccgggaugguacuccuuugguuucgaaauuaaggacaaaaagugcgaugugccuuguaucggcauagagaugguccacgacgggggaaaagaaaccuggcauucugccgcaacagccauuuauugccugaugggcagcggucaguugcuaugggauacuguugcugggguggacauggcgcuguga

SEQ ID NO: 158328 - RNA, 1401 nt, Artificial Sequence
  derived and/or modified CDS sequence (opt3) from neuraminidase__InfluenzaB__AHM01221
augcugcccagcaccauccagacacucacucuuuuccugacguccggcgggguguuguuaucucuguacgucucagccagucuaagcuaucuccuguacuccgacauucuucugaaguuuucuccuaccgagauaacagcuccaacuaugccguuggauugcgcaaacgccucgaauuuccaagcgguuaacagaucagcuaccaaaggagugacauuucuccugcccgaaccugaguggaccuauccaaggcugagcugucccgguaguacuuuccagaaggcccucuuaaucuccccucaccgguuuggcgaaacaaaaggaaauucugcaccacugauuauccgcgagcccuucauugccugcgggccuaacgaauguaagcauuuugcucuuacccacuacgcagcccagccaggcgguuauuacaaugggacgcgaggagaccguaacaaauugagacaucugaucagcguaaagcuaggcaagauaccgacuguggaaaauuccaucuuccacauggcugccuggucaggcagugcgugccaugaugggaaagaguggaccuauauuggagucgacggucccgauaacaaugcacuccugaaggugaaauacggcgaggccuacacagacacuuaucacagcuacgcuaacaagauccuuaggacccaggagucugccuguaauugcauugggggaaacuguuaucugaugaucacagauggcuccgcaucagguguuagcgaaugccgguuuuugaaaauacgcgaggggagaauuaucaaggagauuuucccuaccggaagggugaagcacacggaagaguguacuugcggcuuugcuaguaauaaaacaaucgaaugugccugccgggacaaccgcuacaccgcgaagcgaccauucgucaaacucaauguggagacugauacagccgaaaucagacugaugugcaccgacacguauuuagauacccccaggccuaacgacggcucuauuacagggccaugugaguccgauggagacaaggguagcggcgggauaaaaggaggcuuuguacaucaacggaugaagucgaaaaucggucguugguacucucgcacuauguccaagaccgagagaauggggaugggccuguauguuaaguacgacggagaucccugggcagacucagaugcucucgccuucaguggcgugauggucagcaugaaagaaccggggugguacuccuucggauuugagauuaaggacaaaaagugcgaugugccuuguaucgguauagaaauggugcacgacggcgggaaagagacauggcauucugcugccacugcaauuuauugccuuaugggaagcggccagcuguugugggauaccgucacagguguugacauggcccuauga

SEQ ID NO: 158329 - RNA, 1401 nt, Artificial Sequence; identical to SEQ ID NO: 158223
  derived and/or modified CDS sequence (opt3) from neuraminidase__InfluenzaB__AHM01232

SEQ ID NO: 158330 - RNA, 1401 nt, Artificial Sequence; identical to SEQ ID NO: 158254
  derived and/or modified CDS sequence (opt3) from neuraminidase__InfluenzaB__AHM01243

SEQ ID NO: 158331 - RNA, 1401 nt, Artificial Sequence
  derived and/or modified CDS sequence (opt3) from neuraminidase__InfluenzaB__AHM01254
augcugcccagcaccauccagacacucacucuuuuccugacguccggcgggguguuguuaucucuguacgucucagccagucuaagcuaucuccuguacuccgacauucuucugaaguuuucuccuaccgagauaacagcuccaacuaugccguuggauugcgcaaacgccucgaauguucaagcggugaacagaucagcuaccaaaggaguaacacuccugcugcccgaaccugaguggaccuauccaaggcucagcugucccgguaguacuuuccagaaggccuuacugaucuccccucaccgguuuggcgaaacaaaaggaaauucugcaccacuuauuauccgcgagcccuucauugccugcgggccuaacgaauguaagcauuuugcuuugacccacuacgcagcccagccaggcgguuauuacaaugggacgcgaggagaccguaacaaacugagacaucuaaucagcgugaagcucggcaagauaccgacugucgaaaauuccaucuuccacauggcugccuggucaggcagugcgugccaugaugggaaagaguggaccuauauuggaguggacggucccgauaacaaugcacugcuuaagguuaaauacggcgaggccuacacagacacuuaucacagcuacgcuaacaagauccugaggacccaggagucugccuguaauugcauugggggaaacuguuauuugaugaucacagauggcuccgcaucaggugugagcgaaugccgguuucucaaaauacgcgaggggagaauuaucaaggagauuuucccuaccggaagggucaagcacacggaagaguguacuugcggcuuugcuaguaauaaaacaaucgaaugugccugccgggacaaccgcuacaccgcgaagcgaccauucgugaaacugaauguagagacugauacagccgaaaucagauuaaugugcaccgacacguaucuggauacccccaggccuaacgacggcucuauuacagggccaugugaguccgauggagacaaggguagcggcgggauaaaaggaggcuuuguucaucaacggaugaagucgaaaaucggucguugguacucucgcacuauguccaagaccgagagaauggggaugggccucuaugugaaguacgacggagaucccugggcagacucagaugcucuugucuucaguggcgugauggugagcaugaaagaaccggggugguacuccuuuggauucgagauuaaggacaaaaagugcgaugucccuuguaucgguauagaaaugguucacgacggcgggaaagagacauggcauucugccgcuacugccauuuauugccugaugggaagcggccaguugcuaugggauaccgugacagguguagacauggcacuguga

SEQ ID NO: 158332 - RNA, 1401 nt, Artificial Sequence
  derived and/or modified CDS sequence (opt3) from neuraminidase__InfluenzaB__AHM01265
augcugcccagcaccauccagacacucacucuuuuccugacguccggcgggguguuguuaucucuguacgucucagccagucuaagcuaucuccuguacuccgacauucuucugaaguuuucuccuaccgagauaacagcuccaacuaugccguuggauugcgcaaacgccucgaauguucaagcggugaacagaucagcuaccaaaggaguaacacuccugcugcccgaaccugaguggaccuauccaaggcucagcugucccgguaguacuuuccagaaggccuuacugaucuccccucaccgguuuggcgaaacaaaaggaaauucugcaccacuuauuauccgcgagcccuucauugccugcgggccuaacgaauguaagcauuuugcuuugacccacuacgcagcccagccaggcgguuauuacaaugggacgcgaggagaccguaacaaacugagacaucuaaucagcgugaagcucggcaagauaccgacugucgaaaauuccaucuuccacauggcugccuggucaggcagugcgugccaugaugggaaagaguggaccuauauuggaguggacggucccgauaacaaugcacugcuuaagguuaaauacggcgaggccuacacagacacuuaucacagcuacgcuaacaagauccugaggacccaggagucugccuguaauugcauugggggaaacuguuauuugaugaucacagauggcuccgcaucaggugugagcgaaugccgguuucucaaaauacgcgaggggagaauuaucaaggagauuuucccuaccggaagggucaagcacacggaagaguguacuugcggcuuugcuaguaauaaaacaaucgaaugugccugccgggacaaccgcuacaccgcgaagcgaccauucgugaaacugaauguagagacugauacagccgaaaucagauuaaugugcaccgacacguaucuggauacccccaggccuaacgacggcucuauuacagggccaugugaguccgauggagacgaggguagcggcgggauaaagggaggcuuuguucaucaacggaugaaaucgaagaucggucguugguacucucgcacuauguccaaaaccgaaagaauggggaugggccucuaugugaaguacgacggagaucccugggcagacucagaugcucuugccuucaguggcgucauggugagcaugaaggagccggggugguacuccuuuggauucgaaauuaaagacaagaaaugcgaugugccuuguaucgguauagagaugguccacgacggcgggaaggaaacauggcauucugcugccacugcaauuuauugccugaugggaagcggcagguugcuaugggauaccguuacagguguggacauggcccuguga

SEQ ID NO: 158333 - RNA, 1401 nt, Artificial Sequence
  derived and/or modified CDS sequence (opt3) from neuraminidase__InfluenzaB__AHM01276
augcugcccagcaccauccagacacucacucuuuuccugacguccggcgggguguuguuaucucuguacgucucagccagucuaagcuaucuccuguacuccgacauucuucugaaguuuucucaaaccgagauaacagcuccuaucaugccauuggauugcacuaacgcaucgaauguucaggccgugaacagaucagcggcuaaaggaguaacccuccugcugccggaacccgaguggacauauccuaggcucagcuguccagguaguaccuuccagaaggccuuacugauuucuccccaccgguuuggcgaaaucaaaggaaauuccgcaccucuuauuauccgcgagccauucauagccugcgggcccacugaauguaagcauuuugcuuugacacacuacgcagcccagccuggcgguuauuacaacgggacccgagaggaccguaauaaacugagacaucuaaucagcgugaagcucggaaagauuccaacggucgagaacuccaucuuccacauggcugccuggucaggcagugcgugccaugauggcaaagaauggacuuauauugggguggacggaccggauagcaaugcacugcuuaagaucaaauacggugaggccuacaccgacacauaucacucuuacgcuaagaacauacugaggacucaagaauccgccuguaauugcauuggcggggauuguuauuugaugaucaccgacggacccgcaucaggcguuagcgagugccgguuucucaaaauucgcgaggguagaaucaucaaggaaauuuucccuacagggagggugaagcacaccgaggaauguacgugcggauuugcuaguaacaaaacuauagagugugccugccgggauaaucgcuacacagcgaagcgaccauucgucaaacugaacguggaaaccgacacugccgagaucagauuaaugugcacagagaccuaucuggauacgcccaggccuaaugacggcucuauuaccggcccaugugaauccgauggggacaagggaagcgguggcaucaaagggggauuuguacaucagcggauggcaucgaagauaggccguugguacucucgcacaauguccaaaacuaagagaauggguauggggcucuauguuaaguacgacggcgaucccuggaccgacucagaggcucuugcccugaguggagugauggucagcauggaggaaccgggcugguacuccuucggguuugaaauuaaagauaagaaaugcgacgugccuuguaucggaaucgagauggugcacgaugguggcaagacaacuuggcauucugcugccaccgcaauuuauugcuugauggggagcggacagcuacugugggacacagucaccggcguugauauggcccucuga

SEQ ID NO: 158334 - RNA, 1401 nt, Artificial Sequence; identical to SEQ ID NO: 158318
  derived and/or modified CDS sequence (opt3) from neuraminidase__InfluenzaB__AHM01287

SEQ ID NO: 158335 - RNA, 1401 nt, Artificial Sequence; identical to SEQ ID NO: 158318
  derived and/or modified CDS sequence (opt3) from neuraminidase__InfluenzaB__AHM01298

SEQ ID NO: 158336 - RNA, 1401 nt, Artificial Sequence; identical to SEQ ID NO: 158333
  derived and/or modified CDS sequence (opt3) from neuraminidase__InfluenzaB__AHM01309

SEQ ID NO: 158337 - RNA, 1401 nt, Artificial Sequence; identical to SEQ ID NO: 158254
  derived and/or modified CDS sequence (opt3) from neuraminidase__InfluenzaB__AHM01320

SEQ ID NO: 158338 - RNA, 1401 nt, Artificial Sequence; identical to SEQ ID NO: 158318
  derived and/or modified CDS sequence (opt3) from neuraminidase__InfluenzaB__AHM01331

SEQ ID NO: 158339 - RNA, 1401 nt, Artificial Sequence; identical to SEQ ID NO: 158254
  derived and/or modified CDS sequence (opt3) from neuraminidase__InfluenzaB__AHM01342

SEQ ID NO: 158340 - RNA, 1401 nt, Artificial Sequence
  derived and/or modified CDS sequence (opt3) from neuraminidase__InfluenzaB__AHM01353
augcugcccagcaccauccagacacucacucuuuuccugacguccggcgggguguuguuaucucuguacgucucagccagucuaagcuaucuccuguacuccgacauucuucugaaguuuucuccuaccgagauaacagcuccaacuaugccguuggauugcgcaaacgccucgaauguucaagcggugaacagaucagcuaccaaaggaguaacacuccugcugcccgaaccugguuggaccuauccaaggcucagcugucccggcaguacuuuccagaaggccuuacugaucuccccucaccgguuuggggagacaaaaggaaauucugcaccacuuauuauccgcgaacccuucauugccugcggcccuaacgaguguaagcauuuugcuuugacccacuacgcagcccagccagguggguauuacaauggaacgcgaggcgaccguaacaaacugagacaucuaaucagcgugaagcucggcaagauaccgacugucgaaaauuccaucuuccacauggcugccuggucagggagugcgugccaugauggaaaagaguggaccuauauugguguggacggccccgauaacaaugcacugcuuaagguuaaauacggggaggccuacacagacacuuaucacagcuacgcuaacaagauccugaggacccaggaaucugccuguaauugcauuggaggcaacuguuauuugaugaucacagaugguuccgcaucaggggugagcgagugccgguuucucaaaauacgcgaaggaagaauuaucaaggagauuuucccuaccggcagggucaagcacacggaggaauguacuugcggcuuugcuaguaauaaaacaaucgagugugccugccgggacaaccgcuacaccgcgaagcgaccauucgugaaacugaauguagaaacugauacagccgagaucagauuaaugugcaccgacacguaucuggauacccccaggccuaacgacgggucuauuacaggaccaugugaauccgauggugacaagggcagcgggggaauaaaaggcgguuuuguucaucaacggaugaagucgaaaaucgggcguugguacucucgcacuauguccaagaccgagagaaugggcaugggacucuaugugaaguacgacggcgaucccugggcagacucagaugcucuugccuucaguggggucauggugagcaugaaagagccgggaugguacuccuuugguuucgaaauuaaggacaaaaagugcgaugugccuuguaucggcauagagaugguccacgacgggggaaaagaaacauggcauucugcugccacugcaauuuauugccugaugggcagcggucaguugcuaugggauaccguuacagggguggacauggcccuguga

SEQ ID NO: 158341 - RNA, 1401 nt, Artificial Sequence
  derived and/or modified CDS sequence (opt3) from neuraminidase__InfluenzaB__AHM01364
augcugcccagcaccauccagacacucacucuuuuccugacguccggcgggguguuguuaucucuguacgucucagccagucuaagcuaucuccuguacuccgacauucuucugaaguuuucuccuaccgagauaacagcuccaacuaugccguuggauugcgcaaacgccucgaauguucaagcggugaacagaucagcuaccaaaggaguaacacuccugcugcccgaaccugaguggaccuauccaaggcucagcugucccgguaguacuuuccagaaggccuuacugaucuccccucaccgguuuggcgaaacaaaaggaaauucugcaccacuuauuauccgcgagcccuucauugccugcgggccuaacgaauguaagcauuuugcuuugacccacuacgcagcccagccaggcgguuauuacaaugggacgcgaggagaccguaacaaacugagacaucuaaucagcgugaagcucggcaagauaccgacugucgaaaauuccaucuuccacauggcugccuggucaggcagugcgugccaugaugggaaagaguggaccuauauuggaguggacggucccgauaacaaugcacugcuuaagguuaaauacggcgaggccuacacagacacuuaucacagcuacgcuaacaagauccugaggacccaggagucugccuguaauugcauugggggaaacuguuauuugaugaucacagauggcuccgcaucaggugugagcgaaugccgguuucucaaaauacgcgaggggagaauuaucaaggagauuuucccuaccggaagggucaagcacacggaagaguguacuugcggcuuugcuaguaauaaaacaaucgaaugugccugccgggacaaccgcuacaccgcgaagcgaccauucgugaaacugaauguagagacugauacagccgaaaucagauuaaugugcaccgacacguaucuggauacccccaggccuaacgacggcucuauuacagggccaugugaguccgauggagacgaggguagcggcgggauaaagggaggcuuuguucaucaacggaugaaaucgaagaucggucguugguacucucgcacuauguccaaaaccgaaagaauggggaugggccucuaugugaaguacgacggagaucccugggcagacucagaugcucuugccuucaguggcgucauggugagcaugaaggagccggggugguacuccuuuggauucgaaauuaaagacaagaaaugcgaugugccuuguaucgguauagagaugguccacgacggcgggaaggaaacauggcauucugcugccacugcaauuuauugccugaugggaagcggccaguugcuaugggauaccguuacagguguggacauggcccuguga

SEQ ID NO: 158342 - RNA, 1401 nt, Artificial Sequence; identical to SEQ ID NO: 158333
  derived and/or modified CDS sequence (opt3) from neuraminidase__InfluenzaB__AHM01375

SEQ ID NO: 158343 - RNA, 1401 nt, Artificial Sequence; identical to SEQ ID NO: 158333
  derived and/or modified CDS sequence (opt3) from neuraminidase__InfluenzaB__AHM01386

SEQ ID NO: 158344 - RNA, 1401 nt, Artificial Sequence; identical to SEQ ID NO: 158254
  derived and/or modified CDS sequence (opt3) from neuraminidase__InfluenzaB__AHM01397

SEQ ID NO: 158345 - RNA, 1401 nt, Artificial Sequence; identical to SEQ ID NO: 158254
  derived and/or modified CDS sequence (opt3) from neuraminidase__InfluenzaB__AHM01408

SEQ ID NO: 158346 - RNA, 1401 nt, Artificial Sequence; identical to SEQ ID NO: 158254
  derived and/or modified CDS sequence (opt3) from neuraminidase__InfluenzaB__AHM01419

SEQ ID NO: 158347 - RNA, 1401 nt, Artificial Sequence
  derived and/or modified CDS sequence (opt3) from neuraminidase__InfluenzaB__AHM01430
augcugcccagcaccauccagacacucacucuuuuccugacguccggcgggguguuguuaucucuguacgucucagccagucuaagcuaucuccuguacuccgacauucuucugaaguuuucuccuaccgagauaacagcuccaacuaugccguuggauugcgcaaacgccucgaauguucaagcggugaacagaucagcuaccaaaggaguaacacuccugcugcccgaaccugaguggaccuauccaaggcucagcugucccgguaguacuuuccagaaggccuuacugaucuccccucaccgguuuggcgaaacaaaaggaaauucugcaccacuuauuauccgcgagcccuucauugccugcgggccuaacgaauguaagcauuuugcuuugacccacuacgcagcccagccaggcgguuauuacaaugggacgcgaggagaccguaacaaacugagacaucuaaucagcgugaagcucggcaagauaccgacugucgaaaauuccaucuuccacauggcugccuggucaggcagugcgugccaugaugggaaagaguggaccuauauuggaguggacggucccgauaacaaugcacugcuuaagguuaaauacggcgaggccuacacagacacuuaucacagcuacgcuaacaagauccugaggacccaggagucugccuguaauugcauugggggaaacuguuauuugaugaucacagauggcuccgcaucaggugugagcgaaugccgguuucucaaaauacgcgaggggagaauuaucaaggagauuuucccuaccggaagggucaagcacacggaagaguguacuugcggcuuugcuaguaauaaaacaaucgaaugugccugccgggacaaccgcuacaccgcgaagcgaccauucgugaaacugaauguagagacugauacagccgaaaucagauuaaugugcaccgacacguaucuggauacccccaggccuaacgacggcucuauuacagggccaugugaguccgauggagacgaggguagcggcgggauaaagggaggcuuuguucaucaacggaugaaaucgaagaucggucguugguacucucgcacuauguccaaaaccgaaagaauggggaugggccucuaugugaaguacgacggagaucccugggcagacucagaugcucuugccuucaguggcgucauggugagcaugaaggagccggggugguacuccuuuggauucgaaauuaaagacaagaaaugcgaugugccuuguaucgguauagagaugguccacgacggcgggaaggaaacauggcauucugcugccacugcaauuuauugccugaugggaagcggcagguugcuaugggauaccgccacagguguugacauggcucuguga

SEQ ID NO: 158348 - RNA, 1401 nt, Artificial Sequence
  derived and/or modified CDS sequence (opt3) from neuraminidase__InfluenzaB__AHM01441
augcugcccagcaccauccagacacucacucuuuuccugacguccggcgggguguuguuaucucuguacgucucagccagucuaagcuaucuccuguacuccgacauucuucugaaguuuucucaaaccgagauaacagcuccuacuaugccauuggauugcgcaaacgccucgaauguucaggcggugaacagaucagcugccaaaggaguaacccuccugcugccggaacccgaguggacauauccuaggcucagcuguccagguaguaccuuccagaaggcauuacugaucucuccccaccgguuuggcgaaauuaaaggaaauuccgccccucuuaucauucgcgagccauucaucgcuugcgggcccacugaauguaagcauuuugcauugacacacuacgccgcucagccuggcgguuauuacaacgggacccgagaggaccguaauaaacugagacaucuaauaagcgugaagcucggaaagaucccaacggucgagaacuccauuuuccacauggccgcguggucaggcagugcaugccaugauggcaaagaauggacuuauaucgggguggacggaccggauagcaaugcccugcuuaagauuaaauacggugaggcuuacaccgacacauaucacucuuacgccaagaacauccugaggacucaagaauccgcauguaauugcauaggcggggauuguuauuugaugauuaccgacggacccgcuucaggcguuagcgagugccgguuucucaaaauccgcgaggguagaauuaucaaggaaaucuucccuacagggagggugaagcacaccgaggaauguacgugcggauuugccaguaacaaaacuauugagugugcgugccgggauaaucgcuacacagccaagcgaccauucgucaaacugaacguggaaaccgacacugcagagauaagauuaaugugcacagagaccuaucuggauacgcccaggccuaaugacggcucuaucaccggcccaugugaauccgauggggacaagggaagcgguggcauuaaagggggauuuguacaucagcggauggcuucgaagaucggccguugguacucucgcacaauguccaaaacuaagagaauggguauggggcucuauguuaaguacgacggcgaucccuggaccgacucagaggcccuugcucugaguggagugauggucagcauggaggaaccgggcugguacuccuucggguuugaaauaaaagauaagaaaugcgacgugccuuguauuggaaucgagauggugcacgaugguggcaagacaacuuggcauucugccgcaaccgccaucuauugcuugauggggagcggacagcuacugugggacacagucaccggcguugauauggcucucuga

SEQ ID NO: 158349 - RNA, 1401 nt, Artificial Sequence; identical to SEQ ID NO: 158254
  derived and/or modified CDS sequence (opt3) from neuraminidase__InfluenzaB__AHM01463

SEQ ID NO: 158350 - RNA, 1401 nt, Artificial Sequence
  derived and/or modified CDS sequence (opt3) from neuraminidase__InfluenzaB__AHM01474
augcugcccagcaccauccagacacucacucuuuuccugacguccggcgggguguuguuaucucuguacgucucagccagucuaagcuaucuccuguacuccgacauucuucugaaguuuucucaaaccgagauaacagcuccuaucaugccauuggauugcauuaacgcaucgaauguucaggccgugaacagaucagcggcuaaaggaguaacucuccugcugccggaacccgaguggaccuauccuaggcucagcuguccagguaguacauuccagaaggccuuacugaucucuccccaccgguuuggcgaaauuaaaggaaauuccgcaccucuuaucauacgcgagccauucaucgccugcgggcccaccgaauguaagcauuuugcuuugacucacuacgcagcccagccuggcgguuauuacaacgggacacgagaggaccguaauaaacugagacaucuaauuagcgugaagcucggaaagaucccaaccgucgagaacuccauuuuccacauggcugccuggucaggcagugcgugccaugauggcaaagaauggacguauaucgggguggacggaccggauagcaaugcacugcuuaagauaaaauacggugaggccuacacugacaccuaucacucuuacgcuaagaacauucugaggacacaagaauccgccuguaauugcaucggcggggauuguuauuugaugauuacugacggacccgcaucaggcguuagcgagugccgguuucucaaaauccgcgaggguagaaucauuaaggaaauauucccuaccgggagggugaagcacacagaggaauguaccugcggauuugcuaguaacaaaacgaucgagugugccugccgggauaaucgcuacacugcgaagcgaccauucgucaaacugaacguggaaacagacaccgccgagauuagauuaaugugcacugagacauaucuggauacccccaggccuaaugacggcucuaucacgggcccaugugaauccgauggggacaagggaagcgguggcauaaaagggggauuuguacaucagcggauggcaucgaagauuggccguugguacucucgcaccauguccaaaacaaagagaauggguauggggcucuauguuaaguacgacggcgaucccuggacugacucagaggcucuugcccugaguggagugauggucagcauggaggaaccgggcugguacuccuucggguuugaaaucaaagauaagaaaugcgacgugccuuguaucggaauugagauggugcacgaugguggcaagaccacauggcauucugcugccacugcaaucuauugcuugauggggagcggacagcuacugugggacaccgucacaggcguugauauggcccucuga

SEQ ID NO: 158351 - RNA, 1401 nt, Artificial Sequence
  derived and/or modified CDS sequence (opt3) from neuraminidase__InfluenzaB__AHM01485
augcugcccagcaccauccagacacucacucuuuuccugacguccggcgggguguuguuaucucuguacgucucagccagucuaagcuaucuccuguacuccgacauucuucugaaguuuucuccuaccgagauaacagcuccaaucaugccguuggauugcacuaacgcaucgaauguucaagccgugaacagaucagcggcuaaaggaguaacccuccugcugcccgaaccugaguggacauauccaaggcucagcugucccgguaguaccuuccagaaggccuuacugauuuccccucaccgguuuggcgaaaucaaaggaaauucugcaccacuuauuauccgcgagcccuucauagccugcgggccuacugaauguaagcauuuugcuuugacacacuacgcagcccagccaggcgguuauuacaacgggacccgagaggaccguaauaaacugagacaucuaaucagcgugaagcucggaaagauuccgacggucgagaacuccaucuuccacauggcugccuggucaggcagugcgugccaugauggcaaagaauggacuuauauugggguggacggacccgauagcaaugcacugcuuaagaucaaauacggugaggccuacaccgacacauaucacucuuacgcuaagaacauacugaggacucaggaauccgccuguaauugcauuggcggggauuguuauuugaugaucaccgacggaccugcaucaggcguuagcgagugccgguuucucaaaauucgcgaggguagaaucaucaaggaaauuuucccaacagggagggugaagcacaccgaggaauguacgugcggauuugcuaguaacaaaacuauagagugugccugccgggauaaucgcuacacagcgaagcgacccuucgucaaacugaacguggaaaccgacacugccgagaucagauuaaugugcacagagaccuaucuggauacgccuaggccaaaugacggcucuauuaccggccccugugaauccgauggggacaagggaagcgguggcaucaaagggggauuuguacaucaacggauggcaucgaagauaggccguugguacucucgcacaauguccaaaacuaagagaauggguauggggcucuauguuaaguacgacggcgauccguggaccgacucagaggcucuugcccugaguggagugauggucagcauggaggaaccuggcugguacuccuucggguuugaaauuaaagauaagaaaugcgacgugcccuguaucggaaucgagauggugcacgaugguggcaagacaacuuggcauucugcugccaccgcaauuuauugcuugauggggagcggacagcuacugugggacacagucaccggcguugauauggcccucuga

SEQ ID NO: 158352 - RNA, 1401 nt, Artificial Sequence; identical to SEQ ID NO: 158333
  derived and/or modified CDS sequence (opt3) from neuraminidase__InfluenzaB__AHM01496

SEQ ID NO: 158353 - RNA, 1401 nt, Artificial Sequence
  derived and/or modified CDS sequence (opt3) from neuraminidase__InfluenzaB__AHM01507
augcugcccagcaccauccagacacucacucuuuuccugacguccggcgggguguuguuaucucuguacgucucagccagucuaagcuaucuccuguacuccgacauucuucugaaguuuucucaaaccgagauaacagcuccuaucaugccauuggauugcgcaaacgccucgaauguucaggcggugaacagaucagcugccaaaggaguaacucuccugcugccggaacccgaguggaccuauccuaggcucagcuguccagguaguacauuccagaaggcauuacugauuucuccccaccgguuuggcgaaaucaaaggaaauuccgccccucuuauugugcgcgagccauucaucgcuugcgggcccaccgaauguaagcauuuugcauugacucacuacgccgcucagccuggcgguuauuacaacgggacacgagaggaccguaauaaacugagacaucuaauaagcgucaagcucggaaagaucccaaccguggagaacuccauuuuccacauggccgcguggucaggcagugcaugccaugauggcaaagaauggacguauaucgggguugacggaccggauagcaaugcccugcuuaagauuaaauacggugaggcuuacacugacaccuaucacucuuacgccaagaacauccugaggacacaagaauccgcauguaauugcauaggcggggauuguuauuugaugauuacugacggacccgcuucaggcgugagcgagugccgguuucucaaaauccgcgaggguagaauuaucaaggaaaucuucccuaccgggagggucaagcacacagaggaauguaccugcggauuugccaguaacaaaacgauugagugugcgugccgggauaaucgcuacacugccaagcgaccauucgugaaacugaacguagaaacagacaccgcagagauaagauuaaugugcacugagacauaucuggauacccccaggccuaaugacggcucuaucacgggcccaugugaauccgauggggacaagggaagcgguggcauuaaagggggauuuguucaucagcggauggcuucgaagaucggccguugguacucucgcaccauguccaaaacaaagagaauggguauggggcucuaugugaaguacgacggcgaucccuggacugacucagaggcccuugcucugaguggagucauggugagcauagaggaaccgggcugguacuccuucggguuugaaauuaaagauaagaaaugcgacgugccuuguaucggaaucgagaugguccacgaugguggcaagaccacauggcauucugccgcaacugccauuuauugcuugauggggagcggacagcuacugugggacaccguuacaggcguggauauggcucucuga

SEQ ID NO: 158354 - RNA, 1401 nt, Artificial Sequence; identical to SEQ ID NO: 158333
  derived and/or modified CDS sequence (opt3) from neuraminidase__InfluenzaB__AHM01518

SEQ ID NO: 158355 - RNA, 1401 nt, Artificial Sequence
  derived and/or modified CDS sequence (opt3) from neuraminidase__InfluenzaB__AHM01529
augcugcccagcaccauccagacacucacucuuuuccugacguccggcgggguguuguuaucucuguacgucucagccagucuaagcuaucuccuguacuccgacauucuucugaaguuuucucaaaccgagauaacagcuccuaucaugccauuggauugcacuaacgcaucgaauguucaggccgugaacagaucagcggcuaaaggaguaacccuccugcugccggaacccgaguggacauauccuaggcucagcuguccagguaguaccuuccagaaggccuuacugauuucuccccaccgguuuggcgaaaucaaaggaaauuccgcaccucuuauuauccgcgagccauucauagccugcgggcccacugaauguaagcauuuugcuuugacacacuacgcagcccagccuggcgguuauuacaacgggacccgagaggaccguaauaaacugagacaucuaaucagcgugaagcucggaaagauuccaacggucgagaacuccaucuuccacauggcugccuggucaggcagugcgugccaugauggcaaagaauggacuuauauugggguggacggaccggauagcaaugcacugcuuaagaucaaauacggugaggccuacaccgacacauaucacucuuacgcuaagaacauacugaggacucaagaauccgccuguaauugcauuggcggggauuguuauuugaugaucaccgacggacccgcaucaggcguuagcgagugccgguuucucaaaauucgcgaggguagaaucaucaaggaaauucugccuacagggagggugaagcacaccgaggaauguacgugcggauucgcuaguaacaaaacuauagagugugccugccgggauaaucgcuacacagcgaagcgaccauuugucaaauuaaacguggaaaccgacacugccgagaucagacugaugugcacagagaccuaucucgauacgcccaggccuaaugacggcucuauuaccggcccaugugaauccgauggggacaagggaagcgguggcaucaaagggggauucguacaucagcggauggcaucgaagauaggccguugguacucucgcacaauguccaaaacuaagagaauggguauggggcuuuauguuaaguacgacggcgaucccuggaccgacucagaggcucuggccuugaguggagugauggucagcauggaggaaccgggcugguacuccuuuggguucgaaauuaaagauaagaaaugcgacgugccuuguaucggaaucgagauggugcacgaugguggcaagacaacuuggcauucugcugccaccgcaauuuauugccuaauggggagcggacagcugcucugggacacagucaccggcguugauauggcccuguga

SEQ ID NO: 158356 - RNA, 1401 nt, Artificial Sequence; identical to SEQ ID NO: 158223
  derived and/or modified CDS sequence (opt3) from neuraminidase__InfluenzaB__AHM01540

SEQ ID NO: 158357 - RNA, 1401 nt, Artificial Sequence; identical to SEQ ID NO: 158333
  derived and/or modified CDS sequence (opt3) from neuraminidase__InfluenzaB__AHM01551

SEQ ID NO: 158358 - RNA, 1401 nt, Artificial Sequence; identical to SEQ ID NO: 158333
  derived and/or modified CDS sequence (opt3) from neuraminidase__InfluenzaB__AHM01562

SEQ ID NO: 158359 - RNA, 1401 nt, Artificial Sequence; identical to SEQ ID NO: 156840
  derived and/or modified CDS sequence (opt3) from neuraminidase__InfluenzaB__AHZ13597

SEQ ID NO: 158360 - RNA, 1404 nt, Artificial Sequence
  derived and/or modified CDS sequence (opt3) from neuraminidase__InfluenzaB__AHZ36701
augcugcccagcaccauccagaugcucacacuuuuccugacuuccggcgggguguuguuaucucuguacgucucagccagucuaagcuaucuccuguacuccgacauucuucugaaguuuucuccuacggagauaaccgcuccaacaaugccguuggauugcgcaaacgccucgaauguucacgcggugaacagaucagcuacuaaaggaguaaccuuccuccugcugcccgaaccugaguggacauauccaaggcucagcugucccgguaguaccuuucaaaaggccuuacugaucuccccucaucgguucggcgaaacuaaaggaaauucugcaccacuuauuauccgcgagcccuuuauugccugcgggccuaacgaauguaagcacuucgcuuugacacauuacgcagcccagccaggcgguuauuacaaugggacccgaggagaccguaacaaacugagacaccuaaucagcgugaagcucggcaagauaccgacggucgaaaauuccaucuuucauauggcugccuggucaggcagugcgugccacgaugggaaagaguggacuuauauuggaguggacggucccgauaacaaugcacugcuuaagaucaaauacggcgaggccuacaccgacacauaucacagcuacgcuaacaauauucugaggacucaggagucugccuguaacugcaucgggggaaauuguuauuugaugauaaccgauggcuccgcaucagguguuagcgaaugccgguuccucaagauucgcaaagggagaaucauuaaggagaucuuuccuacaggaagggugaagcauaccgaggaauguacgugcggcuucgcuaguaacaaaacuaucgagugugccugccgggacaauucuuacacagcgaagcgcccauuugucaaacugaacguggaaaccgauacugccgagauucgauuaaugugcacagacaccuaucuggauacgcccagaccugacgauggcuccauaaccgggccaugugaaagcaacggagacaaggguucgggcgggaucaaaggaggcuucguacaccagaggauggcaucuaagauuggucggugguacucccguacaaugucaaaaacugagcgcauggggaugggccucuauguuaaguacgacggagaucccuggaccgacagugaugcucuugccuuuagaggcgugauggucagcaugaaggagccggggugguacuccuucggauucgaaaucaaagacaagaaaugcgaugugccuuguauagguauugagauggugcaugacggcgggaaggaaacauggcacucugcugccacugcaaucuauugccugaugggaagcggccaauugcuaugggauaccgucacagguguugacauggcccuguga

SEQ ID NO: 158361 - RNA, 1404 nt, Artificial Sequence
  derived and/or modified CDS sequence (opt3) from neuraminidase__InfluenzaB__AHZ36756
augcugcccagcaccauccagaugcucacacuuuuccugacuuccggcgggguguuguuaucucuguacgucucagccagucuaagcuaucuccuguacuccgacauucuucugaaguuuucuccuacggagauaaccgcuccaacaaugccguuggauugcgcaaacgccucgaauguucacgcggugaacagaucagcuacuaaaggaguaaccuuccuccugcugcccgaaccugaguggacauauccaaggcucagcugucccgguaguaccuuucaaaaggccuuacugaucuccccucaucgguucggcgaaacuaaaggaaauucugcaccacuuauuauccgcgagcccuuuauugccugcgggccuaacgaauguaagcacuucgcuuugacacauuacgcagcccagccaggcgguuauuacaaugggacccgaggagaccguaacaaacugagacaccuaaucagcgugaagcucggcaagauaccgacggucgaaaauuccaucuuucauauggcugccuggucaggcagugcgugccacgaugggaaagaguggacuuauauuggaguggacggucccgauaacaaugcacugcuuaagaucaaauacggcgaggccuacaccgacacauaucacagcuacgcuaacaauauucugaggacucaggagucugccuguaacugcaucgggggaaauuguuauuugaugauaaccgauggcuccgcaucagguguuagcgaaugccgguuccucaagauucgcgaggggagaaucauuaaagagaucuuuccuacaggaagggugaagcauaccgaagaguguacgugcggcuucgcuaguaacaagacuaucgaaugugccugccgggacaauucuuacacagcgaaacgcccauuugucaagcugaacguggagaccgauacugccgaaauucgauuaaugugcacagacaccuaucuggauacgcccagaccugacgauggcuccauaaccgggccaugugagagcaacggagacaaagguucgggcgggaucaagggaggcuucguacaccagaggauggcaucuaaaauuggucggugguacucccguacaaugucaaagacugagcgcauggggaugggccucuauguuaaauacgacggagaucccuggaccgacagugaugcucuugccuuuagaggcgugauggucagcaugaaggaaccggggugguacuccuucggauucgagaucaaggacaaaaagugcgaugugccuuguauagguauugaaauggugcaugacggcgggaaagagacauggcacucugcugccacugcaaucuauugccugaugggaagcggccaauugcuaugggauaccgucacagguguugacauggcccuguga

SEQ ID NO: 158362 - RNA, 1401 nt, Artificial Sequence
  derived and/or modified CDS sequence (opt3) from neuraminidase__InfluenzaB__AHZ36767
augcugcccagcaccauccagacacucacucuuuuccugacguccggcgggguguuguuaucucuguacgucucagccagucuaagcuaucuccuguacuccgacauucuucugaaguuuucuccuaccgagauaacagcuccaacuagaccguuggauugcgcaaacgccucgaauguucaagcggugaacaggucagcuaccaaaggaguaacacuccugcugcccgaaccugaguggaccuauccacggcucagcugucccgguaguacuuuccagaaggccuuacugaucuccccucaccgcuuuggcgaaacaaaaggaaauucugcaccacuuauuauccgagagcccuucauugccugcgggccuaacgaauguaagcauuuugcuuugacccacuacgcagcccagccaggcgguuauuacaaugggacgcguggagacagaaacaaacugaggcaucuaaucagcgugaagcucggcaagauaccgacugucgaaaauuccaucuuccacauggcugccuggucaggcagugcgugccaugaugggaaagaguggaccuauauuggaguggacggucccgauaacaaugcacugcuuaagguuaaauacggcgaggccuacacagacacuuaucacagcuacgcuaacaagauccugcggacccaggagucugccuguaauugcauugggggaaacuguuauuugaugaucacagauggcuccgcaucaggugugagcgaaugccgcuuucucaaaauaagagaggggaggauuaucaaggagauuuucccuaccggacgggucaagcacacggaagaguguacuugcggcuuugcuaguaauaaaacaaucgaaugugccugccgcgacaaccgauacaccgcgaagagaccauucgugaaacugaauguagagacugauacagccgaaaucagguuaaugugcaccgacacguaucuggauacaccccggccuaacgacggcucuauuaccgggccaugugaguccgauggagacaaggguagcggcgggauaaaaggaggcuuuguucaucaacguaugaagucgaaaaucggucgcugguacucuagaacuauguccaagaccgagaggauggggaugggccucuaugugaaguacgacggagaucccugggcagacucagaugcucuugccuucaguggcgucauggugagcaugaaagaaccggggugguacuccuuuggauucgagauuaaggacaaaaagugcgaugugccuuguaucgguauagaaaugguccacgacggcgggaaagagacauggcauucugcugccacugcaauuuauugccugaugggaagcggccaguugcuaugggauaccguuacagguguggacauggcccuguga

SEQ ID NO: 158363 - RNA, 1401 nt, Artificial Sequence
  derived and/or modified CDS sequence (opt3) from neuraminidase__InfluenzaB__AHZ36778
augcugcccagcaccauccagacacucacucuuuuccugacguccggcgggguguuguuaucucuguacgucucagccagucuaagcuaucuccuguacuccgacauucuucugaaguuuccuucuaccgagauaacagcuccaacuaugccguuggauugcgcaaacgccucgaauguucaagcggugaacagaucagcuaccaaaggaguaacacuccugcugcccgaaccugaguggaccuauccaaggcucagcugucccgguaguacuuuccagaaggccuuacugaucuccccucaccgguuuggcgaaacaaaaggaaauucugcaccacuuauuauccgcgagcccuucauugccugcgggccuaaggaauguaaacauuuugcuuugacccacuacgcagcccagccaggcgguuauuacaacgggacgcgaggagaccguaauaagcugagacaucuaaucagcgugaagcucggcaaaauaccgacugucgagaacuccaucuuccacauggcugccuggucaggcagugcgugccaugaugggaaggaguggaccuauauuggaguggacggucccgauaauaacgcacugcuuaaaaucaaguacggcgaagccuacacagacacuuaucacagcuacgcuaauaacauucugaggacccaggagucugccuguaauugcaucgggggaaacuguuauuugaugauaacagauggcuccgcaucagguguuagcgaaugccgguuucucaaaauucgcgaggggagaaucauuaaggagaucuucccuaccggaaggauccaacacacggaagaguguacuugcggcuuugcuaguaauaagacaauugaaugugccugccgggacaacucuuacaccgcgaaacgcccauucgugaagcugaaugucgagacugauacagccgaaauacgauuaaugugcaccaaaacguaucuggacacccccagaccugaggauggcuccaucacagggccaugugagagcaacggagguaagggcucugggggaauuaaaggcgguuuugugcaucagaggauggcaucgaagaucgggcggugguacucccguacuaugucaaaaaccgaacgcaagggcaugggacucuauguaaaguacaacggcgaccccugggcugauagugacgcccuuguuuucagcggggugaugauauccauggaggaaccgggaugguacucuuuugguuucgagauuaaagacaagaaaugcgaugucccuuguaucggcaucgaaauggugcacgacgggggaaaggagacauggcauagcgcugccacugcaauuuauugccugaugggcucaggucaguugcuaugggauaccgugacaggggucaauaugacccuguga

SEQ ID NO: 158364 - RNA, 1401 nt, Artificial Sequence
  derived and/or modified CDS sequence (opt3) from neuraminidase__InfluenzaB__AHZ36789
augcugcccagcaccauccagacacucacucuuuuccugacguccggcgggguguuguuaucucuguacgucucagccagucuaagcuaucuccuguacuccgacauucuucugaaguuuucuccuaccgagauaacagcucaaacuaugccauuggauugcgcaaacgccucgaauguucaggcggugaacagaucagcuaccaaaggaguaacacuccugccgcccgaaccugaguggaccuauccaaggcugagcugucccgguaguacuuuccagaaggcccucuuaaucuccccucaccgguuuggcgaaacaaaaggaaauucugcaccacugauuauccgcgagcccuucauugccugcgggccuaacgaauguaagcauuuugcucuuacccacuacgcagcccagccaggcgguuauuacaaugggacgcgaggagaccguaacaaauugagacaucugaucagcgugaagcuaggcaagauaccgacugucgaaaauuccaucuuccacauggcugccuggucaggcagugcgugccaugaugggaaagaguggaccuauauuggaguggacggucccgauaacaaugcacuccugaagguuaaauacggcgaggccuacacagacacuuaucacagcuacgcuaacaagauccuuaggacccaagagucugccuguaauugcauugggggaaacuguuaucugaugaucacagauggcuccgcaucaggugugagcgaaugccgguuuuugaaaauacgcgaggggagaauuaucaaggagauuuucccuaccggaagggucaagcacacggaagaguguacuugcggcuuugcuaguaauaaaacaaucgaaugugccugccgggacaaccgcuacaccgcgaagcgaccauucgugaaacucaauguagagacugauacagccgaaaucagacugaugugcaccgacacguauuuagauacccccaggccuaacgacggcucuauuacagggccaugugaguccgauggagacaaggguagcggcgggauaaaaggaggcuuuguucaucagcggaugaagucgaaaaucggucguugguacucucgcacuauguccaagaccgagagaauggggaugggccuguaugugaaguacgacggagaucccugggcagacucagaugcucucgccuucaguggcgucauggugagcaugaaagaaccggggugguacuccuuuggauucgagaugaaggacaaaaagugcgaugugccuuguauugguaucgaaaugguccacgacggcgggaaagagacauggcauucugcugccacugcaauauauugccuuaugggaagcggccagcuguugugggauaccguuacagguguggacauggcccuauga

SEQ ID NO: 158365 - RNA, 1401 nt, Artificial Sequence; identical to SEQ ID NO: 158364
  derived and/or modified CDS sequence (opt3) from neuraminidase__InfluenzaB__AHZ36800

SEQ ID NO: 158366 - RNA, 1401 nt, Artificial Sequence
  derived and/or modified CDS sequence (opt3) from neuraminidase__InfluenzaB__AHZ36811
augcugcccagcaccauccagacacucacucuuuuccugacguccggcgggguguuguuaucucuguacgucucagccagucuaagcuaucuccuguacuccgacauucuucugaaguuuucucaaaccgagauaacagcuccuaucaugccauuggauugcacuaacgcaucgaauguucaggccgugaacagaucagcggcuaaaggaguaacccuccugcugccggaacccgaguggacauauccuaggcucagcuguccagguaguaccuuccagaaggccuuacugauuucuccccaccgguuuggcgaaaucaaaggaaauuccgcaccucuuauuauccgcgagccauucauagccugcgggcccacugaauguaagcauuuugcuuugacacacuacgcagcccagccuggcgguuauuacaacgggacccgagaggaccguaauaaacugagacaucuaaucagcgugaagcucggaaagauuccaacggucgagaacuccaucuuccacauggcugccuggucaggcagugcgugccaugauggcaaagaauggacuuauauugggguggacggaccggauagcaaugcacugcuuaagaucaaauacggugaggccuacaccgacacauaucacucuuacgcuaagaacauacugaggacucaagaauccgccuguaauugcauuggcggggauuguuauuugaugaucaccgacggacccgcaucaggcguuagcgagugccgguuucucaaaauucgcgaggguagaaucaucagggaaauuuucccuacagggcgggugaagcacaccgaggaauguacgugcggauuugcuaguaacaagacuauagagugugccugccgcgauaaucgauacacagcgaaaagaccauucgucaagcugaacguggaaaccgacacugccgagaucagguuaaugugcacagagaccuaucuggauacgccccggccuaaugacggcucuauuaccggcccaugugaauccgauggggacaaaggaagcgguggcaucaaagggggauuuguacaucagcguauggcaucgaagauaggccgcugguacucuagaacaauguccaagacuaaaaggauggguauggggcucuauguuaaguacgacggcgaucccuggaccgacucagaggcucuugcccugaguggagugauggucagcauggaggaaccgggcugguacuccuucggguuugaaauuaaggauaaaaagugcgacgugccuuguaucggaaucgagauggugcacgaugguggcaaaacaacuuggcauucugcugccaccgcaauuuauugcuugauggggagcggacagcuacugugggacacagucaccggcguugauauggcccucuga

SEQ ID NO: 158367 - RNA, 1404 nt, Artificial Sequence; identical to SEQ ID NO: 158361
  derived and/or modified CDS sequence (opt3) from neuraminidase__InfluenzaB__AHZ36822

SEQ ID NO: 158368 - RNA, 1401 nt, Artificial Sequence
  derived and/or modified CDS sequence (opt3) from neuraminidase__InfluenzaB__AHZ36833
augcugcccagcaccauccagacacucacucuuuuccugacguccggcgggguguuguuaucucuguacgucucagccagucuaagcuaucuccuguacuccgacauucuucugaaguuuucuccuaccgagauaacagcuccaacuagaccguuggauugcgcaaacgccucgaauguucaagcggugaacaggucagcuaccaaaggaguaacacuccugcugcccgaaccugaguggaccuauccacggcucagcugucccgguaguacuuuccagaaggccuuacugaucuccccucaccgcuuuggcgaaacaaaaggaaauucugcaccacuuauuauccgagagcccuucauugccugcgggccuaacgaauguaagcauuuugcuuugacccacuacgcagcccagccaggcgguuauuacaaugggacgcguggagacagaaacaaacugaggcaucuaaucagcgugaagcucggcaagauaccgacugucgaaaauuccaucuuccacauggcugccuggucaggcagugcgugccaugaugggaaagaguggaccuauauuggaguggacggucccgauaacaaugcacugcuuaagguuaaauacggcgaggccuacacagacacuuaucacagcuacgcuaacaagauccugcggacccaggagucugccuguaauugcauugggggaaacuguuauuugaugaucacagauggcuccgcaucaggugugagcgaaugccgcuuucucaaagucagagaggggaggauaauuaaggagaucuucccuaccggacgggugaagcacacggaagaguguacuugcggcuuugcuaguaauaaaacaauugaaugugccugccgcgacaaccgauacaccgcgaagagaccauucguaaaacugaauguugagacugauacagccgaaaucagguuaaugugcaccgacacguaucuggauacaccccggccuaacgacggcucuaucaccgggccaugugaguccgauggagacaaggguagcggcgggauuaaaggaggcuuugugcaucaacguaugaagucgaaaauaggucgcugguacucuagaacuauguccaagaccgagaggauggggaugggccucuaugucaaguacgacggagaucccugggcagacucagaugcucuugccuucaguggcgugauggugagcaugaaagaaccggggugguacuccuuuggauucgagaucaaggacaaaaagugcgaugucccuuguauugguaucgaaaugguucacgacggcgggaaagagacauggcauucugcugccacugcaauauauugccugaugggaagcggccaguugcuaugggauaccgugacagguguagacauggcccuguga

SEQ ID NO: 158369 - RNA, 1401 nt, Artificial Sequence
  derived and/or modified CDS sequence (opt3) from neuraminidase__InfluenzaB__AHZ36844
augcugcccagcaccauccagacacucacucuuuuccugacguccggcgggguguuguuaucucuguacgucucagccagucuaagcuaucuccuguacuccgacauucuucugaaguuuucuccuaccgagauaacagcuccaacuagaccguuggauugcgcaaacgccucgaauguucaagcggugaacaggucagcuaccaaagaaguaacacuccugcugcccgagccugaauggaccuauccacggcucagcugucccggaaguacuuuccagaaggccuuacugaucuccccucaccgcuuuggugagacaaaaggcaauucugcaccacuuauuauccgagaacccuucauugccugcgggccuaacgaguguaagcauuuugcuuugacccacuacgcagcccagccaggaggcuauuacaaugguacgcguggggacagaaacaaacugaggcaucuaaucagcgugaagcucggaaagauaccgacugucgaaaauuccaucuuccacauggcugccuggucaggcagugcgugccaugauggcaaagaguggaccuauauugggguggacggacccgauaacaaugcacugcuuaagguuaaauacggugaggccuacacagacacuuaucacagcuacgcuaacaagauccugcggacccaggaaucugccuguaauugcauuggcgggaacuguuauuugaugaucacagauggauccgcaucaggcgugagcgagugccgcuuucucaaaauaagagaggguaggauuaucaaggaaauuuucccuaccgggcgggucaagcacacggaggaauguacuugcggauuugcuaguaauaaaacaaucgagugugccugccgcgacaaccgauacaccgcgaagagaccauucgugaaacugaauguagaaacugauacagccgagaucagguuaaugugcaccgacacguaucuggauacaccccggccuaacgacggcucuauuaccggcccaugugaguccgauggggacaagggaagcgguggcauaaaagggggauuuguucaucaacguaugaagucgaaaaucggccgcugguacucuagaacuauguccaagaccgaaaggauggguauggggcucuaugugaaguacgacggcgaucccugggcagacucagaugcucuugccuucaguggagucauggugagcaugaaagagccgggcugguacuccuuuggguucgaaauuaaggacaaaaagugcgaugugccuuguaucggaauagagaugguccacgacgguggcaaagaaacauggcauucugcugccacugcaauuuauugccugauggggagcggacaguugcuaugggauaccguuacaggcguggacauggcccuguga

SEQ ID NO: 158370 - RNA, 1401 nt, Artificial Sequence
  derived and/or modified CDS sequence (opt3) from neuraminidase__InfluenzaB__AHZ36855
augcugcccagcaccauccagacacucacucuuuuccugacguccggcgggguguuguuaucucuguacgucucagccagucuaagcuaucuccuguacuccgacauucuucugaaguuuucuccuaccgagauaacaguucaaacuaugccauuggauugcgcuaacgcaucgaaugugcaggccguaaacagaucagcgaccaaaggagugacacuccugccgcccgaaccugaguggaccuauccaaggcugagcugucccgguaguacuuuccagaaggcucucuuaaucuccccucaccgguuuggcgaaacaaaaggaaauucugccccacugauuauccgcgagcccuucauugcaugcgggccuaacgaauguaagcauuuugcccuuacccacuacgcugcacagccaggcgguuauuacaaugggacgcgaggagaccguaacaaauugagacaucugaucagcgucaagcuaggcaagauaccgacuguggaaaauuccaucuuccacauggccgcuuggucaggcagugccugccaugaugggaaagaguggaccuauauuggaguugacggucccgauaacaaugcgcuccugaaggugaaauacggcgaggcauacacagacacuuaucacagcuacgccaacaagauccuuaggacccaagagucugcuuguaauugcauugggggaaacuguuaucugaugaucacagauggcuccgccucaggugucagcgaaugccgguuuuugaaaauacgcgaggggagaauuaucaaggagauuuucccuaccggaagggugaagcacacggaagaguguacuugcggcuuugcaaguaauaaaacaaucgaaugugcuugccgggacaaccgcuacaccgccaagcgaccauucguaaaacucaauguugagacugauacagcggaaaucagacugaugugcaccgacacguauuuagauacccccaggccuaacgacggcucuauuacagggccaugugaguccgauggagacaaggguagcggcgggauaaaaggaggcuuugugcaucagcggaugaagucgaaaaucggucguugguacucucgcacuauguccaagaccgagagaauggggaugggccuguaugucaaguacgacggagaucccugggccgacucagaugcacucgcuuucaguggcgugauggugagcaugaaagaaccggggugguacuccuuuggauucgagaugaaggacaaaaagugcgaugucccuuguauugguaucgaaaugguucacgacggcgggaaagagacauggcauucugccgcuacugccauauauugccuuaugggaagcggccagcuguugugggauaccgugacagguguagacauggcacuauga

SEQ ID NO: 158371 - RNA, 1404 nt, Artificial Sequence; identical to SEQ ID NO: 158361
  derived and/or modified CDS sequence (opt3) from neuraminidase__InfluenzaB__AHZ36866

SEQ ID NO: 158372 - RNA, 1401 nt, Artificial Sequence
  derived and/or modified CDS sequence (opt3) from neuraminidase__InfluenzaB__AHZ36877
augcugcccagcaccauccagacacucacucuuuuccugacguccggcgggguguuguuaucucuguacgucucagccagucuaagcuaucuccuguacuccgacauucuucugaaguuuucuccuccagagauaaccgcuccgacaaugcccuuggauugcgcaaacgccucgaauguucaagcggugaacagaucagcuacuaaaggaguaacccuccugcugccugaaccagaguggacauaucccaggcucagcuguccugguaguaccuuccagaaggccuuacugaucuccccacaccgguuuggcgaaacuaaaggaaauucugcaccccuuauuauccgcgagccuuucauugccugcgggccaaacgaauguaagcauuuugcuuugacacacuacgcagcccagccgggcgguuauuacaaugggacccgaggagaccguaacaaacugagacaucuaaucagcgugaagcucggcaagauacccacggucgaaaauuccaucuuccacauggcugccuggucaggcagugcgugccaugaugggaaagaguggacuuauauuggaguggacgguccugauaacaaugcacugcuuaagguuaaauacggcgaggccuacaccgacacauaucacagcuacgcuaacaagauccugaggacucaggagucugccuguaauugcauugggggaaacuguuauuugaugaucaccgauggcuccgcaucaggugugagcgaaugccgguuucucaaaauacgcgaggggagaauuaucaaggagauuuucccaacaggaagggucaagcacaccgaagaguguacgugcggcuuugcuaguaauaaaacuaucgaaugugccugccgggacaaccgcuacacagcgaagcgacccuucgugaaacugaauguagagaccgauacugccgaaaucagauuaaugugcacagacaccuaucuggauacgccuaggccaaacgacggcucuauuaccgggcccugugaguccgauggagacaaggguagcggcgggauaaaaggaggcuuuguucaucaacggaugaagucgaaaaucggucguugguacucucgcacaauguccaagacugagagaauggggaugggccucuaugugaaguacgacggagauccgugggcagacucagaugcucuugccuucaguggcgucauggugagcaugaaagaaccugggugguacuccuuuggauucgagauuaaggacaaaaagugcgaugugcccuguaucgguauagaaaugguccacgacggcgggaaagagaccuggcauucugcugccacagcaauuuauugccugaugggaagcggccaguugcuaugggauacuguuaccgguguggacauggcccuguga

SEQ ID NO: 158373 - RNA, 1404 nt, Artificial Sequence; identical to SEQ ID NO: 158361
  derived and/or modified CDS sequence (opt3) from neuraminidase__InfluenzaB__AHZ36888

SEQ ID NO: 158374 - RNA, 1404 nt, Artificial Sequence; identical to SEQ ID NO: 158361
  derived and/or modified CDS sequence (opt3) from neuraminidase__InfluenzaB__AHZ36899

SEQ ID NO: 158375 - RNA, 1404 nt, Artificial Sequence; identical to SEQ ID NO: 158361
  derived and/or modified CDS sequence (opt3) from neuraminidase__InfluenzaB__AHZ36910

SEQ ID NO: 158376 - RNA, 1401 nt, Artificial Sequence; identical to SEQ ID NO: 158363
  derived and/or modified CDS sequence (opt3) from neuraminidase__InfluenzaB__AHZ36921

SEQ ID NO: 158377 - RNA, 1401 nt, Artificial Sequence
  derived and/or modified CDS sequence (opt3) from neuraminidase__InfluenzaB__AHZ36932
augcugcccagcaccauccagacacucacucuuuuccugacguccggcgggguguuguuaucucuguacgucucagccagucuaagcuaucuccuguacuccgacauucuucugaaguuuucuccuaccgagauaacagcucaaacuaugccauuggauugcgcaaacgccucgaauguucaggcggugaacagaucagcuaccaaaggaguaacacuccugccgcccgaaccugaguggaccuauccaaggcugagcugucccgguaguacuuuccagaaggcccucuuaaucuccccucaccgguuuggcgaaacaaaaggaaauucugcaccacugauuauccgcgagcccuucauugccugcgggccuaacgaauguaagcauuuugcucuuacccacuacgcagcccagccaggcgguuauuacaaugggacgcgaggagaccguaacaaauugagacaucugaucagcgugaagcuaggcaagauaccgacugucgaaaauuccaucuuccacauggcugccuggucaggcagugcgugccaugaugggaaagaguggaccuauauuggaguggacggucccgauaacaaugcacuccugaagguuaaauacggcgaggccuacacagacacuuaucacagcuacgcuaacaagauccuuaggacccaagagucugccuguaauugcauugggggaaacuguuaucugaugaucacagauggcuccgcaucaggugugagcgaaugccgguuuuugaaaauacgcgaggggagaauuaucaaggagauuuucccuaccggaagggucaagcacacggaagaguguacuugcggcuuugcuaguaauaaaacaauggaaugugccugccgggacaaccgcuacaccgcgaagcgaccauucgugaaacucaauguagagacugauacagccgaaaucagacugaugugcaccgacacguauuuagauacccccaggccuaacgacggcucuaucacagggccaugugaguccgauggagacaaggguagcggcgggauuaaaggaggcuuuguucaucagcggaugaagucgaaaauaggucguugguacucucgcacuauguccaagaccgagagaauggggaugggccuguaugugaaguacgacggagaucccugggcagacucagaugcucucgccuucaguggcgucauggugagcaugaaagaaccggggugguacuccuuuggauucgagaugaaggacaaaaagugcgaugugccuuguaucgguauugaaaugguccacgacggcgggaaagagacauggcauucugcugccacugcaaucuauugccuuaugggaagcggccagcuguugugggauaccguuacagguguggacauggcccuauga

SEQ ID NO: 158378 - RNA, 1401 nt, Artificial Sequence
  derived and/or modified CDS sequence (opt3) from neuraminidase__InfluenzaB__AHZ36943
augcugcccagcaccauccagacacucacucuuuuccugacguccggcgggguguuguuaucucuguacgucucagccagucuaagcuaucuccuguacuccgacauucuucugaaguuuucuccuaccgagauaacagcuccaacuaugccguuggauugcgcaaacgccucgaauguucaagcggugaacagaucagcuaccaaaggaguaacacuccugcccccugaaccagaguggaccuaucccaggcugagcuguccugguaguacuuuccagaaggcccucuuaaucuccccacaccgguuuggcgaaacaaaaggaaauucugcaccccugauuauccgcgagccuuucauugccugcgggccaaacgaauguaagcauuuugcucuuacccacuacgcagcccagccgggcgguuauuacaaugggacgcgaggagaccguaacaaauugagacaucugaucagcgugaagcuaggcaagauacccacugucgaaaauuccaucuuccacauggcugccuggucaggcagugcgugccaugaugggaaagaguggaccuauauuggaguggacgguccugauaacaaugcacuccugaagguuaaauacggcgaggccuacacagacacuuaucacagcuacgcuaacaagauccuuaggacccaggagucugccuguaauugcauugggggaaacuguuaucugaugaucacagauggcuccgcaucaggugugagcgaaugccgguuuuugaaaauacgcgaggggagaauuaucaaggagauuuucccaaccggaagggucaagcacacggaagaguguacuugcggcuuugcuaguaauaaaacaaucgaaugugccugccgggacaaccgcuacaccgcgaagcgacccuucgugaaacucaauguagagacugauacagccgaaaucagacugaugugcaccgacacguauuuagauaccccuaggccaaacgacggcucuauuacagggcccugugaguccgauggagacaaggguagcggcgggauaaaaggaggcuuuguucaucaacggaugaagucgaaaaucggucguugguacucucgcacuauguccaagaccgagagaauggggaugggccuguaugugaaguacgacggagauccgugggcagacucagaugcucucgccuucaguggcgucauggugagcaugaaagaaccugggugguacuccuuuggauucgagaugaaggacaggaaaugcgaugugcccuguauugguaucgaaaugguccacgacggcgggaaggagacauggcauucugcugccacugcaauauauugccuuaugggaagcggccagcuguugugggauaccguuacagguguggacauggcccuauga

SEQ ID NO: 158379 - RNA, 1404 nt, Artificial Sequence; identical to SEQ ID NO: 158361
  derived and/or modified CDS sequence (opt3) from neuraminidase__InfluenzaB__AHZ36954

SEQ ID NO: 158380 - RNA, 1401 nt, Artificial Sequence
  derived and/or modified CDS sequence (opt3) from neuraminidase__InfluenzaB__AHZ36965
augcugcccagcaccauccagacacucacucuuuuccugacguccggcgggguguuguuaucucuguacgucucagccagucuaagcuaucuccuguacuccgacauucuucugaaguuuucuccuccagagauaaacgcuccgaccaugcccuuggauugcgcaaaugccucgaacguucaagcggugaauagaucagcuacaaaaggaguaacucuccugcugccugaaccagaguggaccuaucccaggcucagcuguccugguaguacauuccagaaggccuuacugaucuccccacaccgguuuggcgaaaccaaagggaacucugcaccccuuauuauccgcgagccuuucauugccugcggaccaaaugaauguaagcauuuugcuuugacucacuacgcagcccagccgggcgguuauuacaacgggacacgaggagaccguaauaaacugagacaucuaaucagcgugaagcucggcaagauacccaccgucgagaacuccaucuuccacauggcugccuggucaggcagugcgugccaugaugggaaagaguggacguauauuggaguggacgguccugauaauaacgcacugcuuaagguuaaauacggcgaagccuacacugacaccuaucacagcuacgcuaauaagauccugaggacacaggagucugccuguaacugcauugggggaaauuguuauuugaugaucacugauggcuccgcaucaggugugagcgaaugccgguuucucaaaauacgcgaggggagaauuaucaaggagauuuucccaaccggaagggucaagcacacagaagaguguaccugcggcuuugcuaguaacaaaacgaucgaaugugccugccgggacaaucgcuacacugcgaagcgacccuucgugaaacugaacguagagacagauaccgccgaaaucagauuaaugugcacugacacauaucuggauaccccuaggccaaacgacggcucuauuacggggcccugugaguccgauggagacaaggguagcggcgggauaaaaggaggcuuuguucaucaacggaugaagucgaaaaucggucguugguacucucgcaccauguccaagacagagagaauggggaugggccucuaugugaaguacgacggagauccgugggcagacucagaugcucuugccuucaguggcgucauggugagcaugaaagaaccugggugguacuccuuuggauucgagauuaaggacaaaaagugcgaugugcccuguaucgguauagaaaugguccacgacggcgggaaagagacuuggcauucugcugccaccgcaauuuauugccugaugggaagcggccaguugcuaugggauacaguuacugguguggacauggcccuguga

SEQ ID NO: 158381 - RNA, 1404 nt, Artificial Sequence; identical to SEQ ID NO: 158361
  derived and/or modified CDS sequence (opt3) from neuraminidase__InfluenzaB__AHZ36976

SEQ ID NO: 158382 - RNA, 1404 nt, Artificial Sequence; identical to SEQ ID NO: 158361
  derived and/or modified CDS sequence (opt3) from neuraminidase__InfluenzaB__AHZ36987

SEQ ID NO: 158383 - RNA, 1401 nt, Artificial Sequence; identical to SEQ ID NO: 158364
  derived and/or modified CDS sequence (opt3) from neuraminidase__InfluenzaB__AHZ36998

SEQ ID NO: 158384 - RNA, 1401 nt, Artificial Sequence
  derived and/or modified CDS sequence (opt3) from neuraminidase__InfluenzaB__AHZ37009
augcugcccagcaccauccagacacucacucuuuuccugacguugggcgggguguuacugucccuauacgucucugccucacucaguuaucugcuuuacagcgacauucuguugaaguuuuccccuaccgagauaacagcuccaacuaugccgcucggaugcgcaaacgccucuaauguucaagcggugaacagaucggcuaccaaagguguaacacugcugcuccccgaaccugaguggaccuauccaagguuaucaugucccggcagcacuuuccagaaggcccugcuuaucaguccucaccgguuuggggaaacaaaaggaaauuccgcaccauugauuauccgcgagcccuucauugccugcggcccuaacgaauguaagcauuuugcucugacccacuacgcagcccagccagguggguauuacaauggaacgcgaggcgaucguaacaaacuaagacaucucaucucugugaagcugggcaagauaccgacugucgagaauagcaucuuccacauggcugccugguccgggucagcgugccaugacggaaaagaguggaccuauauugguguggauggccccgacaacaaugcacuucugaagguuaaauacggggaagccuacacagauacuuaucacaguuacgcuaacaagaucuugaggacccaggagagcgccuguaauugcauuggaggcaacuguuaucucaugaucacagacgguucugcauccggggugucagaaugccgguuucugaaaauacgcgagggaagaauuaucaaggagauuuucccuaccggcagggucaagcacacggaagaguguacuugcggcuuugcuagcaauaaaacaaucgaaugugccugccgggauaaccgcuacaccgcgaagcgaccauucgugaaauuaaauguagaggccgacacugcagaaaucagacugaugugcacagauaccuaucucgacacgcccaggccuaacgaugggaguauuaccggaccaugugagucugacggugauaagggcuccgggggaauaaaaggcgguuuuguucaucaacggaugaaaagcaagaucgggcguugguacucgcgcacaaugucuaagacugagagaaugggcaugggacuuuaugugaaguacgacggcgaccccugggcugauuccgacgcccuggcuuucucaggggucauggugaguaugaaagaaccgggaugguacagcuuugguuucgagauuaaggauaaaaagugcgacgugccuuguaucggcauagaaaugguccacgaugggggaaaagagaccuggcauuccgccgcaacagccauuuauugcuugaugggcucuggucagcuacugugggacacuguuaccgggguggauauggcucucuga

SEQ ID NO: 158385 - RNA, 1401 nt, Artificial Sequence; identical to SEQ ID NO: 158362
  derived and/or modified CDS sequence (opt3) from neuraminidase__InfluenzaB__AHZ37020

SEQ ID NO: 158386 - RNA, 1401 nt, Artificial Sequence; identical to SEQ ID NO: 158364
  derived and/or modified CDS sequence (opt3) from neuraminidase__InfluenzaB__AHZ37031

SEQ ID NO: 158387 - RNA, 1401 nt, Artificial Sequence; identical to SEQ ID NO: 158362
  derived and/or modified CDS sequence (opt3) from neuraminidase__InfluenzaB__AHZ37042

SEQ ID NO: 158388 - RNA, 1401 nt, Artificial Sequence; identical to SEQ ID NO: 158364
  derived and/or modified CDS sequence (opt3) from neuraminidase__InfluenzaB__AHZ37064

SEQ ID NO: 158389 - RNA, 1401 nt, Artificial Sequence; identical to SEQ ID NO: 158362
  derived and/or modified CDS sequence (opt3) from neuraminidase__InfluenzaB__AHZ37075

SEQ ID NO: 158390 - RNA, 1401 nt, Artificial Sequence; identical to SEQ ID NO: 158362
  derived and/or modified CDS sequence (opt3) from neuraminidase__InfluenzaB__AHZ37086

SEQ ID NO: 158391 - RNA, 1401 nt, Artificial Sequence
  derived and/or modified CDS sequence (opt3) from neuraminidase__InfluenzaB__AHZ37097
augcugcccagcaccauccagacacucacucuuuuccugacguccggcgggguguuguuaucucuguacgucucagccagucuaagcuaucuccuguacuccgacauucuucugaaguuuucuccuaccgagauaacagcuccaacuaugccguuggauugcgcaaacgccucgaauguucaagcggugaacagaucagcuaccaaaggaguaacacuccugcccccugaaccagaguggaccuaucccaggcugagcuguccugguaguacuuuccagaaggcccucuuaaucuccccacaccgguuuggcgaaacaaaaggaaauucugcaccccugauuauccgcgagccuuucauugccugcgggccaaacgaauguaagcauuuugcucuuacccacuacgcagcccagccgggcgguuauuacaaugggacgcgaggagaccguaacaaauugagacaucugaucagcgugaagcuaggcaagauacccacugucgaaaauuccaucuuccacauggcugccuggucaggcagugcgugccaugaugggaaagaguggaccuauauuggaguggacgguccugauaacaaugcacuccugaagguuaaauacggcgaggccuacacagacacuuaucacagcuacgcuaacaagauccuuaggacccaggagucugccuguaauugcauugggggaaacuguuaucugaugaucacagauggcuccgcaucaggugugagcgaaugccgguuuuugaaaauacgcgaggggagaauuaucaaggagauuuucccaaccggaagggucaagcacacggaagaguguacuugcggcuuugcuaguaauaaaacaaucgaaugugccugccgggacaaccgcuacaccgcgaagcgacccuucgugaaacucaauguagagacugauacagccgaaaucagacugaugugcaccgacacguauuuagauaccccuaggccaaacgacggcucuauuacagggcccugugaguccgauggagacaaggguagcggcgggauaaaaggaggcuuuguucaucaacggaugaagucgaaaaucggucguugguacucucgcacuauguccaagaccgagagaauggggaugggccuguaugugaaguacgacggagauccgugggcagacucagaugcucucgccuucaguggcgucauggugagcaugaaagaaccugggugguacuccuuuggauucgagaugaaggacaaaaagugcgaugugcccuguauugguaucgaaaugguccacgacggcgggaaagagacauggcauucugcugccacugcaauauauugccuuaugggaagcggccagcuguugugggauaccguuacagguguggacauggcccuauga

SEQ ID NO: 158392 - RNA, 1401 nt, Artificial Sequence; identical to SEQ ID NO: 158362
  derived and/or modified CDS sequence (opt3) from neuraminidase__InfluenzaB__AHZ37108

SEQ ID NO: 158393 - RNA, 1401 nt, Artificial Sequence
  derived and/or modified CDS sequence (opt3) from neuraminidase__InfluenzaB__AHZ41774
augcugcccagcaccauccagaugcucacacuuuuccugacuuccggcgggguguuguuaucucuguacgucucagccagucuaagcuaucuccuguacuccgacauucuucugaaguuuucuccuacggagauaaccgcuccaacaaugccguuggauugcgcaaacgccucgaauguucacgcggugaacagaucagcuacuaaaggaguaaccuuccuccugcccgaaccugaguggacauauccaaggcugagcugucccgguaguaccuuucaaaaggcccucuuaaucuccccucaucgguucggcgaaacuaaaggaaauucugcaccacugauuauccgcgagcccuuuauugccugcgggagcaacgaaugucgacacuucgcucuuacacauuacgcagcccagccuggcgguuauuacaaugggacccguggagacagaaacaaguugaggcaccugaucuccgugaaacuaggcaagauaccaacggucgaaaauucaaucuuucauauggcugccuggaguggcagcgcgugccacgaugggaaggaguggacuuauauuggaguggacgguccggauaacaaugcacuccugaaaaucaaguacggcgaggccuacaccgacacauaucacucuuacgcuaacaauauucuucggacucaggaguccgccuguaacugcaucgggggaaauuguuaucugaugauaaccgauggcucagcaagcgguguuagugaaugccgcuucuugaaaauuagagaggggaggaucauuaaggagaucuuucccacaggacgggugaaacauaccgaagaguguacgugcggcuucgcuucuaacaagacuaucgaaugugccugccgcgacaauuccuacacagcgaagcgaccuuuugucaaacucaacguggagaccgauacugccgaaauuagacugaugugcacagacaccuauuuagauacgccaaggcccgacgauggcagcauaaccgggccuugugagucgaacggagacaaggguucuggcgggaucaaaggaggcuucguacaccagcggauggcauccaagauuggucguugguacucacgcacaaugaguaaaacugagagaaaggggaugggccuguauguuaaauacgacggagauccauggaccgacaaugaugcucucgccuuuaggggcgugauggucagcaugaaggaacccgggugguacuccuucggauucgagaucaaggacaaaaagugcgaugugccguguauagguauugaaauggugcaugacggcgggaaagagacauggcacucugcugccacugcaaucuauugccuuaugggaagcggccaacuguugugggauaccgucacagguguugacauggcccuauga

SEQ ID NO: 158394 - RNA, 1401 nt, Artificial Sequence; identical to SEQ ID NO: 157004
  derived and/or modified CDS sequence (opt3) from neuraminidase__InfluenzaB__AHZ41785

SEQ ID NO: 158395 - RNA, 1401 nt, Artificial Sequence; identical to SEQ ID NO: 157004
  derived and/or modified CDS sequence (opt3) from neuraminidase__InfluenzaB__AHZ41796

SEQ ID NO: 158396 - RNA, 1401 nt, Artificial Sequence
  derived and/or modified CDS sequence (opt3) from neuraminidase__InfluenzaB__AHZ41807
augcugcccagcaccauccagaugcucacacuuuuccugacuuccggcgggguguuguuaucucuguacgucucagccagucuaagcuaucuccuguacuccgacauucuucugaaguuuucuccuacggagauaaccgcuccaacaaugccguuggauugcgcaaacgccucgaauguucacgcggugaacagaucagcuacuaaaggaguaaccuuccuccugcccgaaccugaguggacauauccaaggcugagcugucccgguaguaccuuucaaaaggcccucuuaaucuccccucaucgguucggcgaaacuaaaggaaauucugcaccacugauuauccgcgagcccuuuauugccugcgggccuaacgaauguaagcacuucgcucuuacacauuacgcagcccagccaggcgguuauuacaaugggacccgaggagaccguaacaaauugagacaccugaucagcgugaagcuaggcaagauaccgacggucgaaaauuccaucuuucauauggcugccuggucaggcagugcgugccacgaugggaaagaguggacuuauauuggaguggacggucccgauaacaaugcacuccugaagaucaaauacggcgaggccuacaccgacacauaucacagcuacgcuaacaauauucuuaggacucaggagucugccuguaacugcaucgaagggaauuguuaucugaugauaaccgauggauccgcaucaggcguuagcgagugccgguucuugaagauucgcgaggguagaaucauuaaagaaaucuuuccuacagggagggugaagcauaccgaggaauguacgugcggauucgcuaguaacaagacuaucgagugugccugccgggacaauucuuacacagcgaaacgcccauuugucaagcucaacguggaaaccgauacugccgagauucgacugaugugcacagacaccuauuuagauacgcccagaccugacgauggcuccauaaccggcccaugugagagcaacggggacaaaggaucggguggcaucaaagggggauucguacaccagaggauggcaucuaagauuggccggugguacucccguacaaugucaaagacugaacgcaaagguauggggcuguauguuaaguacgacggcgaucccuggaccgacagugaugcucucgccuuuagaggagugauggucagcaugaaggagccgggcugguacuccuucggguucgaaaucaaagacaagaaaugcgaugugccuuguauaggaauugagauggugcaugacgguggcaaggaaacauggcacucugcugccacugcaaucuauugccuuauggggagcggacaacuguugugggauaccgucacaggcguugacauggcccuauga

SEQ ID NO: 158397 - RNA, 1401 nt, Artificial Sequence
  derived and/or modified CDS sequence (opt3) from neuraminidase__InfluenzaB__AHZ41818
augcugcccagcaccauccagacacucacucuuuuccugacguccggcgggguguuguuaucucuguacgucucagccagucuaagcuaucuccuguacuccgacauucuucugaaguuuucuccuaccgagauaacagcuccaacuaugccguuggauugcgcaaacgccucgaauguucaagcggugaacagaucagcuaccaaaggaguaacacuccugcugcccgaaccugaguggaccuauccaaggcucagcugucccgguaguacuuuccagaaggccuuacugaucuccccucaccgguuuggcgaaacaaaaggaaauucugcaccacuuauuauccgcgagcccuucauugccugcgggccuaacgaauguaagcauuuugcuuugacccacuacgcagcccagccaggcgguuauuacaaugggacgcgaggagaccguaacaaacugagacaucuaaucagcgugaagcucggcaagauaccgacugucgaaaauuccaucuuccacauggcugccuggucaggcagugcgugccaugaugggaaagaguggaccuauauuggaguggacggucccgauaacaaugcacugcuuaagguuaaauacggcgaggccuacacagacacuuaucacagcuacgcuaacaagauccugaggacccaggagucugccuguaauugcauugggggaaacuguuauuugauggugacagauggcuccgcaucaggugucagcgaaugccgguuucucaaaauccgcgaggggagaauaauuaaggagaucuucccuaccggaagggugaagcacacggaagaguguacuugcggcuuugcuaguaauaaaacaauugaaugugccugccgggacaacucuuacaccgcgaagcgcccauucguaaaacugaauguugagacugauacagccgaaauccgauuaaugugcaccgacacguaucuggauacccccagaccugacgauggcuccaucacagggccaugugagagcaacggagacaaggguucgggcgggauuaaaggaggcuuugugcaucaaaggauggagucuaagauaggucggugguacucccguacuaugucaaaaaccgaacgcauggggaugggccucuaugucaaguacgacggagaucccugggcagacagugaugcucuuguguucagcggcgugauggucuccaugaaggagccggggugguacucuuuuggauucgaaaucaaagacaagaaaugcgauguuccuuguauugguaucgagauggugcacgacggcgggaaggaaacauggcauagcgccgcuacugccauauauugccugaugggaucaggccaguugcuaugggauaccguaacaggugugaacauggcacuguga

SEQ ID NO: 158398 - RNA, 1401 nt, Artificial Sequence; identical to SEQ ID NO: 157004
  derived and/or modified CDS sequence (opt3) from neuraminidase__InfluenzaB__AHZ41829

SEQ ID NO: 158399 - RNA, 1401 nt, Artificial Sequence
  derived and/or modified CDS sequence (opt3) from neuraminidase__InfluenzaB__AHZ41840
augcugcccagcaccauccagaugcucacacuuuuccugacuuccggcgggguguuguuaucucuguacgucucagccagucuaagcuaucuccuguacuccgacauucuucugaaguuuucuccuacggagauaaccgcuccaacaaugccguuggauugcgcaaacgccucgaauguucacgcggugaacagaucagcuacuaaaggaguaaccuuccuccugcccgaaccugaguggacauauccaaggcugagcugucccgguaguaccuuucaaaaggcccucuuaaucuccccucaucgguucggcgaaacuaaaggaaauucugcaccacugauuauccgcgagcccuuuauugccugcgggccuaacgaaugucgacacuucgcucuuacacauuacgcagcccagccaggcgguuauuacaaugggacccguggagacagaaacaaguugaggcaccugaucagcgugaaacuaggcaagauaccgacggucgaaaauuccaucuuucauauggcugccuggucaggcagugcgugccacgaugggaaggaguggacuuauauuggaguggacggucccgauaacaaugcacuccugaaaaucaaguacggcgaggccuacaccgacacauaucacagcuacgcuaacaauauucuucggacucaggagucugccuguaacugcaucgggggaaauuguuaucugaugauaaccgauggcuccgcaucagguguuagcgaaugccgcuucuugaaaauuagagaggggaggaucauuaaggagaucuuuccuacaggacgggugaaacauaccgaagaguguacgugcggcuucgcuaguaacaagacuaucgaaugugccugccgcgacaauucuuacacagcgaagcgaccauuugucaaacucaacguggagaccgauacugccgaaauuagacugaugugcacagacaccuauuuagauacgcccaggccugacgauggcuccauaaccgggccaugugagagcaacggagacaaggguucgggcgggaucaaaggaggcuucguacaccagcggauggcaucuaagauuggucguugguacucccgcacaaugucaaaaacugagagaaaggggaugggccuguauguuaaauacgacggagaucccuggaccgacagugaugcucucgccuuuaggggcgugauggucagcaugaaggaaccggggugguacuccuucggauucgagaucaaggacaaaaagugcgaugugccuuguauagguauugaaauggugcaugacggcgggaaagagacauggcacucugcugccacugcaaucuauugccuuaugggaagcggccaacuguugugggauaccgucacagguguugacauggcccuauga

SEQ ID NO: 158400 - RNA, 1401 nt, Artificial Sequence; identical to SEQ ID NO: 157004
  derived and/or modified CDS sequence (opt3) from neuraminidase__InfluenzaB__AHZ41851

SEQ ID NO: 158401 - RNA, 1401 nt, Artificial Sequence; identical to SEQ ID NO: 158250
  derived and/or modified CDS sequence (opt3) from neuraminidase__InfluenzaB__AHZ41862

SEQ ID NO: 158402 - RNA, 1401 nt, Artificial Sequence
  derived and/or modified CDS sequence (opt3) from neuraminidase__InfluenzaB__AHZ41873
augcugcccagcaccauccagacacucacucuuuuccugacguccggcgggguguuguuaucucuguacgucucagccagucuaagcuaucuccuguacuccgacauucuucugaaguuuucuccuaccgagauaacagcuccaacuaugccguuggauugcgcaaacgccucgaaugcgcaagcuguuaacagaucagccaccaaaggagugacacuccugcugcccgaaccugaguggaccuauccaaggcucagcugucccgguaguacuuuccagaaggcauuacugaucuccccucaccgguuuggcgaaacaaaaggaaauucugccccacuuauuauccgcgagcccuucauugcuugcgggccuaacgaauguaagcauuuugcauugacccacuacgccgcucagccaggcgguuauuacaaugggacgcgaggagaccguaacaaacugagacaucuaaucagcguaaagcucggcaagauaccgacuguggaaaauuccaucuuccacauggccgcguggucaggcagugcaugccaugaugggaaagaguggaccuauauuggagucgacggucccgauaacaaugcccugcuuaaggugaaauacggcgaggcuuacacagacacuuaucacagcuacgccaacaagauccugaggacccaggagucugcauguaauugcauugggggaaacuguuauuugaugaucacagauggcuccgcuucagguguuagcgaaugccgguuucucaaaauacgcgaggggagaauuaucaaggagauuuucccuaccggaagggugaagcacacggaagaguguacuugcggcuuugccaguaauaaaacaaucgaaugugcgugccgggacaaccgcuacaccgccaagcgaccauucgucaaacugaauguggagacugauacagcagaaaucagauuaaugugcaccgacacguaucuggauacccccaggccuaacgacggcucuauuacagggccaugugaguccgauggagacaaggguagcggcgggauaaaaggaggcuuuguacaucaacggaugaagucgaaaaucggucguugguacucucgcacuauguccaagaccgagagaauggggaugggccucuauguuaaguacgacggagaucccugggcugacucagaugcccuuacauucaguggcgugauggucagcaugaaagaaccggggugguacuccuuuggauucgagauuaaggacaaaaagugcgaugugccuuguaucgguauagaaauggugcacgacggcgggaaagagacuuggcauucugcugccaccgcaauuuauugccugaugggaagcggccaguugcuaugggauacagucaccgguguugacauggcccuguga

SEQ ID NO: 158403 - RNA, 1401 nt, Artificial Sequence; identical to SEQ ID NO: 156840
  derived and/or modified CDS sequence (opt3) from neuraminidase__InfluenzaB__AIL94981

SEQ ID NO: 158404 - RNA, 1401 nt, Artificial Sequence; identical to SEQ ID NO: 156840
  derived and/or modified CDS sequence (opt3) from neuraminidase__InfluenzaB__AIL94992

SEQ ID NO: 158405 - RNA, 1401 nt, Artificial Sequence; identical to SEQ ID NO: 156865
  derived and/or modified CDS sequence (opt3) from neuraminidase__InfluenzaB__AIL95003

SEQ ID NO: 158406 - RNA, 1401 nt, Artificial Sequence
  derived and/or modified CDS sequence (opt3) from neuraminidase__InfluenzaB__AIL95014
augcugcccagcaccauccagacacucacucuuuuccugacguccggcgggguguuguuaucucuguacgucucagccagucuaagcuaucuccuguacuccgacauucuucugaaguuuucucaaaccgagauaacagcuccuaucaugccauuggauugcgcaaacgccucgaauguucaggcggugaacagaucagcugccaaaggaguaacucuccugcugccggaacccgaguggaccuauccuaggcucagcuguccagguaguacauuccagaaggcauuacugauuucuccccaccgguuuggcgaaaccaaaggaaauuccgccccucuuaucauucgcgagccauucaucgcuugcgggcccacugaauguaagcauuuugcauugacacacuacgccgcucagccuggcgguuauuacaacgggacccgagaggaccguaauaaacugagacaucuaauaagcgugaagcucggaaagaucccaacggucgagaacuccauuuuccacauggccgcguggucaggcagugcaugccaugauggcaaagaauggacuuauaucgggguggacggaccggauagcaaugcccugcuuaagauuaaauacggugaggcuuacaccgacacauaucacucuuacgccaagaacauccugaggacucaagaauccgcauguaauugcauaggcggggauuguuauuugaugauuaccgacggacccgcuucaggcguuagcgagugccgguuucucaaaauccgcgaggguagaauuaucaaggaaaucuucccuacagggagggugaagcacaccgaggaauguacgugcggauuugccaguaacaaaacuauugagugugcgugccgggauaauucuuacacagccaagcgcccauucgucaaacugaacguggaaaccgacacugcagagauacgauuaaugugcacagagaccuaucuggauacgcccagaccuaaugacggcuccaucaccggcccaugugaaagcgauggggacaagggaucggguggcauuaaagggggauuuguacaucagaggauggcuucuaagaucggccggugguacucccguacaaugucaaaaacuaagcgcauggguauggggcucuauguuaaguacgacggcgaucccuggaccgacagugaggcccuugcucugagcggagugauggucuccauggaggaaccgggcugguacucuuucggguuugaaauaaaagauaagaaaugcgacgugccuuguauuggaaucgagauggugcacgaugguggcaagacaacuuggcauagcgccgcaaccgccaucuauugcuugauggggucaggacagcuacugugggacacagucaccggcguugauaugacucucuga

SEQ ID NO: 158407 - RNA, 1401 nt, Artificial Sequence; identical to SEQ ID NO: 156865
  derived and/or modified CDS sequence (opt3) from neuraminidase__InfluenzaB__AIL95025

SEQ ID NO: 158408 - RNA, 1401 nt, Artificial Sequence
  derived and/or modified CDS sequence (opt3) from neuraminidase__InfluenzaB__AIL95036
augcugagcuccaccauccagacacucacucuuuuccugacgucuggcgggguguuguuaucacuguacgucagugccagccuauccuaucuccuguacucugacauucuucugaaguuuucgcccaaagagauaaccgcuccuacaaugccauuggauugcgcaaacgccucaaauguucaagcggugaaccacagcgcuacuaagggaguaacccuccugcugccggaacccgaguggacauauccuagacucaguuguccagguuccaccuuccagaaagccuuacugaucucuccccauagguuuggcgaaacuaaggggaauagcgcaccucuuauuauccgggagccauucauugccugcggacccaacgaauguaaacacuuugcuuugacacauuacgcagcccagccuggcgguuauuacaaugggacccgcggagaccgaaacaagcugcgucaccuaaucuccgugaagcucggcaaaauaccaacggucgaaaauucaaucuuccauauggcugccuggaguggcagcgcgugccacgaugggaaggaguggacuuauauuggaguggacgguccggauaacaaugcacugcuuaaaguuaaguacggcgaggccuacaccgacacauaucacucuuacgcuaacaaaauccugagaacucaggaguccgccuguaauugcauugggggaaacuguuauuugaugaucaccgauggcucagcaagcggugugagugaaugcagguuucucaagauacgggaggggcgcauuaucaaggagauuuuccccacaggaagagucaaacauaccgaagaguguacgugcggcuuugcuucuaauaagacuaucgaaugugccugcagggacaacuccuacacagcgaaacggccuuucgugaagcugaauguagagaccgauacugccgaaauccgcuuaaugugcacagacaccuaucuggauacgccacgacccgacgauggcagcauuaccgggccuugugagucgaacggagacaaagguucuggcgggauaaagggaggcuuuguucaccaaagaauggaguccaaaaucgguaggugguacucacggacaaugaguaagacugaacguauggggaugggccucuaugugaaguacgacggagauccaugggcagacagcgaugcucuugccuucuccggcgucauggugucuaugaaagagcccgggugguacagcuuuggauucgaaauuaaggacaaaaagugcgaugugccguguaucgguauagagaugguccaugacggcgggaaagaaaccuggcacucagcugccacagcaauuuauugccugaugggaaguggccaguugcuaugggauacuguuaccgguguggacauggcccuguga

SEQ ID NO: 158409 - RNA, 1401 nt, Artificial Sequence; identical to SEQ ID NO: 156865
  derived and/or modified CDS sequence (opt3) from neuraminidase__InfluenzaB__AIL95047

SEQ ID NO: 158410 - RNA, 1401 nt, Artificial Sequence; identical to SEQ ID NO: 156974
  derived and/or modified CDS sequence (opt3) from neuraminidase__InfluenzaB__AIL95058

SEQ ID NO: 158411 - RNA, 1401 nt, Artificial Sequence; identical to SEQ ID NO: 156923
  derived and/or modified CDS sequence (opt3) from neuraminidase__InfluenzaB__AIL95069

SEQ ID NO: 158412 - RNA, 1401 nt, Artificial Sequence
  derived and/or modified CDS sequence (opt3) from neuraminidase__InfluenzaB__AIL95080
augcugcccagcaccauccagacacucacucuuuuccugacguccggcgggguguuguuaucucuguacgucucagccagucuaagcuaucuccuguacuccgacauucuucugaaguuuucuccuaaagagauaaccgcuccaacaaugccguuggauugcgcaaacgccucgaauguucaagcggugaaccacucagcuacuaagggaguaacccuccugcugcccgaaccugaguggacauauccaagacucagcugucccgguaguaccuuccagaaagccuuacugaucuccccucauagguuuggcgaaacuaagggaaauucugcaccacuuauuauccgggagcccuucauugccugcgggccuaacgaauguaaacacuuugcuuugacacauuacgcagcccagccaggcgguuauuacaaugggacccgcggagaccgaaacaagcugcgucaccuaaucagcgugaagcucggcaaaauaccgacggucgaaaauuccaucuuccauauggcugccuggucaggcagugcgugcaacgaugggaaggaguggacuuauauuggaguggacggucccgauaauaacgcacugcuuaaaguuaaguacggcgaggccuacaccgacacauaucacagcuacgcuaauaaaauccugagaacucaggagucugccuguaacugcauugggggaaauuguuauuugaugaucaccgauggcuccgcaucaggugugagcgaaugcagguuucucaagauacgggaggggcgcauuaucaaggagauuuucccuacaggaagagucaaacacaccgaagaguguacgugcggcuuugcuaguaacaagacuaucgaaugugccugcagggacaauucuuacacagcgaaacggccauucgugaagcugaacguagagaccgauacugccgaaauccgcuuaaugugcacagacaccuaucuggauacgccccgaccugacgauggcuccauuaccgggccaugugagagcaacggagacaaagguucgggcgggauaaagggaggcuuuguucaucaaagaauggagucuaaaaucgguaggugguacucccggacaaugucaaagacugaacguauggggaugggccucuaugugaaguacgacggagaucccugggcagacagugaugcucuugccuucagcggcgucaugguguccaugaaagagccggggugguacucuuuuggauucgaaauuaaggacaaaaagugcgaugugccuuguaucgguauagagaugguccacgacggcgggaaagaaaccuggcauagcgcugccacagcaauuuauugccugaugggaucaggccaguugcuaugggauacuguuaccgguguggacauggcccuguga

SEQ ID NO: 158413 - RNA, 1401 nt, Artificial Sequence; identical to SEQ ID NO: 156923
  derived and/or modified CDS sequence (opt3) from neuraminidase__InfluenzaB__AIL95091

SEQ ID NO: 158414 - RNA, 1401 nt, Artificial Sequence; identical to SEQ ID NO: 156865
  derived and/or modified CDS sequence (opt3) from neuraminidase__InfluenzaB__AIL95102

SEQ ID NO: 158415 - RNA, 1401 nt, Artificial Sequence
  derived and/or modified CDS sequence (opt3) from neuraminidase__InfluenzaB__AIL95113
augcugcccagcaccauccagacacucacucuuuuccugacguccggcgggguguuguuaucucuguacgucucagccagucuaagcuaucuccuguacuccgacauucuucugaaguuuucuccuaccggaauaacagcuccaacuaugccguuggauugcgcaaacgccucgaauguucaagcggugaacagaucagcuaccaaagguguaacacuccugcccccugagccagaauggaccuaucccaggcugagcuguccuggcaguacuuuccagaaggcccucuuaaucuccccacaccgguuuggggagacaaaaggaaauucugcaccccugauuauccgcgaaccuuucauugccugcggcccaaacgaguguaagcauuuugcucuuacccacuacgcagcccagccggguggguauuacaauggaacgcgaggcgaccguaacaaauugagacaucugaucagcgugaagcuaggcaagauacccacugucgaaaauuccaucuuccacauggcugccuggucagggagugcgugccaugauggaaaagaguggaccuauauugguguggacggcccugauaacaaugcacuccugaagguuaaauacggggaggccuacacagacacuuaucacagcuacgcuaacaagauccuuaggacccaggaaucugccuguaauugcauuggaggcaacuguuaucugaugaucacagaugguuccgcaucaggggugagcgagugccgguuuuugaaaauacgcgaaggaagaauuaucaaggagauuuucccaaccggcagggucaagcacacggaggaauguacuugcggcuuugcuaguaauaaaacaaucgagugugccugccgggacaaccgcuacaccgcgaagcgacccuucgugaaacucaauguagaaacugauacagccgagaucagacugaugugcaccgacacguauuuagauaccccuaggccaaacgacgggucuauuacaggacccugugaauccgauggugacaagggcagcgggggaauaaaaggcgguuuuguucaucaacggaugaagucgaaaaucgggcguugguacucucgcacuauguccaagaccgagagaaugggcaugggacuguaugugaaguacgacggcgauccgugggcagacucagaugcucucgccuucaguggggucauggugagcaugaaagagccuggaugguacuccuuugguuucgaaaugaaggacaaaaagugcgaugugcccuguauuggcaucgagaugguccacgacgggggaaaagaaacauggcauucugcugccacugcaauauauugccuuaugggcagcggucagcuguugugggauaccguuacagggguggacauggcccuauga

SEQ ID NO: 158416 - RNA, 1401 nt, Artificial Sequence; identical to SEQ ID NO: 158362
  derived and/or modified CDS sequence (opt3) from neuraminidase__InfluenzaB__AIL95124

SEQ ID NO: 158417 - RNA, 1401 nt, Artificial Sequence
  derived and/or modified CDS sequence (opt3) from neuraminidase__InfluenzaB__AKA54777
augcugcccagcaccauccagacacucacucuuuuccugacguccggcgggguguuguuaucucuguacgucucagccagucuaagcuaucuccuguacuccgacauucuucugaaguuuucuagaaccgagguuacagcuccuauaaugccauuggauugcgcaaacgccucgaaugugcaagcgguaaacaggucagcuacuaaaggagugaccccgcuccugcccgaaccugaguggacauauccacggcugagcugucccgguaguaccuuccagaaggcccucuuaaucuccccucaccgcuuuggcgaaacuaaaggaaauucugcaccacugauuauccgagagcccuucauugccugcgggccuaaggaauguaaacauuuugcucuuacacacuacgcagcccagccaggcgguuauuacaacgggacccgugaggacagaaauaaguugaggcaucugaucagcgucaagcuaggaaaaauaccgacgguggagaacuccaucuuccacauggcugccuggucaggcagugcgugccaugauggccgggaauggacuuauauugggguugacggacccgauagcaaugcacuccugaagaucaaauacggugaggccuacaccgacacauaucacucuuacgcuaagaacauucuucgcacucaggaauccgccuguaauugcaucggcggggauuguuaucugaugauaaccgacggaccugcaucaggcauuagcgagugcagauuuuugaaaaucagggagggucggauuaucaaggaaaucuucccaacagggcgcgugaagcacaccgaggaauguacgugcggauuugcuaguaacaaaacuauugagugugccugccgagauaauucuuacacagcgaagagacccuucgucaaacucaacguggaaaccgacacugccgagauaaggcugaugugcacaaagaccuauuuagauacgccucggccaaaugacggcuccaucaccggccccugugagagcgauggggacgaaggaucggguggcauuaaagggggauuuguacaucaacguauggcaucuaagacaggccgcugguacuccagaacuaugucaaaaaccaagaggauggguauggggcuguauguuaaguacgacggcgauccguggacagacagugaggcucucgcccuuagcggagugauggucuccauggaggaaccuggcugguacucuuucggguuugaaaucaaagauaagaaaugcgacgugcccuguauaggaauugagauggugcacgaugguggcaagacuaccuggcauagcgcugccacagcaaucuauugccugauggggucaggacaguugcuaugggacaccgucacuggcguuaacaugacgcuguga

SEQ ID NO: 158418 - RNA, 1401 nt, Artificial Sequence
  derived and/or modified CDS sequence (opt3) from neuraminidase__InfluenzaB__AKA54781
augcugcccagcaccauccagacacucacucuuuuccugacguccggcgggguguuguuaucucuguacgucucagccagucuaagcuaucuccuguaccuugacauucuguugaaguuuccuuccaccgagauaacagcuccaacuaugccgcucgauugcgcaaacgccucuaauguucaagcggugaacagaucggcuaccaaaggaguaacauuccugcugcccgaaccugaguggaccuauccaaggcucucaugucccgguagcacuuuucagaaggccuuacugaucaguccucaccgguucggcgaaacaaaaggaaauuccgcaccacuuauuauccgcgagcccuuuauugccugcgggccuaaggaauguaaacauuucgcuuugacccacuacgcagcccagccaggcgguuauuacaacgggacgcgaggagaccguaauaagcugagacaucuaaucucugugaagcucggcaaaauaccgacugucgagaacagcaucuuucacauggcugccugguccggcucagcgugccaugaugggaaggaguggaccuauauuggaguggacggucccgauaauaacgcacugcuuaaaaucaaguacggcgaagccuacacagacacuuaucacaguuacgcuaauaacauucugaggacccaggagagcgccuguaauugcaucgggggaaacuguuauuugaugauaacagauggcucugcauccgguguuucagaaugccgguuccucaaaauucgcgaggggagaaucaugaaggagauuuuuccuaccggaaggacgcaacacacugaagaguguacaugcggcuucgcuagcaauaagaccaucgaaugugugugccgggacaacaguuacacugccaaacgcccauuugucaagcugaauguggagacagauaccgcggaaauccgauuaaugugcacgaaaaccuaucuggacacacccagaccugaugacggcucuauuacugggccaugugaguccaacggagguaagggcagcgggggaauaaaaggcgguuucguacaucagaggauggccucgaagaucgggcggugguacucucguaccauguccaaaacagagcgcaagggcaugggacucuauguuaaguacaacggcgaucccugggcagacucagacgcucuuacuuuuaguggggugauggucagcauggaggaaccgggaugguacuccuucgguuucgaaauuaaagauaagaaaugcgacgugccuuguaucggcauagagauggugcacgaugggggaaaggaaaccuggcauucugccgcuacagccauuuauugccugaugggcagcggucaguugcuaugggacaccgucacugggguuaauaugacgcuguga

SEQ ID NO: 158419 - RNA, 1401 nt, Artificial Sequence
  derived and/or modified CDS sequence (opt3) from neuraminidase__InfluenzaB__AKA54783
augcugcccagcaccauccagacacucacucuuuuccugacguccggcgggguguuguuaucucuguacgucucagccagucuaagcuaucuccuguacuccgacauucuucugaaguuuucuagaaccgagguuacagcuccuauaaugccauuggauugcgcaaacgccucgaaugugcaagcgguaaacaggucagcuacuaaaggagugaccccgcuuuuccccgaaccugaguggacauauccacggcugagcugucccgguaguaccuuucagaaggcccugcucaucuccccucaccgcuucggcgaaacuaaaggaaauucugcaccauuaauuauccgagagcccuuuauugccugcgggccuaaggaauguaaacauuucgcucugacacacuacgcagcccagccaggcgguuauuacaacgggacccgugaggacagaaauaagcucaggcauuugaucagcgucaagcugggaaaaauaccgacgguggagaacuccaucuuucacauggcugccuggucaggcagugcgugccaugauggccgggaauggacuuauauugggguugacggacccgauagcaaugcacuacucaagaucaaauacggugaggccuacaccgacacauaucacucuuacgcuaagaacauucugcgcacucaggaauccgccuguaauugcaucggcggggauuguuaucuuaugauaaccgacggaccugcaucaggcauuagcgagugcagauuccugaaaaucagggagggucggauuaucaaggaaaucuuuccaacagggcgcgugaagcacaccgaggaauguacgugcggauucgcuaguaacaaaacuauugagugugccugccgagauaauucuuacacagcgaagagacccuuugucaaauugaacguggaaaccgacacugccgagauaaggcucaugugcacaaagaccuaucuggauacgccucggccaaaugacggcuccaucaccggccccugugagagcgauggggacgaaggaucggguggcauuaaagggggauucguacaucaacguauggcaucuaagaucggccgcugguacuccagaacaaugucaaaaacuaagaggauggguaugggguuauauguuaaguacgacggcgauccguggaccgacagugaggcucuggcccucagcggagugauggucuccauggaggaaccuggcugguacucuuuuggguucgaaauaaaagauaagaaaugcgacgugcccuguauuggaaucgagauggugcacgaugguggcaagacaacuuggcauagcgcugccaccgcaaucuauugccuuauggggucaggacagcuguugugggacacagucaccggcguuaacaugacucuauga

SEQ ID NO: 158420 - RNA, 1401 nt, Artificial Sequence
  derived and/or modified CDS sequence (opt3) from neuraminidase__InfluenzaB__AKA54785
augcugcccagcaccauccagacacucacucuuuuccugacguccggcgggguguuguuaucucuguacgucucagccagucuaagcuaucuccuguacuccgacauucuucugaaguuuucuagaaccgagguuacagcuccuauaaugccauuggauugcgcaaacgccucgaaugugcaagcgguaaacaggucagcuacuaaaggagugaccccgcuccugcccgaaccugaguggacauauccacggcugagcugucccgguaguaccuuccagaaggcccucuuaaucuccccucaccgcuuuggcgaaacuaaaggaaauucugcaccacugauuauccgagagcccuucauugccugcgggccuaaggaauguaaacauuuugcucuuacacacuacgcagcccagccaggcgguuauuacaacgggacccgugaggacagaaauaaguugaggcaucugaucagcgucaagcuaggaaaaauaccgacgguggagaacuccaucuuccacauggcugccuggucaggcagugcgugccaugauggccgggaauggacuuauauugggguugacggacccgauagcaaugcacuccugaagaucaaauacggugaggccuacaccgacacauaucacucuuacgcuaagaacauucuucgcacucaggaauccgccuguaauugcaucggcggggauuguuaucugaugauaaccgacggaccugcaucaggcauuagcgagugcagauuuuugaaaaucagggagggucggauuaucaaggaaaucuucccaacagggcgcgugaagcacaccgaggaauguacgugcggauuugcuaguaacaaaacuauugagugugccugccgagauaauucuuacacagcgaagagacccuucgucaaacucaacguggaaaccgacacugccgagauaaggcugaugugcacaaagaccuauuuagauacgccucggccaaaugacggcuccaucaccggccccugugagagcgaugggaacgaaggaucggguggcauuaaagggggauuuguacaucaacguauggcaucuaagaucggccgcugguacuccagaacaaugucaaaaacuaagaggauggguauggggcuguauguuaaguacgacggcgacccguggaccgauagugaggcucucgcccuuagcggagugauggucuccauggaggaaccuggcugguacucuuucggguuugaaauaaaagacaagaaaugcgaugugcccuguauuggaaucgagauggugcacgacgguggcaagacaacuuggcauagcgcugccaccgcaaucuauugccugauggggucaggacaguugcuaugggauacagucaccggcguuaauaugacucuguga

SEQ ID NO: 158421 - RNA, 1401 nt, Artificial Sequence
  derived and/or modified CDS sequence (opt3) from neuraminidase__InfluenzaB__AKA54787
augcugcccagcaccauccagacacucacucuuuuccugacguccggcgggguguuguuaucucuguacgucucagccagucuaagcuaucuccuguacuccgacauucuucugaaguuuucucaaaccgagauaacagcuccuaucaugccauuggauugcgcaaacgccucgaauguucaggcggugaaccacucagcugccaaaggaguaacucuccugcugccggaacccgaguggaccuauccuagacucagcuguccagguaguacauuccagaaggcauuacugauuucuccccauagguuuggcgaaaucaaaggaaauuccgccccucuuauuauccgggagccauucauagcuugcgggcccaccgaauguaagcacuuugcauugacucauuacgccgcucagccuggcgguuauuacaacgggacacgcgaggaccgaaauaaacugcgucaccuaaucagcgugaagcucggaaagauuccaaccgucgagaacuccaucuuccauauggccgcguggucaggcagugcaugccacgauggcaaagaauggacguauauugggguggacggaccggauagcaaugcccugcuuaagaucaaauacggugaggcuuacacugacaccuaucacucuuacgccaagaacauacugagaacacaagaauccgcauguaauugcauuggcggggauuguuauuugaugaucacugacggacccgcuucaggcguuagcgagugcagguuucucaaaauucgggagggucgcaucaucaaggaaauuuucccuaccgggagagugaagcauacagaggaauguaccugcggauuugccaguaacaaaacgauagagugugcgugcagggauaaucgguacacugccaagcgcccauucgucaaacugaacguggaaacagacaccgcagagauccgauuaaugugcacugagacauaucuggauacccccagaccuaaugacggcucuauuacgggcccaugugaauccgauggggacaagggaagcgguggcaucaaagggggauuuguacaccagaggauggcuucgaagauaggccggugguacucucguaccauguccaaaacaaagcgcauggguauggggcucuauguuaaguacgacggcgaucccuggacugacucagaggcccuugcucugaguggagugauggucagcauggaggaaccgggcugguacuccuucggguuugaaauuaaagauaagaaaugcgacgugccuuguaucggaaucgagauggugcaugaugguggcaagaccacauggcacucugccgcaacugccauuuauugcuugauggggagcggacagcuacugugggacaccgucacaggcguugauauggcucucuga

SEQ ID NO: 158422 - RNA, 1401 nt, Artificial Sequence
  derived and/or modified CDS sequence (opt3) from neuraminidase__InfluenzaB__AKA54789
augcugcccagcaccauccagacacucacucuuuuccugacguccggcgggguguuguuaucucuguacgucucagccagucuaagcuaucuccuguacuccgacauucuucugaaguuuucuagaaccgagguuacagcuccuauaaugccauuggauugcgcaaacgccucgaaugugcaagcgguaaacaggucagcuacuaaaggagugaccccgcuccugcccgaaccugaguggacauauccacggcugagcugucccgguaguaccuuccagaaggcccucuuaaucuccccucaccgcuuuggcgaaacuaaaggaaauucugcaccacugauuauccgagagcccuucauugccugcgggccuaaggaauguaaacauuuugcucuuacacacuacgcagcccagccaggcgguuauuacaacgggacccgugaggacagaaauaaguugaggcaucugaucagcgucaagcuaggaaaaauaccgacgguggagaacuccaucuuccacauggcugccuggucaggcagugcgugccaugauggccgggaauggacuuauauugggguugacggacccgauagcaaugcacuccugaagaucaaauacggugaggccuacaccgacacauaucacucuuacgcuaagaacauucuucgcacucaggaauccgccuguaauugcaucggcggggauuguuaucugaugauaaccgacggaccugcaucaggcauuagcgagugcagauuuuugaaaaucagggagggucggauuaucaaggaaaucuucccaacagggcgcgugaagcacaccgaggaauguacgugcggauuugcuaguaacaaaacuauugagugugccugccgagauaauucuuacacagcgaagagacccuucgucaaacucaacguggaaaccgacacugccgagauaaggcugaugugcacaaagaccuauuuagauacgccucggccaaaugacggcuccaucaccggccccugugagagcgauggggacgaaggaucggguggcauuaaagggggauuuguacaucaacguauggcaucuaagaucggccgcugguacuccagaacaaugucaaaaacuaagaggauggguauggggcuguauguuaaguacgacggcgauccguggaccgacagugaggcucucgcccuuagcggagugauggucuccauggaggaaccuggcugguacucuuucggguuugaaauaaaagauaagaaaugcgacgugcccuguauuggaaucgagauggugcacgaugguggcaagacaacuuggcauagcgcugccaccgcaaucuauugccugauggggucaggacaguugcuaugggacacagucaccggcguuaacaugacucuguga

SEQ ID NO: 158423 - RNA, 1401 nt, Artificial Sequence
  derived and/or modified CDS sequence (opt3) from neuraminidase__InfluenzaB__AKA54791
augcugcccagcaccauccagacacucacucuuuuccugacguccggcgggguguuguuaucucuguacgucucagccagucuaagcuaucuccuguacuccgacauucuucugaaguuuucuagaaccgagguuacagcuccuauaaugccauuggauugcgcaaacgccucgaaugcgcaagcugugaacaggucagccacuaaaggaguaaccccgcuccugcccgaaccugaguggacauauccacggcugagcugucccgguaguaccuuccagaaggcacucuuaaucuccccucaccgcuuuggcgaaacuaaaggaaauucugccccacugauuauccgagagcccuucauugcuugcgggccuaaggaauguaaacauuuugcacuuacacacuacgccgcucagccaggcgguuauuacaacgggacccgugaggacagaaauaaguugaggcaucugaucagcgugaagcuaggaaaaauaccgacggucgagaacuccaucuuccacauggccgcguggucaggcagugcaugccaugauggccgggaauggacuuauauugggguggacggacccgauagcaaugcccuccugaagaucaaauacggugaggcuuacaccgacacauaucacucuuacgccaagaacauucuucgcacucaggaauccgcauguaauugcaucggcggggauuguuaucugaugauaaccgacggaccugcuucaggcauuagcgagugcagauuuuugaaaaucagggagggucggauuaucaaggaaaucuucccaacagggcgcguuaagcacaccgaggaauguacgugcggauuugccaguaacaaaacuauugagugugcgugccgagauaauucuuacacagccaagagacccuucgugaaacucaacgucgaaaccgacacugcagagauaaggcugaugugcacaaagaccuauuuagauacgccucggccaaaugacggcuccaucaccggccccugugagagcgauggggacgaaggaucggguggcauuaaagggggauuugugcaucaacguauggcuucuaagaucggccgcugguacuccagaacaaugucaaaaacuaagaggauggguauggggcuguauguaaaguacgacggcgauccguggaccgacagugaggcccucgcucuuagcggaguuaugguguccauggaggaaccuggcugguacucuuucggguuugaaauaaaagauaagaaaugcgacguccccuguauuggaaucgagauggugcacgaugguggcaagacaacuuggcauagcgccgcaaccgccaucuauugccugauggggucaggacaguugcuaugggacacagugaccggcgucaacauuacucuguga

SEQ ID NO: 158424 - RNA, 1401 nt, Artificial Sequence; identical to SEQ ID NO: 158421
  derived and/or modified CDS sequence (opt3) from neuraminidase__InfluenzaB__AKA54793

SEQ ID NO: 158425 - RNA, 1401 nt, Artificial Sequence; identical to SEQ ID NO: 158421
  derived and/or modified CDS sequence (opt3) from neuraminidase__InfluenzaB__AKA54795

SEQ ID NO: 158426 - RNA, 1401 nt, Artificial Sequence; identical to SEQ ID NO: 158422
  derived and/or modified CDS sequence (opt3) from neuraminidase__InfluenzaB__AKA54797

SEQ ID NO: 158427 - RNA, 1401 nt, Artificial Sequence
  derived and/or modified CDS sequence (opt3) from neuraminidase__InfluenzaB__AKA54799
augcugcccagcaccauccagacacucacucuuuuccugacguccggcgggguguuguuaucucuguacgucucagccagucuaagcuaucuccuguacuccgacauucuucugaaguuuucucaaaccgagauaacagcuccuaucaugccauuggauugcgcaaacgccucgaauguucaggcggugaaccacucagcugccaaaggaguaacucuccugcugccggaacccgaguggaccuauccuagacucagcuguccagguaguacauuccagaaggcauuacugauuucuccccauagguuuggcgaaaucaaaggaaauuccgccccucuuauuauccgggagccauucauagcuugcgggcccaccgaauguaagcacuuugcauugacucauuacgccgcucagccuggcgguuauuacaacgggacacgcgaggaccgaaauaaacugcgucaccuaaucagcgugaagcucggaaagauuccaaccgucgagaacuccaucuuccauauggccgcguggucaggcagugcaugccacgauggcaaagaauggacguauauugggguggacggaccggauagcaaugcccugcuuaagaucaaauacggugaggcuuacacugacaccuaucacucuuacgaaaagaacauacugagaacacaagaguccgccuguaauugcauuggcggggauuguuauuugaugaucacugacggacccgcaucaggcguuagcgagugcagguuucucaaaauucgggaaggucgcaucaucaaggagauuuucccuaccgggagagugaagcauacagaagaguguaccugcggauuugcuaguaacaaaacgauagaaugugccugcagggauaaucgguacacugcgaagcgcccauucgucaaacugaacguggagacagacaccgccgagauccgauuaaugugcacugaaacauaucuggauacccccagaccuaaugacggcucuauuacgggcccaugugaguccgauggggacaagggaagcgguggcaucaaagggggauuuguacaccagaggauggcaucgaagauaggccggugguacucucguaccauguccaaaacaaagcgcauggguauggggcucuauguuaaguacgacggcgaucccuggacugacucagaagcucuugcccugaguggagugauggucagcauggaggaaccgggcugguacuccuucggguuugagauuaaagauaagaaaugcgacgugccuuguaucggaaucgagauggugcaugaugguggcaagaccacauggcacucugcugccacugcaauuuauugcuugauggggagcggacagcuacugugggacaccgucacaggcguugauauggcccucuga

SEQ ID NO: 158428 - RNA, 1401 nt, Artificial Sequence; identical to SEQ ID NO: 158422
  derived and/or modified CDS sequence (opt3) from neuraminidase__InfluenzaB__AKA54801

SEQ ID NO: 158429 - RNA, 1401 nt, Artificial Sequence
  derived and/or modified CDS sequence (opt3) from neuraminidase__InfluenzaB__AKA54803
augcugcccagcaccauccagacacucacucuuuuccugacguccggcgggguguuguuaucucuguacgucucagccagucuaagcuaucuccuguacuccgacauucuucugaaguuuucuagaaccgagguuacagcuccuauaaugccauuggauugcgcaaacgccucgaaugugcaagcgguaaacaggucagcuacuaauggagugaccccgcuccugcccgaaccugaguggacauauccacggcugagcugucccgguaguaccuuccagaaagcccucuuaaucuccccucaccgcuuuggcgaaacuaaggggaacucugcaccacugauuauccgagagcccuucauugccugcggaccuaaagaauguaagcauuuugcucuuacacacuacgcagcccagccaggcgguuauuacaaugggacccgugaggacagaaacaaauugaggcaucugaucagcgucaagcuaggaaagauaccgacgguggaaaauuccaucuuccacauggcugccuggucaggcagugcgugccaugauggccgggaauggacuuauauugggguugacggacccgauagcaacgcacuccugaaaaucaaguacggugaggccuacaccgacacauaucacucuuacgcuaaaaauauucuucgcacucaggaauccgccuguaacugcaucggcggggauuguuaucugaugauaaccgacggaccugcaucaggcauuagcgagugcagauuuuugaagaucagggagggucggauuaucaaagaaaucuucccaacagggcgcgugaagcacaccgaggaauguacgugcggauuugcuaguaauaagacuauugagugugccugccgagauaacucuuacacagcgaaaagacccuucgucaagcucaauguggaaaccgacacugccgagauaaggcugaugugcacaaaaaccuauuuagauacgccucggccaaacgacggcuccaucaccggccccugugagagcgauggggacgaaggaucggguggcauuaaagggggauuuguacaucaacguauggcaucuaagaucggccgcugguacuccagaacaaugucaaagacuaaaaggauggguauggggcuguauguuaaguacgacggcgauccguggaccgacagugaggcucucgcccuuagcggagugauggucuccauggaggagccuggcugguacucuuucggguuugaaauaaaggauaaaaagugcgacgugcccuguauuggaaucgagauggugcacgaugguggcaaaacaacuuggcauagcgcugccaccgcaaucuauugccugauggggucaggacaguugcuaugggacacagucaccggcguuaauaugacucuguga

SEQ ID NO: 158430 - RNA, 1401 nt, Artificial Sequence; identical to SEQ ID NO: 158422
  derived and/or modified CDS sequence (opt3) from neuraminidase__InfluenzaB__AKA54805

SEQ ID NO: 158431 - RNA, 1401 nt, Artificial Sequence
  derived and/or modified CDS sequence (opt3) from neuraminidase__InfluenzaB__AKA54807
augcugcccagcaccauccagacacucacucuuuuccugacguccggcgggguguuguuaucucuguacgucucagccagucuaagcuaucuccuguacuccgacauucuucugaaguuuucuagaaccgagguuacagcuccuauaaugccauuggauugcgcaaacgccucgaaugugcaagcgguaaacaggucagcuacuaaaggagugaccccgcuccugcccgaaccugaguggacauauccacggcugagcugucccgguaguaccuuccagaaggcccucuuaaucuccccucaccgcuuuggcgaaacuaaaggaaauucugcaccacugauuauccgagagcccuucauugccugcgggccuaaggaauguaaacauuuugcucuuacacacuacgcagcccagccaggcgguuauuacaacgggacccgugaggacagaaauaaguugaggcaucugaucagcgucaagcuaggaaaaauaccgacgguggagaacuccaucuuccacauggcugccuggucaggcagugcgugccaugauggccgggaauggacuuauauugggguugacggacccgauagcaaugcacuccugaagaucaaauacggugaggccuacaccgacacauaucacucuuacgcuaagaacauucuucgcacucaggaauccgccuguaauugcaucggcggggauuguuaucugaugauaaccgacggaccugcaucaggcauuagcgagugcagauuuuugaaaaucagggagggucggauuaucaaggaaaucuucccaacagggcgcgugaagcacaccgaggaauguacgugcggauuugcuaguaacaaaacuauugagugugccugccgagauaauucuuacacagcgaagagacccuucgucaaacucaacguggaaaccgacacugccgagauaaggcugaugugcacaaagaccuauuuagauacgccucggccaaaugacggcuccaucaccggccccugugagagcgauggggacgaaggaucggguggcauuaaagggggauuuguacaucaacguauggcaucuaagaucggccgcugguacuccagaacaaugucaaaaacuaagaggauggguauggggcuguauguuaaguacgacggcgauccguggaccgacagugaggcucucgcccuuagcggagugauggucuccauggaggaaccuggcugguacucuuucggguuugaaauaaaagauaagaaaugcgacgugcccuguauuggaaucgagauggugcacgaugguggcaagacaacuuggcauagcgcugccaccgcaaucuauugccugauggggucaggacaguugcuaugggacacagucaccggcguuaacauuacucuguga

SEQ ID NO: 158432 - RNA, 1401 nt, Artificial Sequence
  derived and/or modified CDS sequence (opt3) from neuraminidase__InfluenzaB__AKA54809
augcugcccagcaccauccagacacucacucuuuuccugacguccggcgggguguuguuaucucuguacgucucagccagucuaagcuaucuccuguacuccgacauucuucugaaguuuucuagaaccgagguuacagcuccuauaaugccauuggauugcgcaaacgccucgaaugugcaagcgguaaacaggucagcuacuaaaggagugaccccgcuccugcccgaaccugaguggacauauccacggcugagcugucccgguaguaccuuccagaaggcccucuuaaucuccccucaccgcuuuggcgaaacuaaaggaaauucugcaccacugauuauccgagagcccuucauugccugcgggccuaaggaauguaaacauuuugcucuuacacacuacgcagcccagccaggcgguuauuacaacgggacccgugaggacagaaauaaguugaggcaucugaucagcgucaagcuaggaaaaauaccgacgguggagaacuccaucuuccacauggcugccuggucaggcagugcgugccaugauggccgggaauggacuuauauugggguugacggacccgauagcaaugcacuccugaagaucaaauacggugaggccuacaccgacacauaucacucuuacgcuaagaacauucuucgcacucaggaauccgccuguaauugcaucggcggggauuguuaucugaugauaaccgacggaccugcaucaggcauuagcgagugcagauuuuugaaaaucagggagggucggauuaucaaggaaaucuucccaacagggcgcgugaagcacaccgaggaauguacgugcggauuugcuaguaacaaaacuauugagugugccugccgagauaauucuuacacagcgaagagacccuucgucaaacucaacguggaaaccgacacugccgagauaaggcugaugugcacaaagaccuauuuagauacgccucggccaaaugacggcuccaucaccggccccugugagagcgauggggacgaaggaucggguggcauuaaagggggauuuguacaucaacguauggcauucaagaucggccgcugguacucuagaacaauguccaaaacuaagaggauggguauggggcuguauguuaaguacgacggcgauccguggaccgacucagaggcucucgcccuuaguggagugauggucagcauggaggaaccuggcugguacuccuuuggguucgaaauaaaagauaagaaaugcgacgugcccuguauuggaaucgagauggugcacgaugguggcaagacaacuuggcauucugcugccaccgcaaucuauugccugauggggagcggacaguugcuaugggacacagucaccggcguuaacaugacucuguga

SEQ ID NO: 158433 - RNA, 1401 nt, Artificial Sequence; identical to SEQ ID NO: 158422
  derived and/or modified CDS sequence (opt3) from neuraminidase__InfluenzaB__AKA54811

SEQ ID NO: 158434 - RNA, 1401 nt, Artificial Sequence
  derived and/or modified CDS sequence (opt3) from neuraminidase__InfluenzaB__AKA54813
augcugcccagcaccauccagacacucacucuuuuccugacguccggcgggguguuguuaucucuguacgucucagccagucuaagcuaucuccuguacuccgacauucuucugaaguuuucuagaaccgagguuacagcuccuauaaugccauuggauugcgcaaacgccucgaaugugcaagcgguaaacaggucagcuacuaaaggagugaccccgcuccugcccgaaccugaguggacauauccacggcugagcugucccgguaguaccuuccagaaggcccucuuaaucuccccucaccgcuuuggcgaaacuaaaggaaauucugcaccacugauuauccgagagcccuucauugccugcgggccuaaggaauguaaacauuuugcucuuacacacuacgcagcccagccaggcgguuauuacaacgggacccgugaggacagaaauaaguugaggcaucugaucagcgucaagcuaggaaaaauaccgacgguggagaacuccaucuuccacauggcugccuggucaggcagugcgugccaugauggccgggaauggacuuauauugggguugacggacccgauagcaaugcacuccugaagaucaaauacggugaggccuacaccgacacauaucacucuuacgcuaagaacauucuucgcacucaggaauccgccuguaauugcaucggcggggauuguuaucugaugauaaccgacggaccugcaucaggcauuagcgagugcagauuuuugaaaaucagggagggucggauuaucaaggaaaucuucccaacagggcgcgugaagcacaccgaggaauguacgugcggauuugcuaguaacaaaacuauugagugugccugccgagauaauucuuacacagcgaagagacccuucgucaaacucaacguggaaaccgacacugccgagauaaggcugaugugcacaaagaccuauuuagauacgccucggccaaaugacggcuccaucaccggccccugugagagcgauggggacgaaggaucggguggcauuaaagggggauuuguacaucaacguauggcaucuaagaucggccgcugguacuccagaacaaugucaaaaacuaagaggauggguauggggcuguauguuaaguacgacggcgauccguggaccgacagugaggcucucgcccuuagcggagugauggucuccauagaggaaccuggcugguacucuuucggguuugaaauuaaagauaagaaaugcgacgugcccuguaucggaaucgagauggugcacgaugguggcaagacaacuuggcauagcgcugccaccgcaauuuauugccugauggggucaggacaguugcuaugggacacagucaccggcguuaacaugacucuguga

SEQ ID NO: 158435 - RNA, 1401 nt, Artificial Sequence; identical to SEQ ID NO: 158422
  derived and/or modified CDS sequence (opt3) from neuraminidase__InfluenzaB__AKA54815

SEQ ID NO: 158436 - RNA, 1401 nt, Artificial Sequence
  derived and/or modified CDS sequence (opt3) from neuraminidase__InfluenzaB__AKA54817
augcugcccagcaccauccagacacucacucuuuuccugacguccggcgggguguuguuaucucuguacgucucagccagucuaagcuaucuccuguacuccgacauucuucugaaguuuucuagaaccgagguuacagcuccuauaaugccauuggauugcgcaaacgccucgaaugugcaagcgguaaacaggucagcuacuaaaggagugaccccgcuccugcccgaaccugaguggacauauccacggcugagcugucccgguaguaccuuccagaaggcccucuuaaucuccccucaccgcuuuggcgaaacuaaaggaaauucugcaccacugauuauccgagagcccuucauugccugcgggccuaaggaauguaaacauuuugcucuuacacacuacgcagcccagccaggcgguuauuacaacgggacccgugaggacagaaauaaguugaggcaucugaucagcgucaagcuaggaaaaauaccgacgguggagaacuccaucuuccacauggcugccuggucaggcagugcgugccaugauggccgggaauggacuuauauugggguugacggacccgauagcaaugcacuccugaagaucaaauacggugaggccuacaccgacacauaucacucuuacgcuaagaacauucuucgcacucaggaauccgccuguaauugcaucggcggggauuguuaucugaugauaaccgacggaccugcaucaggcauuagcgagugcagauuuuugaaaaucagggagggucggauuaucaaggaaaucuucccaacagggcgcgugaagcacaccgaggaauguacgugcggauuugcuaguaacaaaacuauugagugugccugccgagauaauucuuacacagcgaagagacccuucgucaaacucaacguggaaaccgacacugccgagauaaggcugaugugcacaaagaccuauuuagauacgccucggccaaaugacggcuccaucaccggccccugugagagcgauggggacgaaggaucggguggcauuaaagggggauuuguacaucaacguauggcaucuaagaucggccgcugguacuccagaacaaugucaaaaacuaagaggauggguauggggcuguauguuaaguacgacggcgauccguggaccgacagugaggcucucgcccuuagcggagugauggucuccauggaggaaccuggcugguacucuuucggguuugaaauaaaagauaagaaaugcgacgugcccuguauuggaguggagaugguccacgaugguggcaagacaacuuggcauagcgcugccaccgcaaucuauugccugauggggucaggacaguugcuaugggacacaguuaccggcgugaacaugacucuguga

SEQ ID NO: 158437 - RNA, 1401 nt, Artificial Sequence; identical to SEQ ID NO: 158422
  derived and/or modified CDS sequence (opt3) from neuraminidase__InfluenzaB__AKA54819

SEQ ID NO: 158438 - RNA, 1401 nt, Artificial Sequence; identical to SEQ ID NO: 158422
  derived and/or modified CDS sequence (opt3) from neuraminidase__InfluenzaB__AKA54821

SEQ ID NO: 158439 - RNA, 1401 nt, Artificial Sequence; identical to SEQ ID NO: 158422
  derived and/or modified CDS sequence (opt3) from neuraminidase__InfluenzaB__AKA54823

SEQ ID NO: 158440 - RNA, 1401 nt, Artificial Sequence; identical to SEQ ID NO: 158422
  derived and/or modified CDS sequence (opt3) from neuraminidase__InfluenzaB__AKA54825

SEQ ID NO: 158441 - RNA, 1401 nt, Artificial Sequence; identical to SEQ ID NO: 158422
  derived and/or modified CDS sequence (opt3) from neuraminidase__InfluenzaB__AKA54827

SEQ ID NO: 158442 - RNA, 1401 nt, Artificial Sequence
  derived and/or modified CDS sequence (opt3) from neuraminidase__InfluenzaB__AKA54829
augcugcccagcaccauccagacacucacucuuuuccugacguccggcgggguguuguuaucucuguacgucucagccagucuaagcuaucuccuguacuccgacauucuucugaaguugucuagaaccgagguuacagcuccuauaaugccacucgauugcgcaaacgccucgaaugugcaagcgguaaacaggucagcuacuaaaggagugaccccgcugcugcccgaaccugaguggacauauccacggcucagcugucccgguaguaccuuucagaagacuuuacugaucuccccucaccgcuucggcgaaacaaaaggaaauucugccccacuuauuauccgagagcccuuuauugcaugcgggccuaaggaauguaaacauuucgccuugacccacuacgcugcacagccaggcgguuauuacaacgggacgcgugaggacagaaauaagcugaggcaucuaaucagcgucaagcucggaaaaauaccgacuguggagaacuccaucuuucacauggccgcuuggucaggcagugccugccaugauggccgggaauggaccuauauugggguugacggacccgauagcaaugcgcugcuuaagaucaaauacggugaggcauacacagacacuuaucacucuuacgccaagaacauucugcgcacccaggaauccgcuuguaauugcaucggcggggauuguuauuugaugauaacagacggaccugccucaggcauuagcgagugcagauuccucaaaaucagggagggucggauuaucaaggaaaucuuuccaaccgggcgcgugaagcacacggaggaauguacuugcggauucgcaaguaacaaaacaauugagugugcuugccgagauaauucuuacaccgccaagagacccuuugucaaacugaacguggaaacugacacagcggagauaagguuaaugugcaccaagacguaucuggauaccccucggccaaaugacggcuccaucacaggccccugugagagcgauggggacgaaggaucggguggcauuaaagggggauucguacaucaacguauggccucuaagaucggccgcugguacuccagaacuaugucaaaaaccaagaggauggguauggggcucuauguuaaguacgacggcgauccguggacagacagugaggcacuugcucugagcggagugauggucuccauggaggaaccuggcugguacucuuuuggguucgaaauaaaagauaagaaaugcgacgugcccuguauuggaaucgagauggugcacgaugguggcaagacuaccuggcauagcgccgcuacagccaucuauugcuugauggggucaggacagcuacugugggacaccgucacuggcguuaacaugacgcucuga

SEQ ID NO: 158443 - RNA, 1401 nt, Artificial Sequence
  derived and/or modified CDS sequence (opt3) from neuraminidase__InfluenzaB__AKA54831
augcugcccagcaccauccagacacucacucuuuuccugacguccggcgggguguuguuaucucuguacgucucagccagucuaagcuaucuccuguacuccgacauucuucugaaguuuucuagaaccgagguuacagcuccuauaaugccauuggauugcgcaaacgccucgaaugugcaagcgguaaacaggucagcuacuaaaggagugaccccgcuccugcccgaaccugaguggacauauccacggcugagcugucccgguaguaccuuccagaaggcccucuuaaucuccccucaccgcuuuggcgaaacuaaaggaaauucugcaccacugauuauccgagagcccuucauugccugcgggccuaaggaauguaaacauuuugcucuuacacacuacgcagcccagccaggcgguuauuacaacgggacccgugaggacagaaauaaguugaggcaucugaucagcgucaagcuaggaaaaauaccgacgguggagaacuccaucuuccacauggcugccuggucaggcagugcgugccaugauggccgggaauggacuuauauugggguugacggacaggauagcaaugcacuccugaagaucaaauacggugaggccuacaccgacacauaucacucuuacgcuaagaacauucuucgcacucaagaauccgccuguaauugcaucggcggggauuguuaucugaugauaaccgacggacccgcaucaggcauuagcgagugcagauuuuugaaaaucagggagggucggauuaucaaggaaaucuucccuacagggcgcgugaagcacaccgaggaauguacgugcggauuugcuaguaacaaaacuauugagugugccugccgagauaauucuuacacagcgaagagaccauucgucaaacucaacguggaaaccgacacugccgagauaaggcugaugugcacaaagaccuauuuagauacgccccggccuaaugacggcuccaucaccggcccaugugagagcgauggggacgaaggaucggguggcauuaaagggggauuuguacaucagcguauggcaucuaagaucggccgcugguacuccagaacaaugucaaaaacuaagaggauggguauggggcuguauguuaaguacgacggcgaucccuggaccgacagugaggcucucgcccuuagcggagugauggucuccauggaggaaccgggcugguacucuuucggguuugaaauaaaagauaagaaaugcgacgugccuuguauuggaaucgagauggugcacgaugguggcaagacaacuuggcauagcgcugccaccgcaaucuauugccugauggggucaggacaguugcuaugggacacagucaccggcguuaacaugacucuguga

SEQ ID NO: 158444 - RNA, 1401 nt, Artificial Sequence; identical to SEQ ID NO: 158422
  derived and/or modified CDS sequence (opt3) from neuraminidase__InfluenzaB__AKA54833

SEQ ID NO: 158445 - RNA, 1401 nt, Artificial Sequence
  derived and/or modified CDS sequence (opt3) from neuraminidase__InfluenzaB__AKA54837
augcugcccagcaccauccagacacucacucuuuuccugacguccggcgggguguuguuaucucuguacgucucagccagucuaagcuaucuccuguacuccgacauucuucugaaguuuucuccuaccgagauaacagcuccaacuaugccguuggauugcgcaaacgccucgaauguucaagcggugaacagaucagcuaccaaaggaguaacacuccugcugcccgaaccugaguggaccuauccaaggcucagcugucccgguaguacuuuccagaaggccuuacugaucuccccucaccgguuuggcgaaacaaaugggaacucugcaccacuuauugugcgcgagcccuucaucgccugcggaccuaaugaauguaaacauuuugcuuugacccacuacgcagcccagccaggcgguuauuacaacgggacgcgaggagaccguaauaagcugagacaucuaauuagcgucaaacucggcaagaucccgacuguggagaacuccauauuccacauggcugccuggucaggcagugcgugccaugaugggaaggaguggaccuauaucggaguugacggucccgauaauaacgcacugcuuaaagugaaguacggcgaagccuacacagacacuuaucacagcuacgcuaauaaaauucugaggacccaggagucugccuguaacugcaucgggggaaauuguuauuugaugauuacagauggcuccgcaucaggugucagcgaaugccgguuucucaagauccgcgaggggagaauaauuaaagagaucuucccuaccggaagggugaagcacacggaagaguguacuugcggcuuugcuaguaacaagacaauugaaugugccugccgggacaaucgcuacaccgcgaaacgaccauucguaaagcugaacguugagacugauacagccgaaaucagauuaaugugcaccgacacguaucuggauacccccaggccuaacgacggcucuaucacagggccaugugaguccgauggaaaugaggguagcggcgggauuaaaggaggcuuugugcaucaacggaugaagucgaaaauaggucguugguacucucgcacuauguccaagaccgaaagaauggggaugggccucuaugucaaauacgacggagaccccugggcagauucagacgcucuugccuucaguggcgugauggugagcaugaaggagccggggugguacuccuuuggauucgaaaucaaggauaaaaagugcgacgucccuuguauugguaucgagaugguucacgauggcgggaaagaaacauggcauucugcugccacugcaauauauugccugaugggaagcggccaguugcuaugggacaccgugacagguguagauauggcccuguga

SEQ ID NO: 158446 - RNA, 1401 nt, Artificial Sequence
  derived and/or modified CDS sequence (opt3) from neuraminidase__InfluenzaB__AKA54839
augcugcccagcaccauccagacacucacucuuuuccugacguccggcgggguguuguuaucucuguacgucucagccagucuaagcuaucuccuguacuccgacauucuucugaaguuuucuccuaccgagauaacagcuccaacuaugccguuggauugcgcaaacgccucgaauguucaagcggugaacagaucagcuaccaaagaaguaacacuccugcugcccgagccugaauggaccuauccaaggcucagcugucccggaaguacuuuccagaaggccuuacugaucuccccucaccgguuuggugagacaaaaggcaauucugcaccacuuauuauccgcgaacccuucauugccugcgggccuaacgaguguaagcauuuugcuuugacccacuacgcagcccagccaggaggcuauuacaaugguacgcgaggggaccguaacaaacugagacaucuaaucagcgugaagcucggaaagauaccgacugucgaaaauuccaucuuccacauggcugccuggucaggcagugcgugccaugauggcaaagaguggaccuauauugggguggacggacccgauaacaaugcacugcuuaagguuaaauacggugaggccuacacagacacuuaucacagcuacgcuaacaagauccugaggacccaggaaucugccuguaauugcauuggcgggaacuguuauuugaugaucacagauggauccgcaucaggcgugagcgagugccgguuucucaaaauacgcgaggguagaauuaucaaggaaauuuucccuaccgggagggucaagcacacggaggaauguacuugcggauuugcuaguaauaaaacaaucgagugugccugccgggacaaccgcuacaccgcgaagcgaccauucgugaaacugaauguagaaacugauacagccgagaucagauuaaugugcaccgacacguaucuggauacccccaggccuaacgacggcucuauuacaggcccaugugaguccgauggggacaagggaagcgguggcauaaaagggggauuuguucaucaacggaugaagucgaaaaucggccguugguacucucgcacuauguccaagaccgaaagaauggguauggggcucuaugugaaguacgacggcgaucccugggcagacucagaugcucuugccuucaguggagucauggugagcaugaaagagccgggcugguacuccuuuggguucgaaauuaaggacaaaaagugcgaugugccuuguaucggaauagagaugguccacgacgguggcaaagaaacauggcauucugcugccacugcaauuuauugccugauggggagcggacaguugcuaugggauaccguuacaggcguggacauggcccuguga

SEQ ID NO: 158447 - RNA, 1401 nt, Artificial Sequence
  derived and/or modified CDS sequence (opt3) from neuraminidase__InfluenzaB__AKA54841
augcugcccagcaccauccagacacucacucuuuuccugacguccggcgggguguuguuaucucuguacgucucagccagucuaagcuaucuccuguacuccgacauucuucugaaguuuucuccuaccgagauaacagcuccaacuaugccguuggauugcgcaaacgccucgaauguucaagcggugaacagaucagcuaccaaaggaguaacacuccugcugcccgaaccugaguggaccuauccaaggcucagcugucccgguaguacuuuccagaaggccuuacugaucuccccucaccgguuuggcgaaacaaaaggaaauucugcaccacuuauuauccgcgagcccuucauugccugcgggccuaacgaauguaagcauuuugcuuugacccacuacgcagcccagccaggcgguuauuacaaugggacgcgaggagaccguaacaaacugagacaucuaaucagcgugaagcucggcaagauaccgacugucgaaaauuccaucuuccacauggcugccuggucaggcagugcgugccaugaugggaaagaguggaccuauauuggaguggacggucccgauaacaaugcacugcuuaagguuaaauacggcgaggccuacacagacacuuaucacagcuacgcuaacaagauccugaggacccaggagucugccuguaauugcauugggggaaacuguuauuugaugaucacagauggcuccgcaucaggugugagcgaaugccgguuucucaaaauacgcgaggggagaauuaucaaggagauuuucccuaccggaagggucaagcacacggaagaguguacuugcggcuuugcuaguaauaaaacaaucgaaugugccugccgggacaaccgcuacaccgcgaagcgaccauucgugaaacugaauguagagacugauacagccgaaaucagauuaaugugcaccgacacguaucuggauacccccaggccuaacgacggcucuauuacagggccaugugaguccgauggagacgaggguagcggcgggauaaagggaggcuuuguucaucaacggaugaaaucgaagaucggucguugguacucucgcacuauguccaaaaccgaaagaauggggaugggccucuaugugaaguacgacggagaucccugggcagacucagaugcucuugccuucaguggcgucauggugagcgugaaggagccggggugguacuccuuuggauucgaaauuaaagacaagaaaugcgaugucccuuguaucgguauagagaugguucacgacggcgggaaggaaacauggcauucugcugccacugcaauuuauugccugaugggaagcggccaguugcuaugggauaccgugacagguguagacaucgcccuguga

SEQ ID NO: 158448 - RNA, 1401 nt, Artificial Sequence
  derived and/or modified CDS sequence (opt3) from neuraminidase__InfluenzaB__AKA54843
augcugcccagcaccauccagacacucacucuuuuccugacguccggcgggguguuguuaucucuguacgucucagccagucuaagcuaucuccuguacuccgacauucuucugaaguuuucuccuaccgagauaacagcuccaacuaugccguuggauugcgcaaacgccucgaauguucaagcggugaacagaucagcuaccaaaggaguaacacuccugcugcccgaaccugaguggaccuauccaaggcucagcugucccgguaguacuuuccagaaggccuuacugaucuccccucaccgguuuggcgaaacaaaaggaaauucugcaccacuuauuauccgcgagcccuucauugccugcgggccuaacgaauguaagcauuuugcuuugacccacuacgcagcccagccaggcgguuauuacaaugggacgcgaggagaccguaacaaacugagacaucuaaucagcgugaagcucggcaagauaccgacugucgaaaauuccaucuuccacauggcugccuggucaggcagugcgugccaugaugggaaagaguggaccuauauuggaguggacggucccgauaacaaugcacugcuuaagguuaaauacggcgaggccuacacagacacuuaucacagcuacgcuaacaagauccugaggacccaggagucugccuguaauugcauugggggaaacuguuauuugaugaucacagauggcuccgcaucaggugugagcgaaugccgguuucucaaaauacgcgaggggagaauuaucaaggagauuuucccuaccggaagggucaagcacacggaagaguguacuugcggcuuugcuaguaauaaaacaaucgaaugugccugccgggacaaccgcuacaccgcgaagcgaccauucgugaaacugaauguagagacugauacagccgaaaucagauuaaugugcaccgacacguaucuggauacccccaggccuaacgacggcucuauuacagggccaugugaguccgauggagacgaggguagcggcgggauaaagggaggcuuuguucaucaacggaugaaaucgaagaucggucguugguacucucgcacuauguccaaaaccgaaagaauggggaugggccucuaugugaaguacgacggagaucccugggcagacucagaugcucuugccuucaguggcgucauggugagcgugaaggagccggggugguacuccuuuggauucgaaauuaaagacaagaaaugcgaugucccuuguaucgguauagagaugguucacgacggcgggaaggaaacauggcauucugcugccacugcaauuuauugccugaugggaagcggccaguugcuaugggauaccgugacagguguagacauggcccuguga

SEQ ID NO: 158449 - RNA, 1401 nt, Artificial Sequence
  derived and/or modified CDS sequence (opt3) from neuraminidase__InfluenzaB__AKA54845
augcugcccagcaccauccagacacucacucuuuuccugacguccggcgggguguuguuaucucuguacgucucagccagucuaagcuaucuccuguacuccgacauucuucugaaguuuucuccuaccgagauaacagcuccaacuaugccguuggauugcgcaaacgccucgaauguucaagcggugaacagaucagcuaccaaaggaguaacacuccugcugcccgaaccugaguggaccuauccaaggcucagcugucccgguaguacuuuccagaaggccuuacugaucuccccucaccgguuuggcgaaacaaaugggaacucugcaccacuuauuauccgcgagcccuucauugccugcggaccuaaugaauguaaacauuuugcuuugacccacuacgcagcccagccaggcgguuauuacaacgggacgcgaggagaccguaauaagcugagacaucuaaucagcgugaaacucggcaagauaccgacugucgagaacuccaucuuccacauggcugccuggucaggcagugcgugccaugaugggaaggaguggaccuauauuggaguggacggucccgauaauaacgcacugcuuaaaguuaaguacggcgaagccuacacagacacuuaucacagcuacgcuaauaaaauccugaggacccaggagucugccuguaacugcauugggggaaauuguuauuugaugaucacagauggcuccgcaucaggugugagcgaaugccgguuucucaagauacgcgaggggagaauuaucaaagagauuuucccuaccggaagggucaagcacacggaagaguguacuugcggcuuugcuaguaacaagacaaucgaaugugccugccgggacaaucgcuacaccgcgaaacgaccauucgugaagcugaacguagagacugauacagccgaaaucagauuaaugugcaccgacacguaucuggauacccccaggccuaacgacggcucuauuacagggccaugugaguccgauggagacgaggguagcggcgggauaaaaggaggcuuuguucaucaacggaugaagucgaaaaucggucguugguacucucgcacuauguccaagaccgaaagaauggggaugggccucuaugugaaauacgacggagaucccugggcagacucagaugcucuugccuucaguggcgucauggugagcaugaaggagccggggugguacuccuuuggauucgaaauuaaggacaaaaagugcgaugugccuuguaucgguauagagaugguccacgacggcgggaaagaaacauggcauucugcugccacugcaauuuauugccugaugggaagcggccaguugcuaugggauaccguuacagguguggacauggcccuguga

SEQ ID NO: 158450 - RNA, 1401 nt, Artificial Sequence; identical to SEQ ID NO: 158254
  derived and/or modified CDS sequence (opt3) from neuraminidase__InfluenzaB__AKA54847

SEQ ID NO: 158451 - RNA, 1401 nt, Artificial Sequence
  derived and/or modified CDS sequence (opt3) from neuraminidase__InfluenzaB__AKA54849
augcugcccagcaccauccagacacucacucuuuuccugacguccggcgggguguuguuaucucuguacgucucagccagucuaagcuaucuccuguacuccgacauucuucugaaguuuucuucgaccgagauaacagcuccuacuaugccauuggauugcgcaaacgccucaaauguucaagcggugaacagaagcgcuaccaaaggaguaacacuccugcugccggaacccgaguggaccuauccuaggcucaguuguccagguuccacuuuccagaaggccuuacugaucucuccccaccgguuuggcgaaacaaaugggaacagcgcaccucuuauuauccgcgagccauucauugccugcggacccaaugaauguaaacauuuugcuuugacccacuacgcagcccagccuggcgguuauuacaacgggacgcgaggagaccguaauaagcugagacaucuaaucuccgugaaacucggcaagauaccaacugucgagaacucaaucuuccacauggcugccuggaguggcagcgcgugccaugaugggaaggaguggaccuauauuggaguggacgguccggauaauaacgcacugcuuaaaguuaaguacggcgaagccuacacagacacuuaucacucuuacgcuaauaaaauccugaggacccaggaguccgccuguaacugcauugggggaaauuguuauuugaugaucacagauggcucagcaagcggugugagugaaugccgguuucucaagauacgcgaggggagaauuaucaaagagauuuuccccaccggaagggucaagcacacggaagaguguacuugcggcuuugcuucuaacaagacaaucgaaugugccugccgggacaaucgcuacaccgcgaaacgaccuuucgugaagcugaacguagagacugauacagccgaaaucagauuaaugugcaccgacacguaucuggauaccccaaggcccaacgacggcuccauuacagggccuugugagagcgauggagacgaggguggcgggggaauaaaaggcgguuuuguucaucaacggaugaagucgaaaaucgggcguugguacucucgcacuauguccaagaccgaaagaaugggcaugggacucuaugugaaauacgacggcgauccaugggcagacucagaugcucuugccuucaguggggucauggugagcaugaaggagcccggaugguacuccuuugguuucgaaauuaaggacaaaaagugcgaugugccguguaucggcauagagaugguccacgacgggggaaaagaaacauggcauucugcugccacugcaauuuauugccugaugggcagcggucaguugcuaugggauaccguuacagggguggacauggcccuguga

SEQ ID NO: 158452 - RNA, 1401 nt, Artificial Sequence
  derived and/or modified CDS sequence (opt3) from neuraminidase__InfluenzaB__AKA54851
augcugcccagcaccauccagacacucacucuuuuccugacguccggcgggguguuguuaucucuguacgucucagccagucuaagcuaucuccuguacuccgacauucuucugaaguuuucuccuaccgagauaacagcuccaacuaugccguuggauugcgcaaacgccucgaauguucaagcggugaacagaucagcuaccaaaggaguaacacuccugcugcccgaaccugaguggaccuauccaaggcucagcugucccgguaguacuuuccagaaggccuuacugaucuccccucaccgguuuggcgaaacaaaaggaaauucugcaccacuuauuauccgcgagcccuucauugccugcgggccuaacgaauguaagcauuuugcuuugacccacuacgcagcccagccaggcgguuauuacaaugggacgcgaggagaccguaacaaacugagacaucuaaucagcgugaagcucggcaagauaccgacugucgaaaauuccaucuuccacauggcugccuggucaggcagugcgugccaugaugggaaagaguggaccuauauuggaguggacggucccgauaacaaugcacugcuuaagguuaaauacggcgaggccuacaucgacacauaucacagcuacgcuaacaagauucugaggacucaggagucugccuguaauugcaucgggggaaacuguuauuugaugauaaccgauggcuccgcaucaggugugagcgaaugccgguuucucaaaauucgcgaggggagaaucauuaaggagaucuucccuacaggaagggucaagcacaccgaagaguguacgugcggcuuugcuaguaauaaaacuaucgaaugugccugccgggacaaccgcuacacagcgaagcgaccauucgugaaacugaauguagagaccgauacugccgaaauuagauuaaugugcacagacaccuaucuggauacgcccaggccuaacgacggcucuauaaccgggccaugugaguccgauggagacaaggguagcggcgggaucaaaggaggcuuuguucaucaacggaugaagucgaaaauuggucguugguacucucgcacaauguccaagacugagagaauggggaugggccucuaugugaaguacgacggagaucccugggcagacucagaugcucuugccuucaguggcgucauggugagcaugaaagaaccggggugguacuccuuuggauucgagaucaaggacaaaaagugcgaugugccuuguauagguauugaaaugguccacgacggcgggaaagagaccuggcauucugcugccacagcaaucuauugccugaugggaagcggccaguugcuaugggauacuguuaccgguguggacauggcccuguga

SEQ ID NO: 158453 - RNA, 1401 nt, Artificial Sequence
  derived and/or modified CDS sequence (opt3) from neuraminidase__InfluenzaB__AKA54853
augcugcccagcaccauccagacacucacucuuuuccugacguccggcgggguguuguuaucucuguacgucucagccagucuaagcuaucuccuguacuccgacauucuucugaaguuuucuccuaccgagauaacagcuccaacuaugccguuggauugcgcaaacgccucgaauguucaagcggugaacagaucagcuaccaaaggaguaacacuccugcugcccgaaccugaguggaccuauccaaggcucagcugucccgguaguacuuuccagaaggccuuacugaucuccccucaccgguuuggcgaaacaaaaggaaauucugcaccacuuauuauccgcgagcccuucauugccugcgggccuaacgaauguaagcauuuugcuuugacccacuacgcagcccagccaggcgguuauuacaaugggacgcgaggagaccguaacaaacugagacaucuaaucagcgugaagcucggcaagauaccgacugucgaaaauuccaucuuccacauggcugccuggucaggcagugcgugccaugaugggaaagaguggaccuauauuggaguggacggucccgauaacaaugcacugcuuaagguuaaauacggcgaggccuacacagacacuuaucacagcuacgcuaacaagauccugaggacccaggagucugccuguaauugcauugggggaaacuguuauuugaugaucacagauggcuccgcaucaggugugagcgaaugccgguuucucaaaauacgcgaggggagaauuaucaaggagauuuucccuaccggaagggucaagcacacggaagaguguacuugcggcuuugcuaguaauaaaacaaucgaaugugccugccgggacaaccgcuacaccgcgaagcgaccauucgugaaacugaauguagagacugauacagccgaaaucagauuaaugugcaccgacacguaucuggauacccccaggccuaacgacggcucuauuacagggccaugugaguccgauggagacgaggguagcggcgggguuaagggaggcuuugugcaucaacggaugaaaucgaagauaggucguugguacucucgcacuauguccaaaaccgaaagaauggggaugggccucuaugucaaguacgacggagaucccugggcagacucagaugcucuugccuucaguggcgugauggugagcgucaaggagccggggugguacuccuuuggauucgaaaucaaagacaagaaaugcgauguuccuuguauugguaucgagauggugcacgacggcgggaaggaaacauggcauucugcugccacugcaauauauugccugaugggaagcggccaguugcuaugggauaccguaacagguguggacauggcccuguga

SEQ ID NO: 158454 - RNA, 1401 nt, Artificial Sequence
  derived and/or modified CDS sequence (opt3) from neuraminidase__InfluenzaB__AKA54855
augcugcccagcaccauccagacacucacucuuuuccugacguccggcgggguguuguuaucucuguacgucucagccagucuaagcuaucuccuguacuccgacauucuucugaaguuuucuccuaccgagauaacagcuccaacuaugccguuggauugcgcaaacgccucgaauguucaagcggugaacagaucagcuaccaaaggaguaacacuccugcugcccgaaccugaguggaccuauccaaggcucagcugucccgguaguacuuuccagaaggccuuacugaucuccccucaccgguuuggcgaaacaaaaggaaauucugcaccacuuauuauccgcgagcccuucauugccugcgggccuaacgaauguaagcauuuugcuuugacccacuacgcagcccagccaggcgguuauuacaaugggacgcgaggagaccguaacaaacugagacaucuaaucagcgugaagcucggcaagauaccgacugucgaaaauuccaucuuccacauggcugccuggucaggcagugcgugccaugaugggaaagaguggaccuauauuggaguggacggucccgauaacaaugcacugcuuaagguuaaauacggcgaggccuacacagacacuuaucacagcuacgcuaacaagauccugaggacccaggagucugccuguaauugcauugggggaaacuguuauuugaugaucacagauggcuccgcaucaggugugagcgaaugccgguuucucaaaauacgcgaggggagaauuaucaaggagauuuucccuaccggaagggucaagcacacggaagaguguacuugcggcuuugcuaguaauaaaacaaucgaaugugccugccgggacaaccgcuacaccgcgaagcgaccauucgugaaacuggauguagagacugacacagccgaaaucagauuaaugugcaccgauacguaucuggacacccccaggccuaaugauggcucuauuacagggccaugugaguccgacggagacaaggguagcggcgggauaaaaggaggcuuuguucaucaacggaugaagucgaaaaucggucguugguacucucgcacuauguccaagaccgagagaauggggaugggccucuaugugaaguacgauggagaccccugggcagauucagacgcucuugccuucaguggcgucauggugagcaugaaagaaccggggugguacuccuuuggauucgagauuaaggauaaaaagugcgacgugccuuguaucgguauagaaaugguccacgauggcgggaaagagacauggcauucugcugccacugcaauuuauugccugaugggaagcggccaguugcuaugggacaccguuacagguguggauauggcccuguga

SEQ ID NO: 158455 - RNA, 1401 nt, Artificial Sequence
  derived and/or modified CDS sequence (opt3) from neuraminidase__InfluenzaB__AKT07927
augcccccuagcaccauccagacacugacucucuuccuuacguccggcggggugcuguugucuuuauacgucucagccagucugagcuaucuacucuacuccgacauucugcuuaaguuuucuccaaccgagauaacagcuccgacuaugccccuggauugcgcaaacgccucgaauguucaagcggugaacagaucagcuaccaaaggaguaacauugcuccugccugaaccagaguggaccuaucccaggcugagcuguccugguaguacuuuccagaaggcccucuuaaucuccccacaccgguuuggcgaaacacgcggaaauucugcaccccugauuauccgagagccuuucauugccugcgggccaaacgaauguaaacauuuugcucuuacccacuacgcagcccagccgggcgguuauuacaaugggacgcguggagacagaaacaaguugaggcaucugaucagcgugaaacuaggcaagauacccacugucgaaaauuccaucuuccacauggcugccuggucaggcagugcgugccaugaugggaaggaguggaccuauauuggaguggacgguccugauaacaaugcacuccugaaaguuaaguacggcgaggccuacacagacacuuaucacagcuacgcuaacaaaauccuucggacccaggagucugccuguaauugcauugggggaaacuguuaucugaugaucacagauggcuccgcaucaggugugagcgaaugccgcuuuuugaagauaagagaggggaggauuaucaaagagauuuucccaaccggacgggucaagcacacggaagaguguacuugcggcuuugcuaguaauaagacaaucgaaugugccugccgcgacaacucuuacaccgcgaaacgacccuucgugaagcucaauguagagacugauacagccgaaaucagacugaugugcaccgacacguauuuagauaccccuaggccaaacgacggcuccauuacagggcccugugagagcgauggagacaaagguucgggcgggauaaagggaggcuuuguucaucaacggauggagucuaaaaucggucguugguacucccgcacuaugucaaagaccgaaagaauggggaugggccuguaugugaaauacgacggagauccguggacagacagugaugcacucgcuuucggcggggucauggugagcaugaaggagccuggaugguacuccuuugguuucgaaauuaaggacaaaaagugcgaugugcccuguaucggcauagagaugguccacgacgggggaaaagaaacuuggcauucugccgcuaccgccauuuauugccuuaugggcagcggucagcuguugugggauacaguuaccgggguggacauggcacuauga

SEQ ID NO: 158456 - RNA, 1401 nt, Artificial Sequence; identical to SEQ ID NO: 157167
  derived and/or modified CDS sequence (opt3) from neuraminidase__InfluenzaB__AKT07931

SEQ ID NO: 158457 - RNA, 1401 nt, Artificial Sequence
  derived and/or modified CDS sequence (opt3) from neuraminidase__InfluenzaB__AKT07933
augcugcccagcaccauccagacacucacucuuuuccugacguccggcgggguguuguuaucucuguacgucucagccagucuaagcuaucuccuguacuccgacauucuucugaaguuuucuccuaccgagauaacagcuccagcaaugccguuggauugcgccaacgcgucgaauguucaagcugugaacagaucagccacuaaaggaguaaccuuccuccugcccgaaccugaguggacauauccaaggcugagcugucccgguaguaccuuucagaaggcacucuuaaucuccccucaccgguucggcgaaacuaaaggaaauucugccccacugauuauccgcgagcccuuuauugcuugcgggccuaacgaauguaagcauuucgcacuuacacacuacgccgcucagccaggcgguuauuacaaugggacccgaggagaccguaacaaauugagacaucugaucagcgugaagcuaggcaagauaccgacggucgaaaauuccaucuuucacauggccgcguggucaggcagugcaugccaugaugggaaagaguggacuuauauuggaguggacggucccgauaacaaugcccuccugaagguuaaauacggcgaggcuuacaccgacacauaucacagcuacgccaacaagauccuuaggacucaggagucugcauguaauugcauugggggaaacuguuaucugaugaucaccgauggcuccgcuucaggugugagcgaaugccgguucuugaaaauacgcgaggggagaauuaucaaggagauuuuuccuacaggaagggucaagcacaccgaagaguguacgugcggcuucgccaguaauaaaacuaucgaaugugcgugccgggacaacucuuacacagccaagcgcccauuugugaaacucaauguagagaccgauacugcagaaauccgacugaugugcacagacaccuauuuagauacgcccagaccuaacgacggcuccauuaccgggccaugugagagcgauggagacaaggguucgggcgggauaaaaggaggcuucguucaucaaaggauggagucuaagaucggucggugguacucccguacaaugucaaaaacugaacgcauggggaugggccuguaugugaaguacgacggagaucccugggcugacagugaugcccucgcuuuuagcggcgucaugguguccaugaaggagccggggugguacucuuucggauucgaaauuaaagacaagaaaugcgaugugccuuguaucgguauagagaugguccacgacggcgggaaggaaaccuggcauagcgccgcaacagccauuuauugccuuaugggaucaggccagcuguugugggauacuguuaccgguguggacauggcucuauga

SEQ ID NO: 158458 - RNA, 1401 nt, Artificial Sequence; identical to SEQ ID NO: 157167
  derived and/or modified CDS sequence (opt3) from neuraminidase__InfluenzaB__AKT07935

SEQ ID NO: 158459 - RNA, 1401 nt, Artificial Sequence; identical to SEQ ID NO: 157167
  derived and/or modified CDS sequence (opt3) from neuraminidase__InfluenzaB__AKT07937

SEQ ID NO: 158460 - RNA, 1401 nt, Artificial Sequence; identical to SEQ ID NO: 157009
  derived and/or modified CDS sequence (opt3) from neuraminidase__InfluenzaB__AKT07939

SEQ ID NO: 158461 - RNA, 1401 nt, Artificial Sequence; identical to SEQ ID NO: 157167
  derived and/or modified CDS sequence (opt3) from neuraminidase__InfluenzaB__AKT07941

SEQ ID NO: 158462 - RNA, 1401 nt, Artificial Sequence; identical to SEQ ID NO: 157167
  derived and/or modified CDS sequence (opt3) from neuraminidase__InfluenzaB__AKT07945

SEQ ID NO: 158463 - RNA, 1401 nt, Artificial Sequence
  derived and/or modified CDS sequence (opt3) from neuraminidase__InfluenzaB__AKT07947
augcugcccagcaccauccagacacucacucuuuuccugacguccggcgggguguuguuaucucuguacgucucagccagucuaagcuaucuccuguacuccgacauucuucugaaguuuucuccuaccgagauaacagcuccagcaaugccguuggauugcgccaacgcgucgaauguucaagcugugaacagaucagccacuaaaggaguaacccuccugcugcccgaaccugaguggacauauccaaggcucagcugucccgguaguaccuuccagaaggcauuacugaucuccccucaccgguuuggcgaaacuaaaggaaauucugccccacuuauuauccgcgagcccuucauugcuugcgggccuaacgaauguaagcauuuugcauugacacacuacgccgcucagccaggcgguuauuacaaugggacccgaggagaccguaacaaacugagacaucuaaucagcgugaagcucggcaagauaccgacggucgaaaauuccaucuuccacauggccgcguggucaggcagugcaugccaugaugggaaagaguggacuuauauuggaguggacggucccgauaacaaugcccugcuuaagguuaaauacggcgaggcuuacaccgacacauaucacagcuacgccaacaagauccugaggacucaggagucugcauguaauugcauugggggaaacuguuauuugaugaucaccgauggcuccgcuucaggugugagcgaaugccgguuucucaaaauacgcgaggggagaauuaucaaggagauuuucccuacaggaagggucaagcacaccgaagaguguacgugcggcuuugccaguaauaaaacuaucgaaugugcgugccgggacaacucuuacacagccaagcgcccauucgugaaacugaauguagagaccgauacugcagaaauccgauuaaugugcacagacaccuaucuggauacgcccagaccuaacgacggcuccauuaccgggccaugugagagcgauggagacaaggguucgggcgggauaaaaggaggcuuuguucaucaaaggauggagucuaagaucggucggugguacucccguacaaugucaaaaacugaacgcauggggaugggccucuaugugaaguacgacggagaucccugggcugacagugaugcccuugcuuucagcggcgucaugguguccaugaaggagccggggugguacucuuuuggauucgaaauuaaagacaagaaaugcgaugugccuuguaucggugucgacaugguucacgauugcggcaaggagaccuggcauagcgccgcaacagccauauauugucugauggggucaggacaguugcuaugggacacugugaccggcguagauauggcucuguga

SEQ ID NO: 158464 - RNA, 1401 nt, Artificial Sequence; identical to SEQ ID NO: 158422
  derived and/or modified CDS sequence (opt3) from neuraminidase__InfluenzaB__AKU40585

SEQ ID NO: 158465 - RNA, 1401 nt, Artificial Sequence; identical to SEQ ID NO: 158422
  derived and/or modified CDS sequence (opt3) from neuraminidase__InfluenzaB__AKU40596

SEQ ID NO: 158466 - RNA, 1401 nt, Artificial Sequence
  derived and/or modified CDS sequence (opt3) from neuraminidase__InfluenzaB__AKU40607
augcugcccagcaccauccagacacucacucuuuuccugacguccggcgggguguuguuaucucuguacgucucagccagucuaagcuaucuccuguacuccgacauucuucugaaguuuucuagaaccgagguuacagcuccuauaacuccauuggauugcgcaaacgccucgaaugcgcaagcugugaacaggucagccaccaaaggaguaacaccgcuccugcccgaaccugaguggaccuauccacggcugagcugucccgguaguacuuuccagaaggcacucuuaaucuccccucaccgcuuuggcgaaacaaaaggaaauucugccccacugauuauccgagagcccuucauugcuugcgggccuaaggaauguaaacauuuugcacuuacccacuacgccgcucagccaggcgguuauuacaacgggacgcgugaggacagaaauaaguugaggcaucugaucagcgugaagcuaggaaaaauaccgacugucgagaacuccaucuuccacauggccgcguggucaggcagugcaugccaugauggccgggaauggaccuauauugggguggacggacccgauagcaaugcccuccugaagaucaaauacggugaggcuuacacagacacuuaucacucuuacgccaagaacauucuucgcacccaggaauccgcauguaauugcaucggcggggauuguuaucugaugauaacagacggaccugcuucaggcauuagcgagugcagauuuuugaaaaucagggagggucggauuaucaaggaaaucuucccaaccgggcgcguuaagcacacggaggaauguacuugcggauuugccaguaacaaaacaauugagugugcgugccgagauaauucuuacaccgccaagagacccuucgugaaacucaacgucgaaacugacacagcagagauaaggcugaugugcaccaagacguauuuagauaccccucggccaaaugacggcuccaucacaggccccugugagagcgauggggacgaaggaucggguggcauuaaagggggauuugugcaucaacguauggcuucuaagaucggccgcugguacuccagaacuaugucaaaaaccaagaggauggguauggggcuguauguaaaguacgacggcgauccguggacagacagugaggcccucgcucuuagcggaguuaugguguccauggaggaaccuggcugguacucuuucggguuugaaauaaaagauaagaaaugcgacguccccuguauuggaaucgagauggugcacgaugguggcaagacuaccuggcauagcgccgcaacagccaucuauugccugauggggucaggacaguugcuaugggacaccgugacuggcgucaacaugacgcuguga

SEQ ID NO: 158467 - RNA, 1401 nt, Artificial Sequence
  derived and/or modified CDS sequence (opt3) from neuraminidase__InfluenzaB__AKU40618
augcugcccagcaccauccagacacucacucuuuuccugacguccggcgggguguuguuaucucuguacgucucagccagucuaagcuaucuccuguacuccgacauucuucugaaguuuucuagaaccgagguuacagcuccuauaaugccauuggauugcgcaaacgccucgaaugugcaagcgguaaacaggucagcuacuaaaggagugaccccgcuccugcccgaaccugaguggacauauccacggcugagcugucccgguaguaccuuccagaaggcccucuuaaucuccccucaccgcuuuggcgaaacuaaaggaaauucugcaccacugauuauccgagagcccuucauugccugcgggccuaaggaauguaaacauuuugcucuuacacacuacgcagcccagccaggcgguuauuacaacgggacccgugaggacagaaauaaguugaggcaucugaucagcgucaagcuaggaaaaauaccgacgguggagaacuccaucuuccacauggcugccuggucaggcagugcgugccaugauggccgggaauggacuuauauugggguugacggacccgauagcaaugcacuccugaagaucaaauacggugaggccuacaccgacacauaucacucuuacgcuaagaacauucuucgcacucaggaauccgccuguaauugcaucggcggggauuguuaucugaugauaaccgacggaccugcaucaggcauuagcgagugcagauuuuugaaaaucagggagggucggauuaucaaggaaaucuucccaacagggcgcgugaagcacaccgaggaauguacgugcggauuugcuaguaacaaaacuauugagugugccugccgagauaauucuuacacagcgaagagacccuucgucaaacucaacguggaaaccgacacugccgagauaaggcugaugugcacaaagaccuauuuagauacgccucggccaaaugacggcuccaucaccggccccugugagagcgauggggacgaaggaucggguggcauuaaagggggauuuguacaucaacguauggcaucuaagaucggccgcugguacuccagaacaaugucaaaaacuaagaggauggguauggggcuguauguuaaguacgacggcgauccguggaccgacagugaggcucucgcccuuagcggagugauggucuccauggaggaaccuggcugguacucuuucggguuugaaauaaaagauaacaagugcgacgugcccuguauuggaaucgagauggugcacgaugguggcaaaacaacuuggcauagcgcugccaccgcaaucuauugccugauggggucaggacaguugcuaugggacacagucaccggcguuaauaugacucuguga

SEQ ID NO: 158468 - RNA, 1401 nt, Artificial Sequence
  derived and/or modified CDS sequence (opt3) from neuraminidase__InfluenzaB__AKU40640
augcugcccagcaccauccagacacucacucuuuuccugacguccggcgggguguuguuaucucuguacgucucagccagucuaagcuaucuccuguacuccgacauucuucugaaguuuucuagaaccgagauagcugcaccuaucaugccauuggauugcgccaacgcgucgaauguucaagcugugaacaggucagccacaaaaggaguagcacuccugcugccggaacccgaguggacuuauccucggcucagcuguccagguaguaccuuccagaaggccuuacugauuucuccccaccgcuuuggcgaaacaaaaggaaauuccgcuccucuuaucauucgagagccauucaucgcaugcgggcccaaggaauguaaacauuuugccuugacccacuacgcugcccagccuggcgguuauuacaacgggacucgugaggacagaaauaagcugaggcaucuaauaagcgugaagcucggaaaaaucccaacagucgagaacuccauuuuccacauggcggcauggucaggcagugccugccaugauggccgggaauggaccuauaucgggguggacggaccggauaauaacgcucugcuuaagauuaaauacggugaggccuacacggacacuuaucacagcuacgcaaagaauauccugcgcacccaggaaucugcuuguaacugcauaggcggggauuguuauuugaugauuacagacggacccgccuccggcaucucagagugcagauuucucaaaauuagggagggucggaucaucaaggaaauuuucccuacugggcgcguuaagcacaccgaggaauguacaugcggauuugcgagcaauaaaaccauagagugugccugccgagauaacaguuacacggcaaagagaccauucgugaaacugaaugucgaaacugacacagcugagaucagguuaaugugcaccgagacuuaucuggauacaccccggccuaacgacggcucuauuaccggcccaugugaauccaauggggauaagggaagcgguggcaucaaagggggauuugugcaucaacguauggccucgaagauaggccgcugguacucuagaacgauguccaaaaccaagaggauggguauggggcucuauguaaaguacgacggcgaccccuggacagauucagaggcucuugcccugaguggaguuauggugagcauggaggaaccgggcugguacuccuucggguuugaaauuaaagacaagaaaugcgaugucccuuguaucggaaucgagauggugcacgacgguggcaagacuaccuggcauucugcagccacagcuauuuauugcuugauggggagcggacagcuacugugggauacugugaccggcgucaacaugacacucuga

SEQ ID NO: 158469 - RNA, 1401 nt, Artificial Sequence; identical to SEQ ID NO: 158422
  derived and/or modified CDS sequence (opt3) from neuraminidase__InfluenzaB__AKU40662

SEQ ID NO: 158470 - RNA, 1401 nt, Artificial Sequence
  derived and/or modified CDS sequence (opt3) from neuraminidase__InfluenzaB__AKU40673
augcugcccagcaccauccagacacucacucuuuuccugacguccggcgggguguuguuaucucuguacgucucagccagucuaagcuaucuccuguacuccgacauucuucugaaguuuucuagaaccgagguuacagcuccuauaaugccauuggauugcgcaaacgccucgaaugugcaagcgguaaacaggucagcuacuaaaggagugaccccgcuccugcccgaaagcgaguggacauauccucggcugaguuguccagguuccaccuuccagaaggcccucuuaaucucuccccaccgcuuuggcgaaacuaaagggaauagcgcaccucugauuauccgagagccauucauugccugcggacccaaggaauguaaacauuuugcucuuacacacuacgcagcccagccuggcgguuauuacaacgggacccgugaggacagaaauaaguugaggcaucugaucuccgucaagcuaggaaaaauaccaacgguggagaacucaaucuuccacauggcugccuggaguggcagcgcgugccaugauggccgggaauggacuuauauugggguugacggaccggauucuaaugcacuccugaagaucaaauacggugaggccuacaccgacacauaucacuccuacgcuaagaacauucuucgcacucaggaaucagccuguaauugcaucggcggggauuguuaucugaugauaaccgacggacccgcaagcggcauuagugagugcagauuuuugaaaaucagggagggucggauuaucaaggaaaucuucccuacagggcgcgugaagcacaccgaggaauguacgugcggauuugcuucuaacaaaacuauugagugugccugccgagauaauuccuacacagcgaagagaccauucgucaaacucaacguggaaaccgacacugccgagauaaggcugaugugcacaaagaccuauuuagauacgccccggccuaaugacggcagcaucaccggcccaugugagucggauggggacgaaggaucugguggcauuaaagggggauuuguacaucaacguauggcauccaagaucggccgcugguacucaagaacaaugaguaaaacuaagaggauggguauggggcuguauguuaaguacgacggcgaucccuggaccgacagcgaggcucucgcccuuuccggagugauggucucuauggaggaaccgggcugguacagcuucggguuugaaauaaaagauaagaaaugcgacgugccuuguauuggaaucgagauggugcacgaugguggcaagacaacuuggcauucagcugccaccgcaaucuauugccugauggggaguggacaguugcuaugggacacagucaccggcguuaacaugacucuguga

SEQ ID NO: 158471 - RNA, 1401 nt, Artificial Sequence; identical to SEQ ID NO: 158422
  derived and/or modified CDS sequence (opt3) from neuraminidase__InfluenzaB__AKU40684

SEQ ID NO: 158472 - RNA, 1401 nt, Artificial Sequence; identical to SEQ ID NO: 158422
  derived and/or modified CDS sequence (opt3) from neuraminidase__InfluenzaB__AKU40695

SEQ ID NO: 158473 - RNA, 1401 nt, Artificial Sequence; identical to SEQ ID NO: 158422
  derived and/or modified CDS sequence (opt3) from neuraminidase__InfluenzaB__AKU40706

SEQ ID NO: 158474 - RNA, 1401 nt, Artificial Sequence; identical to SEQ ID NO: 158422
  derived and/or modified CDS sequence (opt3) from neuraminidase__InfluenzaB__AKU40717

SEQ ID NO: 158475 - RNA, 1401 nt, Artificial Sequence
  derived and/or modified CDS sequence (opt3) from neuraminidase__InfluenzaB__AKU40728
augcugcccagcaccauccagacacucacucuuuuccugacguccggcgggguguuguuaucucuguacgucucagccagucuaagcuaucuccuguacuccgacauucuucugaaguuuucuagaaccgagguuacagcuccuauaaugccauuggauugcgcaaacgccucgaaugcgcaagcugugaacaggucagccacuaaaggaguaaccccgcuccugcccgaaccugaguggacauauccacggcugagcugucccgguaguaccuuccagaaggcacucuuaaucuccccucaccgcuuuggcgaaacuaaaggaaauucugccccacugauuauccgagagcccuucauugcuugcgggccuaaggaauguaaacauuuugcacuuacacacuacgccgcucagccaggcgguuauuacaacgggacccgugaggacagaaauaaguugaggcaucugaucagcgugaagcuaggaaaaauaccgacggucgagaacuccaucuuccacauggccgcguggucaggcagugcaugccaugauggccgggaauggacuuauauugggguggacggacccgauagcaaugcccuccugaagaucaaauacggugaggcuuacaccgacacauaucacucuuacgccaagaacauucuucgcacucaggaauccgcauguaauugcaucggcggggauuguuaucugaugauaaccgacggaccugcuucaggcauuagcgagugcagauuuuugaaaaucagggagggucggauuaucaaggaaaucuucccaacagggcgcguuaagcacaccgaggaauguacgugcggauuugccaguaacaaaacuauugagugugcgugccgagauaauucuuacacagccaagagacccuucgugaaacucaacgucgaaaccgacacugcagagauaaggcugaugugcacaaagaccuauuuagauacgccucggccaaaugacggcuccaucaccggccccugugagagcgauggggacgaaggaucggguggcauuaaagggggauuugugcaucaacguauggcuucuaagaucggccgcugguacuccagaacaaugucaaaaacuaagaggauggguauggggcuguauguaaaguacgacggcgauccguggaccgacagugaggcccucgcucuuagcggaguuaugguguccauggaggaaccuggcugguacucuuucggguuugaaauaaaagauaagaaaugcgacguccccuguauuggaaucgagauggugcacgaugguggcaagacaacuuggcauagcgccgcaaccgccaucuauugccugauggggucaggacaguugcuaugggacacagugaccggcgucaacaugacucuguga

SEQ ID NO: 158476 - RNA, 1401 nt, Artificial Sequence
  derived and/or modified CDS sequence (opt3) from neuraminidase__InfluenzaB__AKU40739
augcugcccagcaccauccagacacucacucuuuuccugacguccggcgggguguuguuaucucuguacgucucagccagucuaagcuaucuccuguacuccgacauucuucugaaguuuucuagaaccgagguuacagcuccuauaaugccauuggauugcgcaaacgccucgaaugugcaagcgguaaacaggucagcuacuaaaggagugaccccgcuccugcccgaaccugaguggacauauccacggcugagcugucccgguaguaccuuccagaaggcccucuuaaucuccccucaccgcuuuggcgaaacuaaaggaaauucugcaccacugauuauccgagagcccuucauugccugcgggccuaaggaauguaaacauuuugcucuuacacacuacgcagcccagccaggcgguuauuacaacgggacccgugaggacagaaauaaguugaggcaucugaucagcgucaagcuaggaaaaauaccgacgguggagaacuccaucuuccacauggcugccuggucaggcagugcgugccaugauggccgggaauggacuuauauugggguugacggacccgauagcaaugcacuccugaagaucaaauacggugagaccuacacagacacuuaucacucuuacgccaagaacauucuucgcacccaggaauccgcuuguaauugcaucggcggggauuguuaucugaugauaacagacggaccugccucaggcauuagcgagugcagauuuuugaaaaucagggagggucggauuaucaaggaaaucuucccaaccgggcgcgugaagcacacggaggaauguacuugcggauuugcaaguaacaaaacaauugagugugcuugccgagauaauucuuacaccgccaagagacccuucgucaaacucaacguggaaacugacacagcggagauaaggcugaugugcaccaagacguauuuagauaccccucggccaaaugacggcuccaucacaggccccugugagagcgauggggacgaaggaucggguggcauuaaagggggauuuguacaucaacguauggccucuaagaucggccgcugguacuccagaacuaugucaaaaaccaagaggauggguauggggcuguauguuaaguacgacggcgauccguggacagacagugaggcacucgcucuuagcggagugauggucuccauggaggaaccuggcugguacucuuucggguuugaaauaaaagauaagaaaugcgacgugcccuguauuggaaucgagauggugcacgaugguggcaagacuaccuggcauagcgccgcuacagccaucuauugccugauggggucaggacaguugcuaugggacaccgucacuggcguuaacaugacgcuguga

SEQ ID NO: 158477 - RNA, 1401 nt, Artificial Sequence
  derived and/or modified CDS sequence (opt3) from neuraminidase__InfluenzaB__AKU40750
augcugcccagcaccauccagacacucacucuuuuccugacguccggcgggguguuguuaucucuguacgucucagccagucuaagcuaucuccuguacuccgacauucuucugaaguuuucuagaaccgagguuacagcuccuauaaugccauuggauugcgcaaacgccucgaaugugcaagcgguaaacaggucagcuacuaaaggagugaucccgcuccugcccgaaccugaguggaccuauccacggcugagcugucccgguaguacauuccagaaggcccucuuaauuuccccucaccgcuuuggcgaaaccaaaggaaauucugcaccacugaucauucgagagcccuucaucgccugcgggccuaaggaauguaaacauuuugcucuuacucacuacgcagcccagccaggcgguuauuacaacgggacacgugaggacagaaauaaguugaggcaucugauaagcgucaagcuaggaaaaaucccgaccguggagaacuccauuuuccacauggcugccuggucaggcagugcgugccaugauggccgggaauggacguauaucgggguugacggacccgauagcaaugcacuccugaagauuaaauacggugaggccuacacugacaccuaucacucuuacgcuaagaacauccuucgcacacaggaauccgccuguaauugcauaggcggggauuguuaucugaugauuacugacggaccugcaucaggcaucagcgagugcagauuuuugaaaauuagggagggucggaucaucaaggaaauuuucccaaccgggcgcgugaagcacacagaggaauguaccugcggauuugcuaguaacaaaacgauagagugugccugccgagauaauucuuacacugcgaagagacccuucgucaaacucaacguggaaacagacaccgccgagaucaggcugaugugcacuaagacauauuuagauaccccucggccaaaugacggcuccauuacgggccccugugagagcgauggggacgaaggaucggguggcaucaaagggggauuuguacaucaacguauggcaucuaagauaggccgcugguacuccagaaccaugucaaaaacaaagaggauggguauggggcuguauguuaaguacgacggcgauccguggacugacagugaggcucucgcccuuagcggagugauggucuccauggaggaaccuggcugguacucuuucggguuugaaauuaaagauaagaaaugcgacgugcccuguaucggaaucgagauggugcacgaugguggcaagaccacauggcauagcgcugccacugcaauuuauugccugauggggucaggacaguugcuaugggacaccgucacaggcguuaacaugacccuguga

SEQ ID NO: 158478 - RNA, 1401 nt, Artificial Sequence; identical to SEQ ID NO: 158422
  derived and/or modified CDS sequence (opt3) from neuraminidase__InfluenzaB__AKU40761

SEQ ID NO: 158479 - RNA, 1401 nt, Artificial Sequence; identical to SEQ ID NO: 158422
  derived and/or modified CDS sequence (opt3) from neuraminidase__InfluenzaB__AKU40772

SEQ ID NO: 158480 - RNA, 1401 nt, Artificial Sequence; identical to SEQ ID NO: 158422
  derived and/or modified CDS sequence (opt3) from neuraminidase__InfluenzaB__AKU40783

SEQ ID NO: 158481 - RNA, 1401 nt, Artificial Sequence
  derived and/or modified CDS sequence (opt3) from neuraminidase__InfluenzaB__AKU40794
augcugcccagcaccauccagacacucacucuuuuccugacguccggcgggguguuguuaucucuguacgucucagccagucuaagcuaucuccuguacuccgacauucuucugaaguuuucuagaaccgagguuacagcuccuauaaugccauuggauugcgcaaacacuucgaaugugcaagccguaaacaggucagcgaccaaaggagugacaccgcuccugcccgaaccugaguggaccuauccacggcugagcugucccgguaguacuuuccagaaggcucucuuaaucuccccucaccgcuuuggcgaaacaaaagggaagucugccccacugauuauccgagagcccuucauugcaugcggaccuaaagaauguaagcauuuugcccuuacccacuacgcugcacagccaggcgguuauuacaaugggacgcgugaggacagaaacaaguugaggcaucugaucagcgucaaacuaggaaagauaccgacuguggaaaauuccaucuuccacauggccgcuuggucaggcagugccugccaugauggccgggaauggaccuauauugggguugacggacccgauagcaacgcgcuccugaaaaucaaguacggugaggcauacacagacacuuaucacucuuacgccaaaaauauucuucgcacccaggaauccgcuuguaacugcaucggcggggauuguuaucugaugauaacagacggaccugccucaggcauuagcgagugcagauuuuugaagaucagggagggucggauuaucaaggaaaucuucccaaccgggcgcgugaaacacacggaggaauguacuugcggauuugcaaguaauaagacaauugagugugcuugccgagauaacucuuacaccgccaaaagacccuucgucaagcucaauguggaaacugacacagcggagauaaggcugaugugcaccaaaacguauuuagauaccccucggccaaacgacggcuccaucacaggccccugugagagcgauggggacgaaggaucggguggcauuaaagggggauuuguacaucaacguauggccucuaagaucggccgcugguacuccagaacuaugucaaagaccaagaggauggguauggggcuguauguuaaauacgacggcgauccguggacagacagugaggcacucgcucuuagcggagugauggucuccauggaggagccuggcugguacucuuucggguuugaaauaaaggauaaaaagugcgacgugcccuguauuggaaucgagauggugcacgaugguggcaaaacuaccuggcauagcgccgcuacagccaucuauugccugauggggucaggacaguugcuaugggacaccgucacuggcguuaauaugacgcuguga

SEQ ID NO: 158482 - RNA, 1401 nt, Artificial Sequence; identical to SEQ ID NO: 158422
  derived and/or modified CDS sequence (opt3) from neuraminidase__InfluenzaB__AKU40805

SEQ ID NO: 158483 - RNA, 1401 nt, Artificial Sequence; identical to SEQ ID NO: 158422
  derived and/or modified CDS sequence (opt3) from neuraminidase__InfluenzaB__AKU40816

SEQ ID NO: 158484 - RNA, 1401 nt, Artificial Sequence; identical to SEQ ID NO: 158422
  derived and/or modified CDS sequence (opt3) from neuraminidase__InfluenzaB__AKU40827

SEQ ID NO: 158485 - RNA, 1401 nt, Artificial Sequence; identical to SEQ ID NO: 158422
  derived and/or modified CDS sequence (opt3) from neuraminidase__InfluenzaB__AKU40838

SEQ ID NO: 158486 - RNA, 1401 nt, Artificial Sequence; identical to SEQ ID NO: 158422
  derived and/or modified CDS sequence (opt3) from neuraminidase__InfluenzaB__AKU40849

SEQ ID NO: 158487 - RNA, 1401 nt, Artificial Sequence; identical to SEQ ID NO: 158422
  derived and/or modified CDS sequence (opt3) from neuraminidase__InfluenzaB__AKU40860

SEQ ID NO: 158488 - RNA, 1401 nt, Artificial Sequence
  derived and/or modified CDS sequence (opt3) from neuraminidase__InfluenzaB__AKU40871
augcugcccagcaccauccagacacucacucuuuuccugacguccggcgggguguuguuaucucuguacgucucagccagucuaagcuaucuccuguacuccgacauucuucugaaguuuucuagaaccgagguuacagcuccuauaaugccauuggauugcgcaaacgccucgaaugugcaagcgguaaacaggucagcuacuaaaggaguggccccgcuccugcccgaaccugaguggaccuauccacggcugagcugucccgguaguacauuccagaaggcacucuuaaucuccccucaccgcuuuggcgaaaccaaaggaaauucugccccacugauuauccgagagcccuucauugcuugcgggccuaaggaauguaaacauuuugcacuuacucacuacgccgcucagccaggcgguuauuacaacgggacacgugaggacagaaauaaguugaggcaucugaucagcgucaagcuaggaaaaauaccgaccguggagaacuccaucuuccacauggccgcguggucaggcagugcaugccaugauggccgggaauggacguauauugggguugacggacccgauagcaaugcccuccugaagaucaaauacggugaggcuuacacugacaccuaucacucuuacgccaagaacauucuucgcacacaggaauccgcauguaauugcaucggcggggauuguuaucugaugauaacugacggaccugcuucaggcauuagcgagugcagauuuuugaaaaucagggagggucggauuaucaaggaaaucuucccaaccgggcgcgugaagcacacagaggaauguaccugcggauuugccaguaacaaaacgauugagugugcgugccgagauaauucuuacacugccaagagacccuucgucaaacucaacguggaaacagacaccgcagagauaaggcugaugugcacuaagacauauuuagauaccccucggccaaaugacggcuccaucacgggccccugugagagcgauggggacgaaggaucggguggcauuaaagggggauuuguacaucaacguauggcuucuaagaucggccgcugguacuccagaaccaugucaaaaacaaagaggauggguauggggcuguauguuaaguacgacggcgauccguggacugacagugaggcccucacccuuagcggagugauggucuccauggaggaaccuggcugguacucuuucggguuugaaauaaaagauaagaaaugcgacgugcccuguauuggaaucgagauggugcacgaugguggcaagacaacuuggcauagcgcugccaccgcaaucuauugccugauggggucaggacaguugcuaugggacacagucaccggcguuaacaugacucuguga

SEQ ID NO: 158489 - RNA, 1401 nt, Artificial Sequence; identical to SEQ ID NO: 158422
  derived and/or modified CDS sequence (opt3) from neuraminidase__InfluenzaB__AKU40882

SEQ ID NO: 158490 - RNA, 1401 nt, Artificial Sequence
  derived and/or modified CDS sequence (opt3) from neuraminidase__InfluenzaB__AKU40893
augcugcccagcaccauccagacacucacucuuuuccugacguccggcgggguguuguuaucucuguacgucucagccagucuaagcuaucuccuguacuccgacauucuucugaaguuuucuccuaccgagauaacagcuccaacuaugccguuggauugcgcaaacgccucgaauguucaagcggugaacagaucagcuaccaaaggaguaacacuccugcugcccgaaccugaguggaccuauccaaggcucagcugucccgguaguacuuuccagaaggccuuacugaucuccccucaccgguuuggcgaaacaaaaggaaauucugcaccacuuauuauccgcgagcccuucauugccugcgggccuaacgaauguaagcauuuugcuuugacccacuacgcagcccagccaggcgguuauuacaaugggacgcgaggagaccguaacaaacugagacaucuaaucagcgugaagcucggcaagauaccgacugucgaaaauuccaucuuccacauggcugccuggucaggcagugcgugccaugaugggaaagaguggaccuauauuggaguggacggucccgauaacaaugcacugcuuaagguuaaauacggcgaggccuacacagacacuuaucacagcuacgcuaacaagauccugaggacccaggagucugccuguaauugcauugggggaaacuguuauuugaugaucacagauggcuccgcaucaggugugagcgaaugccgguuucucaaaauacgcgaggggagaauuaucaaggagauuuucccuaccggaagggucaagcacacggaagaguguacuugcggcuuugcuaguaauaaaacaaucgaaugugccugccgggacaaccgcuacaccgcgaagcgaccauucgugaaacugaauguagagacugauacagccgaaaucagauuaaugugcaccgacacguaucuggauacccccaggccuaacgacggcucuauuacagggccaugugaguccgauggagacaaggguagcggcgggauaaaaggaggcuuuguucaucaacggaugaagucgaaaaucggucguugguacucucgcacuauguccaagaccgagagaauggggaugggccucuaugugaaguacgacggagaucccugggcagacucaggcgcucuugccuucaguggggucauggugagcaugaaagaaccgggaugguacuccuuugguuucgagauuaaggauaaaaagugcgacgugccuuguaucggcauagaaaugguccacgaugggggaaaagagacauggcauucugcugccacugcaauuuauugccugaugggcagcggucaguugcuaugggacaccguuacagggguggauauggcccuguga

SEQ ID NO: 158491 - RNA, 1401 nt, Artificial Sequence; identical to SEQ ID NO: 158422
  derived and/or modified CDS sequence (opt3) from neuraminidase__InfluenzaB__AKU40904

SEQ ID NO: 158492 - RNA, 1401 nt, Artificial Sequence
  derived and/or modified CDS sequence (opt3) from neuraminidase__InfluenzaB__AKU40915
augcugcccagcaccauccagacacucacucuuuuccugacguccggcgggguguuguuaucucuguacgucucagccagucuaagcuaucuccuguacuccgacauucuucugaaguuuucuagaaccgagguuacagcuccuauaaugccauuggauugcgcaaacgccucgaaugugcaagcgguaaacaggucagcuacuaaaggagugaccccgcuccugcccgaaccugaguggacauauccacggcugagcugucccgguaguaccuuccagaaggcccucuuaaucuccccucaccgcuuuggcgaaacuaaaggaaauucugcaccacugauuauccgagagcccuucauugccugcgggccuaaggaauguaaacauuuugcucuuacacacuacgcagcccagccaggcgguuauuacaacgggacccgugaggacagaaauaaguugaggcaucugaucagcgucaagcuaggaaaaauaccgacgguggagaacuccaucuuccacauggcugccuggucaggcagugcgugccaugauggccgggaauggacuuauauugggguugacggacccgauagcaaugcacuccugaagaucaaauacggugaggccuacaccgacacauaucacucuuacgcuaagaacauucuucgcacucaggaauccgccuguaauugcaucggcggggauuguuaucugaugauaaccgacggaccugcaucaggcauuagcgagugcagauuuuugaaaaucagggagggucggauuaucaaggaaaucuucccaacagggcgcgugaagcacaccgaggaauguacgugcggauuugcuaguaacaaaacuauugagugugccugccgagauaauucuuacacagcgaagagacccuucgucaaacucaacguggaaaccgacacugccgagauaaggcugaugugcacaaagaccuauuuagauacgccucggccaaaugacggcuccaucaccggccccugugagagcgauggggacgaaggaucggguggcauuaaagggggauuuguacaucaacguauggcaucuaagaucggccgcugguacuccagaacaaugucaaaaacuaagaggauggguauggggcuguauguuaaguacgacggcgauccguggaccgacagugaggcucucgcccuuagcggagugauggucccuauggaggaacccggcugguacuccuucggguuugaaauaaaagauaagaaaugcgacgugccauguauuggaaucgagauggugcacgaugguggcaagacaacuuggcauucugcugccaccgcaaucuauugccugauggggagcggacaguugcuaugggacacagucaccggcguuaacaugacucuguga

SEQ ID NO: 158493 - RNA, 1401 nt, Artificial Sequence; identical to SEQ ID NO: 158422
  derived and/or modified CDS sequence (opt3) from neuraminidase__InfluenzaB__AKU40926

SEQ ID NO: 158494 - RNA, 1401 nt, Artificial Sequence; identical to SEQ ID NO: 158476
  derived and/or modified CDS sequence (opt3) from neuraminidase__InfluenzaB__AKU40937

SEQ ID NO: 158495 - RNA, 1401 nt, Artificial Sequence; identical to SEQ ID NO: 158422
  derived and/or modified CDS sequence (opt3) from neuraminidase__InfluenzaB__AKU40948

SEQ ID NO: 158496 - RNA, 1401 nt, Artificial Sequence; identical to SEQ ID NO: 158422
  derived and/or modified CDS sequence (opt3) from neuraminidase__InfluenzaB__AKU40959

SEQ ID NO: 158497 - RNA, 1401 nt, Artificial Sequence; identical to SEQ ID NO: 158422
  derived and/or modified CDS sequence (opt3) from neuraminidase__InfluenzaB__AKU40970

SEQ ID NO: 158498 - RNA, 1401 nt, Artificial Sequence; identical to SEQ ID NO: 158422
  derived and/or modified CDS sequence (opt3) from neuraminidase__InfluenzaB__AKU40981

SEQ ID NO: 158499 - RNA, 1401 nt, Artificial Sequence; identical to SEQ ID NO: 158422
  derived and/or modified CDS sequence (opt3) from neuraminidase__InfluenzaB__AKU40991

SEQ ID NO: 158500 - RNA, 1401 nt, Artificial Sequence; identical to SEQ ID NO: 158422
  derived and/or modified CDS sequence (opt3) from neuraminidase__InfluenzaB__AKU41002

SEQ ID NO: 158501 - RNA, 1401 nt, Artificial Sequence; identical to SEQ ID NO: 158422
  derived and/or modified CDS sequence (opt3) from neuraminidase__InfluenzaB__AKU41013

SEQ ID NO: 158502 - RNA, 1401 nt, Artificial Sequence; identical to SEQ ID NO: 158422
  derived and/or modified CDS sequence (opt3) from neuraminidase__InfluenzaB__AKU41024

SEQ ID NO: 158503 - RNA, 1401 nt, Artificial Sequence; identical to SEQ ID NO: 157009
  derived and/or modified CDS sequence (opt3) from neuraminidase__InfluenzaB__EPI173278

SEQ ID NO: 158504 - RNA, 1401 nt, Artificial Sequence; identical to SEQ ID NO: 157009
  derived and/or modified CDS sequence (opt3) from neuraminidase__InfluenzaB__EPI498049

SEQ ID NO: 158505 - RNA, 1401 nt, Artificial Sequence; identical to SEQ ID NO: 157009
  derived and/or modified CDS sequence (opt3) from neuraminidase__InfluenzaB__AFH57913

SEQ ID NO: 158506 - RNA, 1401 nt, Artificial Sequence; identical to SEQ ID NO: 157009
  derived and/or modified CDS sequence (opt3) from neuraminidase__InfluenzaB__EPI827074

SEQ ID NO: 158507 - RNA, 1401 nt, Artificial Sequence; identical to SEQ ID NO: 157009
  derived and/or modified CDS sequence (opt3) from neuraminidase__InfluenzaB__EPI244698

SEQ ID NO: 158508 - RNA, 1401 nt, Artificial Sequence; identical to SEQ ID NO: 157009
  derived and/or modified CDS sequence (opt3) from neuraminidase__InfluenzaB__EPI244701

SEQ ID NO: 158509 - RNA, 1401 nt, Artificial Sequence; identical to SEQ ID NO: 158422
  derived and/or modified CDS sequence (opt3) from neuraminidase__InfluenzaB__EPI540672

SEQ ID NO: 158510 - RNA, 1401 nt, Artificial Sequence; identical to SEQ ID NO: 158422
  derived and/or modified CDS sequence (opt3) from neuraminidase__InfluenzaB__EPI829465

SEQ ID NO: 158511 - RNA, 1401 nt, Artificial Sequence
  derived and/or modified CDS sequence (opt3) from neuraminidase__InfluenzaB__EPI684428
augcugcccagcaccauccagacacucacucuuuuccugacguccggcgggguguuguuaucucuguacgucucagccagucuaagcuaucuccuguacuccgacauucuucugaaguuuucuagaaccgagguuacagcuccuacuaugccauuggauugcgcaaacgccucgaaugugcaagcgguaaacaggucaaccacaaaaggagugaccccgcuuuuccccgaaccugaguggacuuauccacggcugagcugucccgguaguacauuucagaaggcucugcucauauccccucaccgcuucggcgaaaccaaaggaaauucugccccauuaaucauucgagagcccuuuaucgcaugcgggccuaaggaauguaaacauuucgcccugacgcacuacgcugcacagccaggcgguuauuacaacgggacucgugaggacagaaauaagcucaggcauuugauuagcgucaagcugggaaaaaucccgaccguggagaacuccauauuucacauggccgcuuggucaggcagugccugccaugauggccgggaauggacauauaucgggguugacggacccgauagcaaugcgcuacucaagauuaaauacggugaggcauacacugacaccuaucacucuuacgccaagaacauccugcgcacacaggaauccgcuuguaauugcauuggcggggauuguuaucuuaugaucaccgacggaccugccucaggcgugagcgagugcagauuccugaaaauaagggagggucggauuaucaaggaaauuuuuccaacggggcgcgucaagcacacugaggaauguacaugcggauucgcaaguaacaaaaccaucgagugugcuugccgagauaauagauacacugccaagaggcccuuugugaaauugaacguagaaacagacaccgcggagauccggcucaugugcacgaagaccuaucuggauacaccucguccaaaugacggcucuauuacuggccccugugaguccgauggggacgaaggaagcgguggcauaaaagggggauucguucaucaacgcauggccucgaagaucggcagaugguacucuaggaccauguccaaaacaaagcggauggguaugggguuauaugugaaguacgacggcgauccguggacugacucagaggcacuggcucucaguggagucauggugagcauggaggaaccuggcugguacuccuuuggguucgaaauuaaagauaagaaaugcgacgugcccuguaucggaauagagaugguccacgaugguggcaagaccacauggcauucugccgcuaccgccauuuauugccuuauggggagcggacagcuguugugggacacuguuacgggcgugaacaugacacuauga

SEQ ID NO: 158512 - RNA, 1401 nt, Artificial Sequence; identical to SEQ ID NO: 157031
  derived and/or modified CDS sequence (opt3) from neuraminidase__InfluenzaB__AFH58451

SEQ ID NO: 158513 - RNA, 1401 nt, Artificial Sequence; identical to SEQ ID NO: 157009
  derived and/or modified CDS sequence (opt3) from neuraminidase__InfluenzaB__EPI173280

SEQ ID NO: 158514 - RNA, 1401 nt, Artificial Sequence; identical to SEQ ID NO: 157009
  derived and/or modified CDS sequence (opt3) from neuraminidase__InfluenzaB__EPI186302

SEQ ID NO: 158515 - RNA, 1401 nt, Artificial Sequence
  derived and/or modified CDS sequence (opt3) from neuraminidase__InfluenzaB__EPI636339
augcugcccagcaccauccagacacucacucuuuuccugacguccggcgggguguuguuaucucuguacgucucagccagucuaagcuaucuccuguacuccgacauucuucugaaguuuucuccuaccgagauaacagcuccaacuaugccguuggauugcgcaaacgccucgaauguucaagcggugaacagaucagcuaccaaaggaguaacacuccugcugcccgaaccugaguggaccuauccaaggcucagcugucccgguaguacuuuccagaaggccuuacugaucuccccucaccgguuuggcgaaacaaaaggaaauucugcaccacuuauuauccgcgagcccuucguggccugcgggccuaacgaauguaagcauuuugcuuugacccacuacgcagcccagccaggcgguuauuacaaugggacgcgaggagaccguaacaaacugagacaucuaauuagcgucaagcucggcaagaucccgacuguggaaaauuccauauuccacauggcugccuggucaggcagugcgugccaugaugggaaagaguggaccuauaucggaguugacggucccgauaacaaugcacugcuuaaggugaaauacggcgaggccuacacagacacuuaucacagcuacgcuaacaauauucugaggacccaggagucugccuguaacugcaucgggggaaauuguuauuugaugauuacagauggcuccgcaucaggugucagcgaaugccgguuucucaagauccgcgaggggagaauaauuaaagagaucuucccuaccggaagggugaagcacacggaagaguguacuugcggcuuugcuaguaacaagacaauugaaugugccugccgggacaaucgcuacaccgcgaaacgaccauucguaaagcugaacguugagacugauacagccgaaaucagauuaaugugcaccgacacguaucuggauacccccaggccuaacgacggcucuaucacagggccaugugaguccgauggagacaaagguagcggcgggauuaagggaggcuuugugcaucaacggaugaaaucgaagauaggucguugguacucucgcacuauguccaaaaccgagagaauggggaugggccucuaugucaaguacggaggcgaccccugggcagauucagacgcucuugccuucaguggggugauggugagcaugaaggaaccgggaugguacuccuuugguuucgagaucaaagauaagaaaugcgacgucccuuguauuggcaucgaaaugguucacgaugggggaaaggagacauggcauucugcugccacugcaauauauugccugaugggcagcggucaguugcuaugggacaccgugacagggguagauauggcccuguga

SEQ ID NO: 158516 - RNA, 1401 nt, Artificial Sequence; identical to SEQ ID NO: 158515
  derived and/or modified CDS sequence (opt3) from neuraminidase__InfluenzaB__EPI645996

SEQ ID NO: 158517 - RNA, 1401 nt, Artificial Sequence
  derived and/or modified CDS sequence (opt3) from neuraminidase__InfluenzaB__EPI539770
augcugcccagcaccauccagacacucacucuuuuccugacguccggcgggguguuguuaucucuguacgucucagccagucuaagcuaucuccuguacuccgacauucuucugaaguuuucuagaaccgagguuacagcuccuauaaugccauuggauugcgcaaacgccucgaaugcgcaagcugugaacaggucagccacuaaaggaguaaccccgcuccugcccgaaccugaguggacauauccacggcugagcugucccgguaguaccuuccagaaggcacucuuaaucuccccucaccgcuuuggcgaaacuaaaggaaauucugccccacugauuauccgagagcccuucauugcuugcgggccuaaggaauguaaacauuuugcacuuacacacuacgccgcucagccaggcgguuauuacaacgggacccgugaggacagaaauaaguugaggcaucugaucagcgugaagcuaggaaaaauaccgacggucgagaacuccaucuuccacauggccgcguggucaggcagugcaugccaugauggccgggaauggacuuauauugggguggacggacccgauagcaaugcccuccugaagaucaaauacggugaggcuuacaccgacacauaucacucuuacgccaagaacauucuucgcacucaggaauccgcauguaauugcaucggcggggauuguuaucugaugauaaccgacggaccugcuucaggcauuagcgagugcagauuuuugaaaaucagggagggucggauuaucaaggaaaucuucccaacagggcgcguuaagcacaccgaggaauguacgugcggauuugccaguaacaaaacuauugagugugcgugccgagauaauucuuacacagccaagagacccuucgugaaacucaacgucgaaaccgacacugcagagauaaggcugaugugcacaaagaccuauuuagauacgccucggccaaaugacggcuccaucaccggccccugugagagcgauggggacgaaggaucggguggcauuaaagggggauuugugcaucaacguauggcuucuaagaucggccgcugguacuccagaacaaugucaaaaacuaagaggauggguauggggcuguauguaaaguacgacggcgauccguggaccgacagugaggcccucgcucuuagcggaguuaugguguccauggaggaaccuggcugguacucuuucggguuugaaauaaaagauaagaaaugcgacguccccuguauuggaaucgagauggugcacgaugguggcaagacaacuuggcauagcgccgcaaccacaaucuauugccugauggggucaggacaguugcuaugggacaccgugacuggcgucaacauuacgcuguga

SEQ ID NO: 158518 - RNA, 1401 nt, Artificial Sequence; identical to SEQ ID NO: 158517
  derived and/or modified CDS sequence (opt3) from neuraminidase__InfluenzaB__EPI551248

SEQ ID NO: 158519 - RNA, 1401 nt, Artificial Sequence; identical to SEQ ID NO: 158517
  derived and/or modified CDS sequence (opt3) from neuraminidase__InfluenzaB__EPI544258

SEQ ID NO: 158520 - RNA, 1401 nt, Artificial Sequence; identical to SEQ ID NO: 158422
  derived and/or modified CDS sequence (opt3) from neuraminidase__InfluenzaB__EPI592698

SEQ ID NO: 158521 - RNA, 1401 nt, Artificial Sequence; identical to SEQ ID NO: 158422
  derived and/or modified CDS sequence (opt3) from neuraminidase__InfluenzaB__EPI592706

SEQ ID NO: 158522 - RNA, 1401 nt, Artificial Sequence
  derived and/or modified CDS sequence (opt3) from neuraminidase__InfluenzaB__EPI693093
augcugcccagcaccauccagacacucacucuuuuccugacguccggcgggguguuguuaucucuguacgucucagccagucuaagcuaucuccuguacuccgacauucuucugaaguuuucuagaaccgagguuacagcuccuauaaugccauuggauugcgcaaacgccucgaaugugcaagcgguaaacaggucagcuacuaaaggagugaccccgcuccugcccgaaccugaguggacauauccacggcugagcugucccgguaguaccuuccagaaggcccucuuaaucuccccucaccgcuuuggcgaaacuaaaggaaauucugcaccacugauuauccgagagcccuucauugccugcgggccuaaggaauguaaacauuuugcucuuacacacuacgcagcccagccaggcgguuauuacaacgggacccgugaggacagaaauaaguugaggcaucugaucagcgucaagcuaggaaaaauaccgacgguggagaacuccaucuuccacauggcugccuggucaggcagugcgugccaugauggccgggaauggacuuauauugggguugacggacccgauagcaaugcacuccugaagaucaaauacggugaggccuacaccgacacauaucacucuuacgcuaagaacauucuucgcacucaggaauccgccuguaauugcaucggcggggauuguuaucugaugauaaccgacggaccugcaucaggcauuagcgagugcagauuuuugaaaaucagggagggucggauuaucaaggaaaucuucccaacagggcgcgugaagcacaccgaggaauguacgugcggauuugcuaguaacaaaacuauugagugugccugccgagauaauucuuacacagcgaagagacccuucgucaaacucaacguggaaaccgacacugccgagauaaggcugaugugcacaaagaccuauuuagauacgccucggccaaaugacggcuccaucaccggccccugugagagcgauggggacgaaggaucggguggcauuaaagggggauuuguacaucaacguauggagucuaagaucggccgcugguacuccagaacaaugucaaaaacuaagaggauggguauggggcuguauguuaaguacgacggcgauccguggaccgacagugaagcacucgcucuuagcggagugauggucuccauggaggaaccuggcugguacucuuucggguuugagauaaaagauaagaaaugcgacgugcccuguauuggaaucgagauggugcacgaugguggcaagacaacuuggcauagcgccgcuaccgccaucuauugccugauggggucaggacaguugcuaugggacacagucaccggcguuaacaugacucuguga

SEQ ID NO: 158523 - RNA, 1401 nt, Artificial Sequence
  derived and/or modified CDS sequence (opt3) from neuraminidase__InfluenzaB__EPI678795
augcugcccagcaccauccagacacucacucuuuuccugacguccggcgggguguuguuaucucuguacgucucagccagucuaagcuaucuccuguacuccgacauucuucugaaguuuucuccuaccgagauaacagcuccaacuaugccguuggauugcgcaaacgccucgaauguucaagcggugaacagaucagcuaccaaaggaguaacauuccuccugcccgaaccugaguggaccuauccaaggcugagcugucccgguaguacuuuucagaaggcccucuuaaucuccccucaccgguucggcgaaacaaaaggaaauucugcaccacugauuauccgcgagcccuuuguggccugcgggccuaacgaauguaagcauuucgcucuuacccacuacgcagcccagccaggcgguuauuacaaugggacgcgaggagaccguaacaaauugagacaucugauuagcgucaagcuaggcaagaucccgacuguggaaaauuccauauuucacauggcugccuggucaggcagugcgugccaugaugggaaagaguggaccuauaucggaguugacggucccgauaacaaugcacuccugaaggugaaauacggcgaggccuacacagacacuuaucacagcuacgcuaacaauauucuuaggacccaggagucugccuguaacugcaucgggggaaauuguuaucugaugauuacagauggcuccgcaucaggugucagcgaaugccgguucuugaagauccgcgaggggagaauaauuaaagagaucuuuccuaccggaagggugaagcacacggaagaguguacuugcggcuucgcuaguaacaagacaauugaaugugccugccgggacaaucgcuacaccgcgaaacgaccauuuguaaagcucaacguugagacugauacagccgaaaucagacugaugugcaccgacacguauuuagauacccccaggccuaacgacggcucuaucacagggccaugugaguccgauggagacaaagguagcggcgggauuaagggaggcuucgugcaucaacggaugaaaucgaagauaggucguugguacucucgcacuauguccaaaaccgagagaauggggaugggccuguaugucaaguacggaggcaaucccugggcagacucagaugcucucacauuuaguggggugauggugagcaugaaggaaccgggaugguacuccuucgguuucgagaucaaagacaagaaaugcgaugucccuuguauuggcaucgaaaugguucacgacgggggaaaggagacuuggcauucugccgcuaccgccauauauugccuuaugggcagcggucagcuguugugggauacagugaccgggguagacauggcacuauga

SEQ ID NO: 158524 - RNA, 1401 nt, Artificial Sequence; identical to SEQ ID NO: 158523
  derived and/or modified CDS sequence (opt3) from neuraminidase__InfluenzaB__EPI721063

SEQ ID NO: 158525 - RNA, 1401 nt, Artificial Sequence; identical to SEQ ID NO: 156943
  derived and/or modified CDS sequence (opt3) from neuraminidase__InfluenzaB__EPI328903

SEQ ID NO: 158526 - RNA, 1401 nt, Artificial Sequence
  derived and/or modified CDS sequence (opt3) from neuraminidase__InfluenzaB__EPI543192
augcugcccagcaccauccagacacucacucuuuuccugacguccggcgggguguuguuaucucuguacgucucagccagucuaagcuaucuccuguaccuugacauucuguugaaguuuccuuccaccgagauaacagcuccaacuaugccgcucgauugcgcaaacgccucuaauguucaagcggugaacagaucggcuaccaaaggaguaacacugcugcuccccgaaccugaguggaccuauccaagguuaucaugucccgguagcacuuuccagaaggcccugcuuaucaguccucaccgguuuggcgaaacaaaaggaaauuccgcaccauugauuauccgcgagcccuucauugccugcgggccuaaggaauguaaacauuuugcucugacccacuacgcagcccagccaggcgguuauuacaacgggacgcgaggagaccguaauaagcuaagacaucucaucucugugaagcugggcaaaauaccgacugucgagaacagcaucuuccacauggcugccugguccggcucagcgugccaugaugggaaggaguggaccuauauuggaguggacggucccgauaauaacgcacuucugaaaaucaaguacggcgaagccuacacagacacuuaucacaguuacgcuaauaacauuuugaggacccaggagagcgccuguaauugcaucgggggaaacuguuaucucaugauaacagauggcucugcauccgguguuucagaaugccgguuucugaaaauucgcgaggggagaaucaugaaggagauuuucccuaccggaaggacgcaacacacugaagaguguacaugcggcuuugcuagcaauaagaccaucgaaugugccugccgggacaacaguuacacugcgaaacgcccauucgugaaguuaaaugucgagacagauaccgccgaaauccgacugaugugcacgaaaaccuaucucgacacacccagaccugaugacggcucuauuacugggccaugugaguccaacggagguaagggcagcgggggaauaaaaggcgguuuugugcaucagaggauggcaucgaagaucgggcggugguacucucguaccauguccaaaacagagcgcaagggcaugggacuuuauauuaaguacaacggcgaucccugggcugacucagacgcccugacuuucagugggguaaugguuagcauggaggaaccgggaugguacuccuuugguuucgaaaucaaagauaagaaaugcgacgugccuuguauaggcauugagaugguccacgaugggggaaaggaaaccuggcauucugcugccacagcaaucuauugcuugaugggcagcggucagcuacugugggacaccgugacuggggugaauaugacgcucuga

SEQ ID NO: 158527 - RNA, 1401 nt, Artificial Sequence; identical to SEQ ID NO: 158526
  derived and/or modified CDS sequence (opt3) from neuraminidase__InfluenzaB__EPI500360

SEQ ID NO: 158528 - RNA, 1401 nt, Artificial Sequence
  derived and/or modified CDS sequence (opt3) from neuraminidase__InfluenzaB__EPI543186
augcugcccagcaccauccagacacucacucuuuuccugacguccggcgggguguuguuaucucuguacgucucagccagucuaagcuaucuccuguacuccgacauucuucugaaguuuucuagaaccgagguuacagcuccuauaaugccauuggauugcgcaaacgccucgaaugugcaagcgguaaacaggucagcuacuaaaggagugaccccgcuccugcccgaaccugaguggacauauccacggcugagcugucccgguaguaccuuccagaaggcccucuuaaucuccccucaccgcuuuggcgaaacuaaaggaaauucugcaccacugauuauccgagagcccuucauugccugcgggccuaaggaauguaaacauuuugcucuuacacacuacgcagcccagccaggcgguuauuacaacgggacccgugaggacagaaauaaguugaggcaucugaucagcgucaagcuaggaaaaauaccgacgguggagaacuccaucuuccacauggcugccuggucaggcagugcgugccaugauggccgggaauggacuuauauugggguugacggacccgauagcaaugcacuccugaagaucaaauacggugaggccuacaccgacacauaucacucuuacgcuaagaacauucuucgcacucaggaauccgccuguaauugcaucggcggggauuguuaucugaugauaaccgacggaccugcaucaggcauuagcgagugcagauuuuugaaaaucagggagggucggauuaucaaggaaaucuucccaacagggcgcgugaagcacaccgaggaauguacgugcggauuugcuaguaacaaaacuauugagugugccugccgagauaauucuuacacagcgaagagacccuucgucaaacucaacguggaaaccgacacugccgagauaaggcugaugugcacaaagaccuauuuagauacgccucggccaaaugacggcuccaucaccggccccugugagagcgauggggacgaaggaucggguggcauuaaagggggauuuguacaucaacguauggcaucuaagaucggccgcugguacuccagaacaaugucaaaaacuaagaggauggguauggggcuguauguuaaguacgacggcgauccguggaccgacagugaggcucucgcccuuagcggagugauggucuccauggaggaaccuggcugguacucuuucggguuugaaauaaaagauaagaaaugcgacgugcccuguauuggaaucgagauggugcacgaugguggcaagacaacuuggcauagcgcugccaccgucaucuauugccugauggggucaggacaguugcuaugggacacaguuaccggcgugaacaugacucuguga

SEQ ID NO: 158529 - RNA, 1401 nt, Artificial Sequence; identical to SEQ ID NO: 158528
  derived and/or modified CDS sequence (opt3) from neuraminidase__InfluenzaB__EPI536448

SEQ ID NO: 158530 - RNA, 1401 nt, Artificial Sequence
  derived and/or modified CDS sequence (opt3) from neuraminidase__InfluenzaB__NP_056663
augcugcccagcaccgugcagacacucacucuucuguugacguccggcggggucuuacugucucuauacguuucagccagucucagcuaucugcuuuacuccgacgugcuguugaaguucucuucgaccaaaacaacugcuccuaccaugucacucgagugcacaaacgcaagcaaugcccaaaccguaaaccacagugcgacuaaggaaaugacauuuccaccgcccgagccugaauggaccuauccaagacuguccugucagggaucuacguuccagaaagcucugcucaucagcccccauagguuuggugagauuaagggcaauuccgccccuuuaauaauccgggaaccauucguggcaugcgggcccaaagagugucgccacuuugcccugacucauuacgcugcacagccuggaggcuauuacaacgguacccgaaaggaucguaauaaacuuagacacuuggucucagugaagcuggggaagauuccaacaguugagaacaguaucuuccauauggccgcuuggagcggaucugccugccacgacggcagggaauggacuuauauuggcguggaugggccggacaaugaugcgcuagucaaaaucaaguacggagaggcauacaccgacacauaucacuccuacgcccauaacauacuccggacccaagaaucagcuuguaauugcaucgguggcgauuguuaucugaugauuacggacgggagcgccaguggaaucucuaaaugccgcuuucuuaagauuagagagggcaggaucauaaaggagauucugcccacuggucggguggaacacacagaggaauguaccugcggguucgcauccaacaaaacuaucgagugugcuugccgcgauaauagcuacacagccaagcgaccuuuuguaaaauugaacguugaaaccgacacggcggagauuagacucaugugcaccaagacauaucuggauacuccaaggcccgacgauggaucgaucgccggcccuugugagucuaauggcgacaaaugguuagggggaaucaaggguggcuucgugcaucagcggauggcauccaaaauugggcguugguacucacgcaccaugaguaagacaaacagaaugggaauggaacuguaugucaaguacgacggcgauccauggacugacagcgaugcucucacccuuuccggugugauggugucuauagaggaacccgggugguacagcuuuggcuucgagaucaaagacaagaaaugcgaugucccguguauuggaaucgaaaugguucacgacggcgggaaggauacauggcacucagccgcuaccgccauauauugccugaugggaaguggucaguugcuaugggacacugugacgggcguagauauggcacuguga

SEQ ID NO: 158531 - RNA, 1401 nt, Artificial Sequence
  derived and/or modified CDS sequence (opt3) from neuraminidase__InfluenzaB__ABG85180
augcugcccagcaccgugcagacacucacucuucuguugacguccggcggggucuuacugucucuauacguuucagccagucucagcuaucugcuuuacuccgacgugcuguugaaguucucuucgaccaaaacaacugcuccuaccaugucacucgagugcacaaacgcaagcaaugcccaaaccguaaacuauagugcgacuaaggaaaugacauuuccaccgcccgagccugaauggaccuacccaagacuguccugucagggaucuacguuccagaaagcucugcucaucagcccccacagguuuggugagauuaagggcaauuccgccccuuuaauaauccgggaaccauucguggcaugcgggcccaaagagugucgccauuuugcccugacucacuaugcugcacagccuggaggcuacuaucaugguacccgaaaggaucguaacaaacuuagacacuuggucucagugaagcuggggaagauuccaacaguugagaauaguaucuuccauauggccgcuuggagcggaucugccugccacgacggcagggaauggacuuacauuggcguggaugggccggacaacgaugcgcuagucaaaaucaaguacggagaggcauauaccgacacauaccacuccuaugcccauaauauacuccggacccaagaaucagcuuguaacugcaucgguggcgauuguuaccugaugauuacggacgggagcgccaguggaaucucuaaaugccgcuuucuuaagauuagagagggcaggaucauaaaggagauucugcccacuggucggguggaacacacagaggaauguaccugcggguucgcauccaauaaaacuaucgagugugcuugccgcgauaacagcuauacagccaagcgaccuuuuguaaaauugaauguugaaaccgacacggcggagauuagacucaugugcaccaagacauaccuggauacuccaaggcccgacgauggaucgaucgccggcccuugugagucuaacggcgacaaaggguuaggagguaucaagggcggguucgugcaucagcggauggcauuuaaaauuggacguugguauucccgcaccaugucaaagacaaauagaaugggcauggaacuguacgucaaguacgacggugauccauggacugacagugaugcucucacccuuagcggggugaugguguccauagaggaacccggcugguauucuuucggauuugagaucaaagacaagaaaugcgaugucccguguauuggcaucgaaaugguucacgacgggggagaggauacauggcacagcgccgcuaccgccauauacugccugauggguucaggccaguugcuaugggacacugugacggggauugauauggcacuguga

SEQ ID NO: 158532 - RNA, 1401 nt, Artificial Sequence; identical to SEQ ID NO: 158421
  derived and/or modified CDS sequence (opt3) from neuraminidase__InfluenzaB__EPI376345

SEQ ID NO: 158533 - RNA, 1401 nt, Artificial Sequence; identical to SEQ ID NO: 158421
  derived and/or modified CDS sequence (opt3) from neuraminidase__InfluenzaB__EPI368424

SEQ ID NO: 158534 - RNA, 1401 nt, Artificial Sequence
  derived and/or modified CDS sequence (opt3) from neuraminidase__InfluenzaB__EPI331150
augcugcccagcaccauccagacacucacucuuuuccugacguccggcgggguguuguuaucucuguacgucucagccagucuaagcuaucuccuguacuccgacauucuucugaaguuuucuccuaccgagauaacagcuccaacuaugccguuggauugcgcaaacgccucgaauguucaagcgaugaacagaucagcuaccaaaggagugacacuccugcugcccgaaccugaguggaccuauccaaggcucagcugucccgguaguacuuuccagaaggccuuacugaucuccccucaccgguuuggcgaaacaaaaggaaauucugcaccacuuauuauccgcgagcccuucauugccugcgggccuaacgaauguaagcauuuugcuuugacccacuacgcagcccagccaggcgguuauuacaaugggacgcgaggagaccguaacaaacugagacaucuaaucagcguaaagcucggcaagauaccgacuguggaaaauuccaucuuccacauggcugccuggucaggcagugcgugccaugaugggaaagaguggaccuauauuggagucgacggucccgauaacaaugcacugcuuaaggugaaauacggcgaggccuacacagacacuuaucacagcuacgcuaacaagauccugaggacccaggagucugccuguaauugcauugggggaaacuguuauuugaugaucacagauggcuccgcaucagguguuagcgaaugccgguuucucaaaauacgcgaggggagaauuaucaaggagauuuucccuaccggaagggugaagcacacggaagaguguacuugcggcuuugcuaguaauaaaacaaucgaaugugccugccgggacaacucuuacaccgcgaagcgcccauucgucaaacugaauguggagacugauacagccgaaauccgauuaaugugcaccgacacguaucuggauacccccagaccuaacgacggcuccauuacagggccaugugagagcgauggagacaaggguucgggcgggauaaaaggaggcuuuguacaucaaaggauggagucuaagaucggucggugguacucccguacuaugucaaaaaccgaacgcauggggaugggccucuauguuaaguacgacggagaucccugggcagacagugaugcucuugccuucagcggcgugauggucuccaugaaggagccggggugguacucuuuuggauucgaaauuaaagacaagaaaugcgaugugccuuguaucgguauagagauggugcacgacggcgggaaggaaacauggcauagcgcugccacugcaauuuauugccugaugggaucaggccaguugcuaugggauaccgucacagguguugacauggcccuguga

SEQ ID NO: 158535 - RNA, 1401 nt, Artificial Sequence; identical to SEQ ID NO: 158534
  derived and/or modified CDS sequence (opt3) from neuraminidase__InfluenzaB__EPI358089

SEQ ID NO: 158536 - RNA, 1401 nt, Artificial Sequence; identical to SEQ ID NO: 156680
  derived and/or modified CDS sequence (opt3) from neuraminidase__InfluenzaB__ABL76698

SEQ ID NO: 158537 - RNA, 1401 nt, Artificial Sequence
  derived and/or modified CDS sequence (opt3) from neuraminidase__InfluenzaB__AAD42328
augcugcccagcaccauccagacacucacucuuuuccugacguccggcgggguguuguuaucucuguacgucucagccagucuaagcuaucuccuguacuccgacauucuucugaaguuuucuccuaccgagauaacagcuccaacuaugccguuggauugcgcaaacgccucgaauguucaagcggugaacagaucagcuaccaaaggaaugacacuccugcugcccgaaccugaguggaccuauccaaggcucagcugucccgguaguacuuuccagaaggccuuacugaucuccccucaccgguuuggcgaaacacgcggaaauucugcaccacuuaccauucgagagcccuucaucgccugcgggccuaaagaauguaagcauuuugcuuugacgcacuacgcagcccagccaggcgguuauuacaacgggacucgugaggacagaaauaaacugaggcaucuaauuagcguaaagcucggaaagaucccgaccguggagaacuccauauuccacauggcugccuggucaggcagugcgugccaugauggccgggaauggacauauaucggggucgacggacccgauagcaaugcacugauuaaaaucaaguacggugaggccuacacugacaccuaucacucuuacgcuaacaauauucuucgcacacaggaauccgccuguaacugcaucggcggggauuguuaucugaugauaaccgacggaucagcaagcggcauuaguaaaugcagauuuuugaagaucagggagggucggauuaucaaagagaucuucccuacggggcgcguggaacacacugaggaauguacaugcggauuugcuucuaauaagaccauugagugugccugccgagauaacuccuacacugcgaagagaccauucguuaaacucaauguggaaacagacaccgccgagauaaggcugaugugcacggagaccuauuuagauacaccccggccugacgauggcagcaucacuggcccaugugaaucgaacggggacaagggacgugguggcauuaaagggggauuuguccaucaacgcauggcaucuaagaucggcagaugguacuccaggaccaugucaaaaacaaagcggauggguauggagcuguaugugaaauacgacggggaucccuggauagacagugaugcucucgccccgagcggcguaaugguuuccauggaggaaccuggaugguacucuuucggcuuugaaauuaaggacaagaaaugcgaugugcccuguaucgggaucgagaugguccacgacggagguaagaaaacuuggcauagcgcugccaccgcaauuuauugccuuaugggcucagggcagcuguugugggauacagugaccggaguggaccgaagugucuga

SEQ ID NO: 158538 - RNA, 1401 nt, Artificial Sequence; identical to SEQ ID NO: 158223
  derived and/or modified CDS sequence (opt3) from neuraminidase__InfluenzaB__EPI541349

SEQ ID NO: 158539 - RNA, 1401 nt, Artificial Sequence; identical to SEQ ID NO: 158422
  derived and/or modified CDS sequence (opt3) from neuraminidase__InfluenzaB__EPI541759

SEQ ID NO: 158540 - RNA, 1401 nt, Artificial Sequence; identical to SEQ ID NO: 158515
  derived and/or modified CDS sequence (opt3) from neuraminidase__InfluenzaB__EPI826201

SEQ ID NO: 158541 - RNA, 1401 nt, Artificial Sequence; identical to SEQ ID NO: 158254
  derived and/or modified CDS sequence (opt3) from neuraminidase__InfluenzaB__EPI477398

SEQ ID NO: 158542 - RNA, 1401 nt, Artificial Sequence; identical to SEQ ID NO: 158254
  derived and/or modified CDS sequence (opt3) from neuraminidase__InfluenzaB__EPI492570

SEQ ID NO: 158543 - RNA, 1401 nt, Artificial Sequence; identical to SEQ ID NO: 158254
  derived and/or modified CDS sequence (opt3) from neuraminidase__InfluenzaB__EPI498339

SEQ ID NO: 158544 - RNA, 1401 nt, Artificial Sequence; identical to SEQ ID NO: 158475
  derived and/or modified CDS sequence (opt3) from neuraminidase__InfluenzaB__EPI538118

SEQ ID NO: 158545 - RNA, 1401 nt, Artificial Sequence; identical to SEQ ID NO: 158475
  derived and/or modified CDS sequence (opt3) from neuraminidase__InfluenzaB__EPI538124

SEQ ID NO: 158546 - RNA, 1401 nt, Artificial Sequence; identical to SEQ ID NO: 158475
  derived and/or modified CDS sequence (opt3) from neuraminidase__InfluenzaB__EPI556421

SEQ ID NO: 158547 - RNA, 1401 nt, Artificial Sequence; identical to SEQ ID NO: 158475
  derived and/or modified CDS sequence (opt3) from neuraminidase__InfluenzaB__EPI614609

SEQ ID NO: 158548 - RNA, 1401 nt, Artificial Sequence; identical to SEQ ID NO: 156719
  derived and/or modified CDS sequence (opt3) from neuraminidase__InfluenzaB__BAB32609

SEQ ID NO: 158549 - RNA, 1401 nt, Artificial Sequence; identical to SEQ ID NO: 156865
  derived and/or modified CDS sequence (opt3) from neuraminidase__InfluenzaB__EPI271544

SEQ ID NO: 158550 - RNA, 1401 nt, Artificial Sequence; identical to SEQ ID NO: 156865
  derived and/or modified CDS sequence (opt3) from neuraminidase__InfluenzaB__AFH57957

SEQ ID NO: 158551 - RNA, 1401 nt, Artificial Sequence; identical to SEQ ID NO: 156865
  derived and/or modified CDS sequence (opt3) from neuraminidase__InfluenzaB__EPI294881

SEQ ID NO: 158552 - RNA, 1401 nt, Artificial Sequence; identical to SEQ ID NO: 156720
  derived and/or modified CDS sequence (opt3) from neuraminidase__InfluenzaB__ABL77259

SEQ ID NO: 158553 - RNA, 1575 nt, Artificial Sequence
  derived and/or modified CDS sequence (opt3) from glycoprotein__RABV__AB009663.2
auggugccccaggcccugcuccuugucccuauccugggcuucagcuugugcuuugggaaguucccaauuuacaccauaccggacacauuaggacccugguccccuaucgauauucaccaucugucuuguccaaacaaucuaguuguggaggacgaagguugcacuaaccucucaggcuuuaguuauauggagcugaaaguaggguacacgagcgcuaucaaggugaauggauucaccuguacaggcgucgugacugaagcagagaccuauacaaacuuuguugguuacgugaccacuacauucaaaagaaagcacuuuaggcccaccccugaugccugccgggcggcuuauaauuggaaaauggccggggacccacgcuacgaagagucccuucauucucccuauccugauuaccacuggcugcgaacggucaagacuaccaaggagucguuggugauuaucucaccaagcguagcagaccucgauccguacgacaacagucugcauucccguguuuuccccucuggaaaauguagcggcauaacaagauccucaguguauugcaguacuaaucacgauuacaccgucuggaugccugaaauccugaggcucggcacaagcugugacauuuuuaccaacucucgggggaagcgcguguccaaaggaucaacgacuugcgguuucaucgaugagagaggcuuauauaagagccugaaaggggccuguaaacuuaaguugugcggagugcugggccuaaggcucauggacgguacaugggucaguaugcaaaccucuaaugaaacuaagugguguccacccaaccagcugguuaaucuucacgaucugcgguccgacgaguuggagcaucucgugauugaggaacugguaaagaaacgcgaagagugcuuagacgcucuggaaagcaucauaacaaccaagucggugucuuuucgaagacucucccaccuuaggaaacuggucccuggguucggaaaggcauacacgauuuuuaacaaaaccuugauggaggccgaggcucauuauaagucagugcggacauggaaugaaaucauuccaaguaagggcugccuacguguuggcgggcgcugucacccccacgugaacggagucuucuucaaugguaucauccugggcccggaugggcaugugcucauuccugagaugcagagcucccugcuucagcaacacauagaacuguuggagucuagcguaaucccccucaugcauccacuggccgacccuuuuacuguuuucaaagauggagacgaaaccgaggauuuuauugaggugcacuuacccgacguccaugaacaggugucaggcgucgaucugggucuaccaaacugggggaaguacgugcuccugagugcgggcacacuuaucgcauugguucugauaauuuuccucaugacuugcuguagaaaaguggacaggcccgaguccacccagcggagccugcgaggaacaggccgcaacguaucugucaccucacagagugggaaguuuaucaauagcugggaauccuauaaaucuggaggugagacuggccuuuga

SEQ ID NO: 158554 - RNA, 1575 nt, Artificial Sequence
  derived and/or modified CDS sequence (opt3) from glycoprotein__RABV__AB044824.1
auggugccccaggcccugcuccuugucccuauccugggcuucagcuccugcuuugggaaguucccaauuuacaccauaccggacacauugggacccuggucuccuaucgauauucaccauuuaucauguccaaacaaucugguuguggaggacgaagguugcacuaaccuaaguggcuuuagcuauauggagcucaaaguaggguacaucuccgcuauuaaggugaauggauucacguguaccggcgucgugacagaagcagagacuuauaccaacuuuguugguuacgugacaaccacuuucaaaagaaagcacuuuaggcccacaccugaugccugccgggcggcuuauaauuggaaaauggccggggacccacgcuacgaagagucucugcauucgcccuauccugauuaccacuggcuucgaaccgucaagacgacuaaggagucacuggugaucauaagcccaaguguagcagacuuggauccguacgacaacucccuccauucucguguuuuccccagcggaaaauguuccggcaucaccgugucaagugucuauugcagcacaaaucacgauuacacuguguggaugccugaaucucugagacugggcaccuccugugacauuuuuacaaacucaagggggaagcgggccagcaaaggaaguaagaccugcgguuucguggaugagcgcggccucuauaaaucuuuaaagggggcuuguaagcugaaacuuugcggagucuugggccugagacuaauggacgguacguggguugcaaugcaaacuuccaaugaaacaaagugguguccacccgaucagcucgugaaccugcacgaccuuaggagcgacgagaucgagcaucugguaauugaagaguuggugaaaaagcgggaagagugccucgaugcccuggaaucgaucauaaccacuaaaucugucuccuuucgccgauuaucauaccugagaaagcucgugccuggguucggaaaggcuuauacaauuuuuaauaaaacccuuauggaggccgaggcgcacuacaagaguguuaggacguggaacgaaaucauuccaagcaaaggcugccugcgggugggcgggcguugucauccccacgucaauggaguguucuucaacgguaucaucuugggcccggacgggcacguacuaauuccugagaugcaguccucucugcuccagcaacauauagaacugcuugagagcucaguuaucccccugaugcacccauuggcagauccuuuuaccguguucaaggacggagaugaaacagaggacuuuauugagguccaucuccccgaugugcacgaacaggucaguggcguggaccuggguuuaccaaauuggggcgaguauguucugcuauccgccgggacucucaucgcucugaugcuuauaauuuucuugaugaccugcugucgcaaaguggauagacccgaaagcacacagaggucucugcggggaacuggccgaaacguaucagucaccagucagagcgggaaguuuaucccuuccugggagucuuacaaaucgggaggugaaacaggccucuga

SEQ ID NO: 158555 - RNA, 1575 nt, Artificial Sequence
  derived and/or modified CDS sequence (opt3) from glycoprotein__RABV__AB052666.1
augaucccccaggcccugcuguucgugccucuucuggucuuuagcuugugcuucggcaaguuuccaauuuacaccauaccggacaaauuagggcccugguccccuaucgauauucaccaucugucuuguccaaacaaucuaguuguggaggacgaaggaugcacaaaccucucagguuucaguuauauggagcugaagguaggcuacaucagcgcuauuaaagugaauggguuuacuuguacgggagucgugaccgaagcagagacauauacuaacuucguuggcuacgugaccacaaccuuuaagagaaaacacuucaggcccacuccugaugccugccgggcggcuuauaauuggaagauggccggugacccacgcuacgaagagucccuucauaaccccuauccugauuaccacuggcugcgaacagucaagaccacgaaagagucuuuggugaucauaucgccaucaguaagcgaccucgauccguacgacaagagucugcauucccguguuuuucccucugggaaauguagcggaaucacuguguccucaaccuauugcccuacaaaucacgauuacacuauuuggaugccagaaaaccccagacugggcaccaguugugacaucuucacaaauagcaggggcaagcgggcaucuaaaggguccaagaccugcggauuugucgaugagcgcggucucuauaagucauuaaaaggcgccuguaagcugaaacuuugcgggguguugggacugagacuaauggacggcacgugggcugcaauucaaacuagcgaugaagugaagugguguccuccagaccagcucgucaacauccacgacuucaggagugaugagauagagcaucugguuguggaggaacuuguaaagaaacgggaagagugccuggacgccuuggaaucuauuaugacaaccaaauccgugagcuuucgccgacucucgcaccugagaaaguuaguccccgguuucgggaaggcuuacacuaucuucaauaaaacacugauggaggccgaugcgcauuauaagucugugaggaccuggaacgagauuaucccguccaaaggaugccuccggguuggcggccguugucacccucacgugaauggggucuuuuucaacggaaucauucuuggucccgacggccaugugcugauaccagaaaugcagucaaguuugcuacagcaacacauggagcugcucgaaagcuccguaaucccucugaugcauccccuugcagauccaucuacgguuuuuaaggacggggaugaggccgaagacuucguggagguccaccuccccgaugugcauaaacaggucagcggaguggacuugggccucccuucaugggguaaguacguucugaugagugugggggcuaugauugccuuaaugcugaugaucuuucuaaugaccugcugucgcaaggcaaauggcgcugaguccauacagcacagacucggagaaacaggcaggaaaguaagcgucacuucucagucagggcgggugauuaguagcugggaguccuauaagucuggaggugaaaccaaacuguga

SEQ ID NO: 158556 - RNA, 1575 nt, Artificial Sequence
  derived and/or modified CDS sequence (opt3) from glycoprotein__RABV__AB085828.1
auggugccccagguccuccuguucgccccucuucugguuagcccauugugcuuuggcaaguucccgaucuacaccauucccgacaaauuagggccuugguccccaauagaucugcaccaucuaucuugucccaacaaucucgugguagaggacgaaggaugcacaaaccugucagguuuuaguuauauggagcuuaaggugggcuacaucagcgcuauuaaagucaauggguucacuuguacgggagugguuaccgaagcagagacauauacuaacuuugugggcuacgucaccacaaccuucaagagaaaacacuuuaggccuacuccagaugccugccgggcggcuuauaauuggaagauggccggugacccccgcuacgaagagucccugcauaacccuuauccagauuaccacugguugcgaacagugaagaccacgaaagagucucucguaaucauuucgccgucaguuacugaccuggaucccuacgacaagagccugcauagucguguguucccugggggaaauuguuccggcaucaccgucucuagcacauauugcuccacuaaccacgauuacaccauauggaugccagaaaaucucagauuaggcacaucaugugacaucuuuacccacaguagggggaaacgggcaagcaagggagauaaaacgugcgguuucguggacgagcgcggccuguauaagucucuuaagggggccuguaaauugaagcugugcggagugcuaggccucagacugauggaugguacuugggucgcuaugcaaacauccgacgaaaccaaauggugucccccugggcagcuuguuaaccugcaugacuuuaggucagaugagauugagcacuugguggaagaggaacucguaaagaaacgggaggaaugccuggacgcauuagagagcaucaugacuacaaagagugugucuuuccgccgacugucccaucucagaaaacuugucccaggauuuggcaaggccuacaccauuuucaauaagacgcugauggaggcugaugcccacuauaaaagcgugcagaccuggaacgaaaucauacccucgaagggcugcuugaggguuggggagcggugucacccgcaugugaauggagucuucuuuaacgguauuauccuaggcucugacgggcacgugcugauuccugaaaugcaguccucacuccugcaacagcauauggagcuucuggaaaguagcguaauccccuugaugcacccacucgcggauccuuccacaguuuucaaagacggagaugagguggaggacuuugucgaagugcaucugcccgauguccacaaacaggugucuggcguugacuuaggucugccaaagugggggaaguacgugcuaaugaucgcaggcgcccucauugcucugaugcuuauaaucuucuugaugacuugcugucgucgcguaaauagacccgagagcacccagucaaaccugggaggcacagggaggaacgucagugugccuucccaaagcggaaagguuauuucuucaugggaaaguuauaaaagcgguggcgagacucggcucuga

SEQ ID NO: 158557 - RNA, 1575 nt, Artificial Sequence
  derived and/or modified CDS sequence (opt3) from glycoprotein__RABV__AB110656.1
auggugccccaggcccuccuguucgucccucuucuggcuuuuagcuucugcuuuggcaaguucccaaucuacaccauuccggacaaauuggggcccugguccccuauagauauccaccauuuaucuuguccaaacaaucugguuguggaggacgaaggaugcacaaaccuaucagguuuuaguuauauggagcucaagguaggcuacauuagcgcaaucaaagugaauggguucacuuguacgggagucgugaccgaagccgagacauauacuaacuuuguuggcuacgugaccacaaccuucaagagaaaacacuuuaggcccacuccugaugcgugccgguccgcuuauaauuggaagauggccggugacccacgcuacgaagagucucugcauaaccccuauccugauuaccacuggcuucgaacagucaagaccacgaaagagucgcuggugauuaucucaccaagcguagcagacuuggauccguacgacaagagucuccauucccguguuuuccccaaugggaaauguucuggaauaacugugagcuccaccuauugcucaacaaaccacgauuacacuaucuggcugccugaaaauccaagacugggcaccaguugugacauuuuuacaaacagcaggggcaagcgggccucuaaagggggaaagaccugcgguuucgucgaugagcgcggccucuauaaguccuuaaaaggggcuuguaagcugaaacuuugcggaguguugggccugagacuaauggacgguacguggguggcaaugcucacuucagaugaaacaaaguggugucccccugaccaacuggucaaucuucacgacuuuaggagcgaugagaucgagcaucugguuguggaagaguuggugaaaaagcgggaagagugccucgacgcccuggaaaguauuaugaccacuaaaucuguauccuuccgccgauuaagccaccugagaaagcucgucccaggguucggaaaggcuuacacaaucuuuaacaaaacccuuauggaggccgaugcgcauuauaagucgauaaggacguggaaugagauuauccccucuaaaggcugccugcgggugggcgggcguugucacccgcacguuaacggaguguucuuuaaugguauuaucuugggcccugacgggcauguccuaauccccgaaaugcaguccucacugcuccagcagcacauggagcugcuugaaaguagcgugauuccacugaugcauccuuuggcagaucccuccaccguauucaaggacggagaugaggccgaagacuuuguugaggugcaccucccagauguccauaaacaagugucuggcgucgaccuggguuuacccaacugggggaaguacgugcugaugagcgcuggcguucuaauagcccucaugcugacaaucuuccuuaugacuugcugucgcagagugaacaggccugauucaacccagcggaguuugggaaugacaggccgaaagguauccgucacuagccagucugggaaagugauuucaaguugggagagcuauaaguccggaggugaaacccgccuguga

SEQ ID NO: 158558 - RNA, 1575 nt, Artificial Sequence
  derived and/or modified CDS sequence (opt3) from glycoprotein__RABV__AB110657.1
auggugccccaggcccuccuguucgucccucuucuggcuuuuagcuucugcuuuggcaaguucccaaucuacaccauuccggacaaauuggggcccugguccccuauagauauccaccauuuaucuuguccaaacaaucugguuguggaggacgaaggaugcacaaaccuaucagguuuuaguuauauggagcucaagguaggcuacauuagcgcaaucaaagugaauggguucacuuguacgggagucgugaccgaagccgagacauauacuaacuuuguuggcuacgugaccacaaccuucaagagaaaacacuuuaggcccacuccugaugcgugccgguccgcuuauaauuggaagauggccggugacccacgcuacgaagagucucugcauaaccccuauccugauuaccacuggcuucgaacagucaagaccacgaaagagucgcuggugauuaucucaccaagcguagcagacuuggauccguacgacaagagucuccauucccguguuuuccccaaugggaaauguucuggaauaacugugagcuccaccuauugcucaacaaaccacgauuacacuaucuggcugccugaaaauccaagacugggcaccaguugugacauuuuuacaaacagcaggggcaagcgggccucuaaagggggaaagaccugcgguuucgucgaugagcgcggccucuauaaguccuuaaaaggggcuuguaagcugaaacuuugcggaguguugggccugagacuaauggacgguacguggguggcaaugcaaacuucagaugaaacaaaguggugucccccugaccagcucgucaaucugcacgacuuuaggagcgaugagaucgagcaucuuguuguggaggaacuggugaaaaagcgggaagagugcuuggacgcccucgaaaguauuaugaccacuaaaucuguauccuuccgccgacugagccacuuaagaaagcuggucccaggguucggaaaggcuuacacaaucuuuaacaaaacccucauggaggccgaugcgcauuauaagucgauaaggacguggaaugagauuauccccucuaaaggcugccuucgggugggcgggcguugucacccgcacguuaacggaguguucuuuaaugguauuauccugggcccugacgggcaugucuugauccccgaaaugcaguccucacuacugcagcaacacauggagcuccuggaaaguagcgugauuccacuuaugcauccucuggcagaucccuccaccguauucaaggacggagaugaggccgaagacuuuguugaggugcacuugccagauguccauaaacaggugucuggcgucgaccucggucugcccaacugggggaaguacguguuaaugagcgcuggcguucugauagcccuaaugcucacaaucuuccugaugacuugcugucgcagagugaacaggccugauucaacccagcggagucuuggaaugacaggccgaaagguauccgucacuagccagucugggaaagugauuucaaguugggagagcuauaaguccggaggugaaacccgcuuguga

SEQ ID NO: 158559 - RNA, 1575 nt, Artificial Sequence
  derived and/or modified CDS sequence (opt3) from glycoprotein__RABV__AB110658.1
auggugccccaggcccuccuguucgucccucuucuggcuuuuucguucugcuuuggcaaguucccaaucuacaccauuccggacaaauuggggcccugguccccuauagauauccaccauuuaucuuguccaaacaaucugguuguggaggacgaaggaugcacaaaccuaucagguuuuaguuauauggagcucaagguaggcuacauuagcgcaaucaaagugaauggguucacuuguacgggagucgugaccgaagccgagacauauacuaacuuuguuggcuacgugaccacaaccuucaagagaaaacacuuuaggcccacuccugaugcgugccgguccgcuuauaauuggaagauggccggugacccacgcuacgaagagucucugcauaaccccuauccugauuaccacuggcuucgaacagucaagaccacgaaagagucgcuggugauuaucucaccaagcguagcagacuuggauccguacgacaagagucuccauucccguguuuuccccaaugggaaauguucuggaauaacugugagcuccaccuauugcucaacaaaccacgauuacacuaucuggcugccugaaaauccaagacugggcaccaguugugacauuuuuacaaacagcaggggcaagcgggccucuaaaggguccaagaccugcggauucgucgaugagcgcggucucuauaagucauuaaaaggcgcuuguaagcugaaacuuugcgggguguugggacugagacuaauggacggcacguggguggcaaugcaaacuagcgaugaaacaaagugguguagucccgaccagcucgucaaucugcacgacuuuaggucugaugagaucgagcaucuuguuguggaggaacuggugaaaaagcgggaagagugcuuggacgcccucgaauccauuaugaccacuaaaagcguaucguuccgccgacugucucacuuaagaaagcuggucccugguuucgggaaggcuuacacaaucuuuaacaaaacccucauggaggccgaugcgcauuauaaguccauaaggacguggaaugagauuaucccaucaaaaggaugccuucgggugggcggccguugucacccccacguuaacgggguguucuuuaauggaauuauccuggguccggacggccaugucuugaucccugaaaugcagaguagccuacugcagcaacacauggagcuccuggaauccucugugauuccccuuaugcauccacuggcagauccuagcaccguauucaaggacggggaugaggccgaagacuuuguugaggugcacuugcccgauguccauaaacaggugucaggagucgaccucggccugccaaacugggguaaguacguguuaaugagugcugggguucugauagcccuaaugcucacaaucuuccugaugacuugcugucgcagagugaacaggcccgauuccacccagcggagccuuggcaugacaggacgaaagguaucugucacuucacagaguggcaaagugauuagcuccugggagucuuauaagagcgggggagaaacccgcuuguga

SEQ ID NO: 158560 - RNA, 1575 nt, Artificial Sequence
  derived and/or modified CDS sequence (opt3) from glycoprotein__RABV__AB110659.1
auggugccccaggcccuccuguucgucccucuucuggcuuuuagcuucugcuuuggcaaguucccaaucuacaccauuccggacaaauuggggcccugguccccuauagauauccaccauuuaucuuguccaaacaaucugguuguggaggacgaaggaugcacaaaccuaucagguuuuaguuauauggagcucaagguaggcuacauuagcgcaaucaaagugaauggguucacuuguacgggagucgugaccgaagccgagacauauacuaacuuuguuggcuacgugaccacaaccuucaagagaaaacacuuuaggcccacuccugaugcgugccgguccgcuuauaauuggaagauggccggugacccacgcuacgaagagucucugcauaaccccuauccugauuaccacuggcuucgaacagucaagaccacgaaagagucgcuggugauuaucucaccaagcguagcagacuuggauccguacgacaagagucuccauucccguguuuuccccaaugggaaauguucuggaauaacugugagcuccaccuauugcucaacaaaccacgauuacacuaucuggcugccugaaaauccaagacugggcaccaguugugacauuuuuacaaacagcaggggcaagcgggccucuaaaggguccaagaccugcggauucgucgaugagcgcggucucuauaagucauuaaaaggcgcuuguaagcugaaacuuugcgggguguugggacugagacuaauggacggcacguggguggcaaugcaaacuagcgaugaaacaaaguggugucccccugaccagcucgucaaucugcacgacuuuaggagugaugagaucgagcaucuuguuguggaggaacugguaaagaaacgggaagagugcuuggacgcccucgaaucuauuaugaccacuaaauccgugagcuuccgccgacugucgcacuuaagaaagcuggucccagguuucgggaaggcuuacacaaucuuuaacaaaacccucauggaggccgaugcgcauuauaagucuauaaggacguggaaugagauuauccccuccaaaggaugccuucgggugggcggccguugucacccgcacguuaacgggguguucuuuuacggaauuauccuggguccugacggccaugucuugauccccgaaaugcagucaagucuacugcagcaacacauggagcuccuggaaagcuccgugauuccacuuaugcauccucuggcagaucccucuaccguauucaaggacggggaugaggccgaagacuuuguugaggugcacuugccagauguccauaaacaggugagcggagucgaccucggccugcccaauugggguaaguauguguuaaugucagcugggguucugauagcccuaaugcucacaaucuuccugaugacuugcugucgcagagugaacaggccugauaguacccagcggucccuuggcaugacaggacgaaagguaagcgucacuucucagucaggcaaagugauuaguagcugggaguccuacaagucugggggagaaacccgcuuguga

SEQ ID NO: 158561 - RNA, 1575 nt, Artificial Sequence
  derived and/or modified CDS sequence (opt3) from glycoprotein__RABV__AB110660.1
auggugccccaggcccuccuguucgucccucuucuggcuuuuagcuucugcuuuggcaaguucccaaucuacaccauuccggacaaauuggggcccugguccccuauagauauccaccauuuaucuuguccaaacaaucugguuguggaggacgaaggaugcgcaaaccuaucagguuuuaguuauauggagcucaagguaggcuacauuagcgccaucaaagugaauggguucacauguacuggagucgugacggaagcggagaccuauacaaacuuuguuggcuacgugacuaccacauucaagagaaaacacuuuaggcccaccccugaugcuugccgguccgccuauaauuggaagauggccggugacccacgcuacgaagagucucugcauaaccccuauccugauuaccacuggcuucgaacugucaagacaaccaaagagucgcuggugauuaucucaccaagcguagcagacuuggauccguacgacaagagucuccauucccguguuuuccccaaugggaaauguucuggaauaacggugagcuccacuuauugcucaaccaaccacgauuacacaaucuggcugccugaaaauccaagacugggcaccaguugugacauuuuuacuaacagcaggggcaagcgggcuucuaaagggggaaagacaugcgguuucgucgaugagcgcggccucuauaaguccuuaaaaggggcauguaagcugaaacuuugcggaguguugggccugagacuaauggacgguaccuggguggccaugcaaacgucagaugaaacuaaguggugucccccugaccagcucgucaaucugcacgacuuuaggagcgaugagaucgagcaucuuguuguggaggaacuggugaaaaagcgggaagagugcuuggacgcucucgaaaguauuaugacaaccaaaucuguguccuuccgcgggcugagccacuuacgaaagcuggucccaggauucggcaaggccuacacuaucuuuaacaaaacacucauggaggcggaugcacauuauaagucgauaagaaccuggaaugagauuauccccucuaaaggcugccuuacgguagggggaaggugucacccgcacguuaacgguguguucuuuaauggcauuauccuggggccugacggacaugucuugauccccgaaaugcaguccucacuacugcagcaacacauggagcuccuggaaaguagcgugauuccacuuaugcauccucuggccgaucccuccaccguauucaaggacggcgaugaggcugaagacuuuguugaggugcacuugccagauguccauaaacaggugucuggugucgaccucgggcugcccaacuggggcaaguacguguuaaugagcgccggaguucugauagcacuaaugcucacaaucuuccugaugacuugcugucggcgugugaacggcccugauucaacccagcgcagucuugggaugacaggaagaaagguauccgucacuagccagucugguaaagugauuucaaguugggagagcuauaaguccggcggggaaaccagguuguga

SEQ ID NO: 158562 - RNA, 1575 nt, Artificial Sequence
  derived and/or modified CDS sequence (opt3) from glycoprotein__RABV__AB110661.1
auggugccccaggcccuccuguucgucccucuucuggcuuuuagcuucugcuuuggcaaguucccaaucuacaccauuccggacaaauuggggcccugguccccuauagauauccaccauuuaucuuguccaaacaaucugguuguggaggacgaaggaugcacaaaccuaucagguuuuaguuauauggagcucaagguaggcuacauuagcgcaaucaaagugaauggguucacuuguacgggagucgugaccgaagccgagacauauacuaacuuuguuggcuacgugaccacaaccuucaagagaaaacacuuuaggcccacuccugaugcgugccgguccgcuuauaauuggaagauggccggugacccacgcuacgaagagucucugcauaaccccuauccugauuaccacuggcuucgaacagucaagaccacgaaagagucgcuggugauuaucucaccaagcguagcagacuuggauccguacgacaagagucuccauucccguguuuuccccaaugggaaauguucuggaauaacugugagcuccaccuauugcucaacaaaccacgauuacacuaucuggcugccugaaaauccaagacugggcaccaguugugacauuuuuacaaacagcaggggcaagcgggccucuaaagggggaaagaccugcgguuucgucgaugagcgcggccucuauaaguccuuaaaaggggcuuguaagcugaaacuuugcggaguguugggccugacgcuaauggacgguacuuggguggcaaugcaaacaucagaugaaaccaaguggugucccccugaccagcucgucaaucugcacgacuuuagaagcgaugagaucgagcaucuuguuguggaggaacuggugaaaaagagggaagagugcuuggacgcccucgaaaguauuaugacuacaaaaucuguauccuuccggcgccugagccacuuacgaaagcuggucccaggguucggaaaggcuuacaccaucuuuaacaaaacgcucauggaggccgaugcgcauuauaagucgauaagaaccuggaaugagauuauccccucuaaaggcugccuuagggugggcgggcggugucacccgcacguuaacggaguguucuuucaugguauuauccugggcccugacgggcacgucuugauccccgaaaugcaguccucacuacugcagcaacauauggagcuccuggaaaguagcgugauuccacuuaugcacccucuggcagaucccuccacaguauucaaggacggagaugaggccgaagacuuuguugaggugcauuugccagauguccacaaacaggugucuggcgucgaccucggucugcccaauugggggaaguacguguuaaugagcgcuggcguucugauagcccuaaugcucacuaucuuccugaugaccugcugucgucgcgugaacagaccugauucaacacagaggagucuuggaaugacuggccggaagguauccgucaccagccagucugggaaagugauuucaaguugggagagcuauaaguccggaggugaaacacgauuguga

SEQ ID NO: 158563 - RNA, 1575 nt, Artificial Sequence
  derived and/or modified CDS sequence (opt3) from glycoprotein__RABV__AB110662.1
augauccugcaggcccuccuuuucgugccccuguugauuagcuccuuaugccugggcaaguuuccuauauacaccaucccagacaaacuagggccguggucucccauugauauccaccaucucucauguccuaacaaucuggucguugaggacgaaggaugcacaaaccuuagugguuucagcuauauggagcugaaggugggcuacauuuccgcuaucaaaguaaauggguuuacuuguacgggaguggucaccgaagcagagacauauacuaacuucgugggcuacguuaccacaaccuuuaagagaaaacacuucaggccaauacccgaugccugccgggcggcuuauaauuggaagauggccggugacccucgcuacgaagagucuuugcaaaacccauaucccgauuaccauuggcuccgaacugugaagacaaccaaagagucgcugaucauuaucucaccuagcgucgcagaccuggauccauacgacaagagucuccacucccguguguuucccgggggaaaauguuuaggcauuacgguaucuagcacuuauugcuccaccaaucaugauuacacaaucuggaugccggaagaaccuagacugggcacuucaugugacauauucaccaguagcaaggggaaaaaggccucuaagggagguaaaacaugcggcuuuguugaugaaagggggcuuuauaaguccuugaaaggagcuuguaagcugaaacuaugcggcgugcucggucugcggcuuauggacgggaccugggucucaauuccaacgagcgaugacacuaaguggugucccccugaccagcuggugaacuugcacgauuuccacagugacgagaucgagcaucucguggucgaggagcugguuaaaaagcgcgaagagugcuuagaugcacuggaaucuauuaugacaaccaaguccgugagcuuuagaaggcucucguaccuucggaaacugguaccaggauucggcaaggccuauacuaucuuuaauaaaacauugauggaggcugacgcccacuacaagucugugcgcaccuggaacgagaucauucccuccaaaggcugccuaaagguccgagaaagaugucauccgccuguggaugggguuuucuucaauggaauaauccugggucccgacggcaacgugcucauuccagagaugcagucaagucugcuucagcaacacauggaacuguuggagagcuccgucaucccucucaugcacccccuggcggauccaucuacgguguuuaaggaaggggacgaggcagaggauuucguagaaguucauuuacccgacgugcacaaacagauaagcggagucgaucugggccuaccuucaugggguaaguaucuccugaugauugccgggggccuugcuaccuuggugcugaucaucugcaguauggccuguugcaggcggacaaaacguacugagucccgcagaaggggaagccgggaaucugagaagaaagucaccgcaacaccacagacucgaaaggugguuucaaguugggaacucuacaagagcgagggcgacgcucgccuguga

SEQ ID NO: 158564 - RNA, 1575 nt, Artificial Sequence
  derived and/or modified CDS sequence (opt3) from glycoprotein__RABV__AB110663.1
augauccugcaggcccuccuuuucgugccccuguugauuagcuccuuaugccugggcaaguuuccuauauacaccaucccagacaaacuagggccguggucucccauugauauccaccaucucucauguccuaacaaucuggucguugaggacgaaggaugcacaaaccuuagugguuucagcuauauggagcugaaggugggcuacauuuccgcuaucaaaguaaauggguuuacuuguacgggaguggucaccgaagcagagacauauacuaacuucgugggcuacguuaccacaaccuuuaagagaaaacacuucaggccaauacccgaugccugccgggcggcuuauaauuggaagauggccggugacccucgcuacgaagagucuuugcaaaacccauaucccgauuaccauuggcuccgaacugugaagacaaccaaagagucgcugaucauuaucucaccuagcgucgcagaccuggauccauacgacaagagucuccacucccguguguuucccgggggaaaauguuuaggcauuacgguaucuagcacuuauugcuccaccaaucaugauuacacaaucuggaugccggaagaaccuagacugggcacuucaugugacauauucaccaguagcaaggggaaaaaggccucuaagggagguaaaacaugcggcuuuguugaugaaagggggcuuuauaaguccuugaaaggagcuuguaagcugaaacuaugcggcgugcucggucugcggcuuauggacgggaccugggucucaauucagacgagcgaugacacuaagugguguccacccgaccagcuggugaacuugcacgauuuccacagugacgagaucgagcaucucguggucgaggagcugguuaaaaagcgcgaagagugcuuagaugcacuggaaucuauuaugacaaccaaguccgugagcuuuagaaggcucucguaccuucggaaacugguaccuggauucggcaaggccuauacuaucuuuaauaaaacauugauggaggcugacgcccacuacaagucugugcgcaccuggaacgagaucauuccauccaaaggcugccuaaagguccgagaaagaugucaucccccgguggaugggguuuucuucaauggaauaauccuggguccugacggcaacgugcucauucccgagaugcagucaagucugcuucaacagcacauggaacuguuggagagcuccgucaucccacucaugcacccucuggcggaucccucuacgguguuuaaggaaggggacgaggcagaggauuucguagaaguucauuuaccagacgugcacaaacagauaagcggagucgaucugggccuacccucaugggguaaguaucuccugaugauugccgggggccuugcugccuuggugcugaucaucugcaguauggcauguugcaggcggaccaaacguacagagucccgcagaaggggaagcggcgaaucugagaagaaagucacugcuaccccucagacacggaaggugguuucaaguugggaacucuacaagagcgagggggacgcccgacuguga

SEQ ID NO: 158565 - RNA, 1575 nt, Artificial Sequence
  derived and/or modified CDS sequence (opt3) from glycoprotein__RABV__AB110664.1
augauccugcaggcccuccuuuucgugccccuguugauuagcuccuuaugccugggcaaguuuccuauauacaccaucccagacaaacuagggccguggucucccauugauauccaccaucucucauguccuaacaaucuggucguugaggacgaaggaugcacaaaccuuagugguuucagcuauauggagcugaaggugggcuacauuuccgcuaucaaaguaaauggguuuacuuguacgggaguggucaccgaagcagagacauauacuaacuucgugggcuacguuaccacaaccuuuaagagaaaacacuucaggccaauacccgaugccugccgggcggcuuauaauuggaagauggccggugacccucgcuacgaagagucuuugcaaaacccauaucccgauuaccauuggcuccgaacugugaagacaaccaaagagucgcugaucauuaucucaccuagcgucgcagaccuggauccauacgacaagagucuccacucccguguguuucccgggggaaaauguuuaggcauuacgguaucuagcacuuauugcuccaccaaucaugauuacacaaucuggaugccggaagaaccuagacugggcacuucaugugacauauucaccaguagcaaggggaaaaaggccucuaagggagguaggacaugcggcuuuguugaugaacgggggcuuuauaaauccuugaagggagcuuguaaacugaagcuaugcggcgugcucggucugcgccuuauggacgggaccugggucucaauucagacgagcgaugacacuaaaugguguccacccgaccagcuggugaacuugcacgauuuccacagugacgagaucgagcaucucguggucgaggagcugguuaagaaaagagaagagugcuuagaugcacuggaaucuauuaugacaaccaaguccgugagcuuuaggcggcucucguaccuucgcaagcugguaccuggauucggcaaagccuauacuaucuuuaauaagacauugauggaggcugacgcccacuacaaaucugugcgaaccuggaacgagaucauuccauccaaguggugccuaaaagucagagaaaggugucaucccccgguggauggcguuuucuucaaugggauaauccugggaccugacgguaacgugcucauucccgagaugcagucaagucugcuucaacagcacauggaacuguuggagagcuccgucaucccacucaugcacccucuggcggaucccucuacgguguuuaaggaaggcgacgaggcagaggauuucguagaaguucauuuaccagacgugcacaagcagauaagcggggucgaucugggacuacccucauggggcaaauaucuccugaugauugccggugggcuugcuaccuuggugcugaucaucugcaguauggccuguugccggcguacaaagcgcacugaguccagaaggcggggcagcggagaaucugagaaaaaggucaccgcaacaccucagacucgaaaagugguuucaaguugggaacucuacaagagcgagggcgacgcucgccuguga

SEQ ID NO: 158566 - RNA, 1575 nt, Artificial Sequence
  derived and/or modified CDS sequence (opt3) from glycoprotein__RABV__AB110665.1
augauccugcaggcccuccuuuucgugccccuguugauuagcuccuuaugccugggcaaguuuccuauauacaccaucccagacaaacuagggccguggucucccauugauauccaccaucucucauguccuaacaaucuggucguugaggacgaaggaugcacaaaccuuagugguuucagcuauauggagcugaaggugggcuacauuuccgcuaucaaaguaucuggguuuacuuguacgggaguggucaccgaagcagagacauauacuaauuucgugggcuacguuaccacaaccuuuaagagaaaacacuucaggccaauacccgaugccugccgggcggcuuauaacuggaagauggccggugacccucgcuacgaagagucguugcauaauccauaucccgauuaccacuggcuccgaacugugaagacaaccaaagagucacugaucauuaucagcccuagugucgcagaccuggauccauacgacaagucccuccauucucguguguuucccgggggaaaauguuuaggcauuacgguaagcuccacuuauugcucaaccaaccacgauuacacaaucuggaugcccgaagaaccuagacugggcaccaguugugacauauucacuagcucuaaggggaaaaaggccuccaagggagguaaaacaugcggcuuuguugaugaaagggggcuuuauaagucauugaaaggagcuuguaagcugaaacuaugcggcgugcucggucugcggcuuauggacgggaccugggucagcauucaaacgagugauaauacuaagugguguccacccgaccagcuggugaacuugcacgacuuccauucugaugagaucgagcaccucguggucgaggagcugguuaaaaagcgcgaagagugcuuagacgcacuggaauccauuaugacaaccaagagcgugucguuuagaaggcucucuuaccuucggaaacugguaccuggauucggcaaggccuauacuaucuuuaauaaaacauugauggaggcugaugcccauuacaaguccgugcgcaccuggaacgagaucauuccaucaaaaggcugccuaaagguccgagaaagaugucacccgccgguggacgggguuuucuucaauggaauaauccuggguccugauggcaacgugcucauucccgagaugcagaguagccugcuucagcaacacauggaacuguuggaguccucugucaucccacucaugcauccucuggcggaccccagcacgguguuuaaggaaggggaugaggcagaggacuucguagaaguucacuuaccagaugugcauaaacagauaucaggagucgaccugggccuacccaguugggguaaguaucuccugaugauugccgggggccuugcuaccuuggugcugaucaucugcuccauggccuguugcaggcggacaaaacguacugagagccgcagaaggggaucuggcgaaucagagaagaaagucaccgugacaccucagacugggaagguugugaguagcugggaacucuacaaguccgagggagaugcacggcuguga

SEQ ID NO: 158567 - RNA, 1575 nt, Artificial Sequence
  derived and/or modified CDS sequence (opt3) from glycoprotein__RABV__AB110666.1
augauccugcaggcccuccuuuucgugcccuuucugauuagcuccuugugcuuaggcaaguucccuauauacaccaucccagacaaacuggggccguggucucccauugauauccaccaucuaucauguccuaacaaucucgucguugaggacgaaggaugcacaaaccugagugguuuuagcuauauggagcuuaaggugggcuacauuuccgcuaucaaaguaaauggguucacuuguacgggaguggucaccgaagcagagacauauacuaacuuugugggcuacguuaccacaaccuucaagagaaaacacuuuaggccaauacccgaugccugccgggcggcuuauaauuggaagauggccggugacccucgcuacgaagagucucugcaaaacccauaucccgauuaccauugguugcgaacugugaagacaaccaaagagucgcucaucauuaucucaccuagcgucgcagaccuggauccauacgacaagagucugcacucccguguguuccccgggggaaaaugucucggcauuacgguaucuagcacuuauugcuccaccaaucaugauuacacaaucuggaugccggaagaaccuagauuaggcacuucaugugacauauuuaccaguagcaaggggaaaaaggccucuaagggagguaaaacaugcggcuucguugaugaaagggggcuguauaagucccuuaaaggagcuuguaaguugaaacugugcggcgugcuaggucuccggcugauggacgggaccugggucucaauuccaacgagcgaugacacuaaguggugucccccugaccagcuugugaaccugcacgauuuucacagugacgagaucgagcauuugguggucgaggagcucguuaaaaagcgcgaagagugccuggaugcauuagaaucuauuaugacaaccaaguccgugagcuucagaaggcugucguaccuccggaaacuuguaccaggauuuggcaaggccuauacuaucuucaauaaaacacugauggaggcugacgcccacuacaagucugugcgcaccuggaacgagaucauucccuccaaaggcugcuugaagguccgagaaagaugucauccgccuguggaugggguuuucuuuaauggaauaauccuaggucccgacggcaacgugcugauuccagagaugcagucaagucuccugcagcaacacauggaacuucuggagagcuccgucaucccuuugaugcacccccucgcggauccaucuacgguguucaaggaaggggacgaggcagaggauuuuguagaaguucaucugcccgacgugcacaaacagauaagcggagucgauuuaggccugccuucaugggguaaguaucuacucaugauugccgggggccuggcuacccuuguguugaucaucugcaguauggccuguugcaggcggacaaaacguacugagucccgcagaaggggaagcggcgaaucuggggagaaggucaccacaacuccacagacccggaaagugguuucaaguugggaacuguacaagagcgagggagacgcacgacucuga

SEQ ID NO: 158568 - RNA, 1575 nt, Artificial Sequence
  derived and/or modified CDS sequence (opt3) from glycoprotein__RABV__AB110667.1
augauccugcaggcccuccuuuucgugccccuguugauuagcuccucuugcuuaggcaaguuuccuauauacaccaucccagacaaacuggggccguggucacccauugauauccaccaucuaaguuguccuaacaaucucgucguugaggacgaaggaugcacaaaccugagcgguuucuccuauauggagcuuaaggugggcuacauuucugcuaucaaaguaaauggguuuacuuguacgggaguggucaccgaagcagagacauauacuaacuucgugggcuacguuaccacaaccuuuaagagaaaacacuuccauccaauacccgaugccugcagggcggcuuauaauuggaagauggccggugacccucgguacgaagagucgcugcaaaacccauaucccgauuaccacugguugcgcacugugaagacaaccaaagagucacucaucauuaucagcccuagugucgcagaccuggauccauacgacaagucccugcauucucgaguguuucccgggggaaaaugucucggcauuacgguaagcuccacuuauugcucaaccaaucacgauuacacaaucuggaugcccgaagaaccucguuuaggcaccaguugugacauauucacuagcucuaaggggaaaaaggccuccaagggagguaaaacaugcggcuuuguugaugaaagagggcuguauaagucacuuaaaggagcuuguaaguugaaacugugcggcgugcuaggucucaggcugauggacgggaccugggucagcauucagacgagugaugacacuaagugguguccacccgaccagcuugugaaccugcacgauuuccauucugacgagaucgagcacuugguggucgaggagcucguuaaaaagcgggaagagugccuggaugcauuagaauccauuaugacaaccaagagcgugucguuucgcagacugucuuaccucaggaaacuuguaccuggauucggcaaggccuauacuaucuuuaauaaaacacugauggaggcugacgcccauuacaaguccgugcggaccuggaacgagaucauuccaucaaaaggcugcuugaagguccgcgaacgaugucacccgccgguggaugggguuuucuucaauggaauaauccuagguccugacggcaacgugcugauucccgagaugcagaguagccuccugcaacagcacauggaacuucuggaguccucugucaucccauugaugcauccucucgcggaucccagcacgguguuuaaggaaggggacgaggcagaggauuucguagaaguucaucugccagacgugcacaaacagauaucaggagucgauuuaggccugcccaguugggguaaguaucuacucaugauugccgggggccuggcuacccuuguguugaucaucugcuccauggccuguugcagaaggacaaaacggacugagagccgucgcagaggaucuggcgaaucagggaagaaagcaaccgcuacaccucagacuaggaaggucgugaguagcugggagcuguacaaguccgaaggagacgcccggcucuga

SEQ ID NO: 158569 - RNA, 1575 nt, Artificial Sequence
  derived and/or modified CDS sequence (opt3) from glycoprotein__RABV__AB110668.1
augauccugcaggcccuccuuuucgugccccuguugauuagcuccuuaugccugggcaaguuuccuauauacaccaucccagacaaacuagggccguggucucccauugauauccaccaucucucauguccuaacaaucuggucguugaggacgaaggaugcacaaaccuuagugguuucagcuauauggagcugaaggugggcuacauuuccgcuaucaaaguaaauggguuuacuuguacgggaguggucaccgaagcagagacauauacuaacuucgugggcuacguuaccacaaccuuuaagagaaaacacuucaggccaauacccgaugccugccgggcggcuuauaauuggaagauggccggugacccucgcuacgaagagucuuugcaaaacccauaucccgauuaccauuggcuccgaacugugaagacaaccaaagagucgcugaucauuaucucaccuagcgucgcagaccuggauccauacgacaagagucuccacucccguguguuucccgggggaaaauguuuaggcauuacgguaucuagcacuuauugcuccaccaaucaugauuacacaaucuggaugccggaagaaccuagacugggcacuucaugugacauauucaccaguagcaaggggaaaaaggccucuaagggagguaaaacaugcggcuuuguugaugaaagggggcuuuauaaguccuugaaaggagcuuguaagcugaaacuaugcggcgugcucggucugcggcuuauggacgggaccugggucucaauucagacgagcgaugacacuaagugguguccacccgaccagcuggugaacuugcacgauuuccacagugacgagaucgagcaucucguggucgaggagcugguuaaaaagcgcgaagagugcuuagaugcacuggaaucuauuaugacaaccaaguccgugagcuuuagaaggcucucguaccuucggaaacugguaccuggauucggcaaggccuauacuaucuuuaauaaaacauugauggaggcugacgcccacuacaagucugugcgcaccuggaacgagaucauuccauccaaaggcugccuaaagguccgagaaagaugucaucccccgguggaugggguuuucuucaauggaauaauccuggguccugacggcaacgugcucauucccgagaugcagucaagucugcuucaacagcacauggaacuguuggagagcuccgucaucccacucaugcacccucuggcggaucccucuacgguguuuaaggaaggggacgaggcagaggauuucguagaaguucauuuaccagacgugcacaaacagauaagcggagucgaucugggccuacccucaugggguaaguaucuccugaugauugccgggggccuugcugccuuggugcugaucaucugcaguauggcauguugcaggcggaccaaacguacaggaucccgcagaaggggcagcggggagucugaaaagaaagucacugcuaccccucagacacggaaggugguuucaaguugggagcucuacaagagcgaaggagacgcccgacuguga

SEQ ID NO: 158570 - RNA, 1575 nt, Artificial Sequence
  derived and/or modified CDS sequence (opt3) from glycoprotein__RABV__AB110669.1
augauccugcaggcccuccuuuucgugccccuguugauuagcuccuuaugccugggcaaguuuccuauauacaccaucccagacaaacuagggccguggucucccauugauauccaccaucucucauguccuaacaaucuggucguugaggacgaaggaugcacaaaccuuagugguuucagcuauauggagcugaaggugggcuacauuuccgcuaucaaaguaaauggguuuacuuguacgggaguggucaccgaagcagagacauauacuaacuucgugggcuacguuaccacaaccuuuaagagaaaacacuucaggccaauacccgaugccugccgggcggcuuauaauuggaagauggccggugacccucgcuacgaagagucuuugcaaaacccauaucccgauuaccauuggcuccgaacugugaagacaaccaaagagucgcugaucauuaucucaccuagcgucgcagaccuggauccauacgacaagagucuccacucccguguguuucccgggggaaaauguuuaggcauuacgguaucuagcacuuauugcuccaccaaucaugauuacacaaucuggaugcccgaggaaccuagacugggcacuucaugugacauauucaccaguagcaaggggaaaaaggccucuaagggagguaaaacaugcggcuuuguugaugaaagggggcuuuauaaguccuugaaaggagcuuguaagcugaaacuaugcggcgugcucggucugcggcuuauggacgggaccugggucucaauucagcacccagaugacacgaaguggugucccccugaccagcuggugaacuugccagauuuccccagcgacgagaucgagcaccucgugcuggaagaguuagucaaaaagcgcgaagagugccuggaugcacucgaaaguauuaugacuacaaagucuguuuccuuuagaaggcuuagcuaccugcggaaauuggugccgggauucggcaaggccuauaccaucuuuaauaaaacucuaauggaggcugacgcccauuacaagucgguacgcacauggaacgagaucauuccuucuaaaggcugccugaaggugcgagaaagaugucacccgccagucgaugagguguucuucaaugggauaauccucggaccugacgguaacguucugauucccgaaaugcaguccucacuucugcaacagcauauggaguugcucgaaaguagcgugaucccacugaugcaccccuuagcggauccuuccaccgucuuuaaggagggcgacgaggcagaagauuucguggagguacaucugccagacguucacaaacagauaucugggguggaucuaggacucccgagcuggggcaaguaucugcuuaugauugccgguggguuggcugcccugguccucaucaucugcucaauggcauguugcaggcggacgaaacguaccgaaagucgcagaaggggcuccggagagagcgaaaagaaagugacagcuacuccccagaaucggaaggucgugucuucaugggagcuguacaagagugagggcgacgcccgacuuuga

SEQ ID NO: 158571 - RNA, 1575 nt, Artificial Sequence
  derived and/or modified CDS sequence (opt3) from glycoprotein__RABV__AB128149.1
auggugccccaggcccugcuccuugucccuauccugggcuucagcuccugcuuugggaaguucccaauuuacaccauaccggacacauugggacccuggucuccuaucgauauucaccauuuaucauguccaaacaaucugguuguggaggacgaagguugcacuaaccuaaguggcuuuagcuauauggagcucaaaguagggagaaucuccgcuauuaaggugaauggauucacguguaccggcgucgugacagaagcagagacuuacaccaacuuuguugguuaugugacaaccacuuucaaaaggaagcacuuucggcccacaccugaugccugccgcgcggcuuacaauuggaaaauggccggggacccacgauaugaagagucucugcauucgcccuacccugauuaucacuggcuucguaccgucaagacgacuaaggagucacuggugaucauaagcccaaguguagcagacuuggauccguacgacaacucccuccauucuagaguuuuccccagcggaaaauguuccggcaucaccgugucaagugucuacugcagcacaaaucacgauuauacuguguggaugccugaaauucugaggcugggcaccucuugugacaucuuuacaaacucccgggggaagcgcgccucaaaaggaagcaagaccugcgguuucguggaugagagaggccucuacaaaaguuuaaagggggcuuguaagcugaaacuuugcggagucuugggccugaggcuaauggacgguacguggguugcaaugcaaacuucuaaugaaacaaagugguguccacccgaucagcucgugaaccugcacgaccuucgguccgacgagauugagcaucugguaaucgaagaguuggugaaaaagcgcgaagagugccucgaugcccuggaaagcauaauuaccacuaaaucggucucuuuucgaagauuauccuaucugaggaagcucgugccuggguucggaaaggcuuacacaaucuuuaauaaaacccuuauggaggccgaggcgcacuauaagucaguucggacguggaacgaaauuaucccaaguaaaggcugccugcgugugggcgggcgcugucauccccacgucaauggaguguucuucaacgguaucauuuugggcccggacgggcacguacuaauaccugagaugcagagcucccugcuccagcaacauaucgaacugcuugagucuagcguuauuccccugaugcacccauuggcagauccuuuuaccguguucaaggacggagaugaaacagaggacuuuaucgagguccaucuccccgaugugcacgaacaggucucaggcguggaccuggguuuaccaaauuggggcgaguacguucugcuaagugccgggacucucauagcucugaugcuuauuaucuucuugaugaccugcuguagaaaaguggauaggcccgaauccacacagcggagccugcgaggaacuggccgcaacguaucugucaccucacagagugggaaguuuaucccuagcugggaguccuauaaaucuggaggugaaacaggccucuga

SEQ ID NO: 158572 - RNA, 1575 nt, Artificial Sequence
  derived and/or modified CDS sequence (opt3) from glycoprotein__RABV__AB285215.1
auggugccccaggcccugcuguucgcuccucuucuggucuuuagcuugugcuucggcaaguuuccaaucuacaccauuccggacaaauuagggcccugguccccuauagauauccaccaucugucuuguccaaacaaucuaguuguggaggacgaaggaugcacaaaccucucagguuucaguuauauggagcugaagguaggcuacauuagcgcaaucaaagugaauggguuuacuuguacgggagucgugaccgaagccgagacauauacuaacuucguuggcuacgugaccacaaccuuuaagagaaaacacuucaggcccauuccugaugcgugccgggcugccuauaauuggaagauggccggugacccacgcuacgaagagucccuucauaaccccuauccugauuaccacuggcugcgaacugucaagacaaccaaagagucuuuggugaucauaucgccaucaguagcagaccucgauccguacgacaagagccugcauagucguguuuuucccuccgggaaauguucuggaaucacggugagcuccacuuauugcucaaccaaucacgauuacacaauuuggaugccugaaaacccaagacugggcaccaguugugacaucuucacuaauagcaggggcaagcgggcuucuaaagggggaaagacaugcgguuuugucgaugagcgcggccucuauaaguccuuaaaaggggcauguaagcugaaacuuugcggaguguugggccugagacuaauggacgguaccuggguggccaugcaaacgucagaugaaacuaaguggugucccccugaccagcucgucaacaugcacgacuucaggagcgaugagauugagcaucugguuguggaggaacuugugaaaaagcgggaagagugccuggacgcuuuggaaaguaucaugacaaccaaaucuguauccuuucgccgacucagccaccugagaaaguuagucccaggguucggaaaggccuacacuauauucaauaaaacacugauggaggcggaugcacauuauaagucggugaggaccuggaacgagauuauccccucuaaaggcugccuccggguuggcgggcguugucacccgcacgugaauggagucuuuuucaacgguauuauccuuggcccugacgggcaugugcugauccccgaaaugcaguccucauugcuacagcaacacauggagcugcucgaaaguagcguaauuccacugaugcauccucuugccgaucccuccacgguuuuuaaggacggagaugaggcugaagacuucguggagguccaccucccagaugugcauaaacaggucucuggcguggacuugggucuccccaauugggggaaguacguucuguuaagcgccggcacccugauagcacuaaugcucaucauuuuucugaugacaugcugucgcagagugaacaggccugagucaacucagcggagucuuggaggcaccgggcgaaagguauccgucacaagccagucuggaaaagugaucucaaguugggaaagcuauaaguccgguggcgagacucgcuuguga

SEQ ID NO: 158573 - RNA, 1575 nt, Artificial Sequence
  derived and/or modified CDS sequence (opt3) from glycoprotein__RABV__AB362483.1
auggugccccaggcccuacucuucgucccucuucugguuuuuagcuugugcuucggcaaguuuccaaucuacaccauuccggacaaauuagggcccugguccccuauagauauccaccaucugucuuguccaaacaaucuagugguagaggacgaaggaugcacaaaccucucagguuucaguuauauggagcugaaggugggcuacauuagcgcuaucaaagucaauggguuuacuuguacgggagugguuaccgaagcagagacauauacuaacuucgugggcuacgucaccacaaccuuuaagagaaaacacuucaggcccacuccugaugccugccgggcggcuuauaauuggaagauggccggugacccacgcuacgaagagucccuucauaaccccuauccugauuaccacuggcugcgaacagugaagaccacgaaagagucuuugguaauuaucucgccaucaguugcagaccucgauccguacgacaagagccugcauagucguguguuucccuccgggaaauguucuggaauaacugucagcuccaccuauugcucaacaaaucacgauuacacuaucuggaugccugaaaacccaagacugggcaccaguugugacauuuucacaaauagcaggggcaagcgggccucuaaaggguccaagaccugcggauuuguggaugagcgcggucucuauaagucauuaaaaggcgcuuguaagcugaaacuuugcgggguguugggacugagacuggucgacggcacguggaucgcaaugcaaacuagcgaugaaauuaaguggugucccccugaccagcucguuaaccugcacgacuucaggagugaugagaucgagcaucuugugguagaggaacuggugaaaaagcgggaagagugcuuggacgcccucgaaucuauagucacaaccaaauccgugagcuuucgccgacugucgcacuuaagaaagcugguuccagguuucgggaaggcuuacacuauuuucaauaaaacacucauggaggccgaugcgcauuauaagucuaucaggaccuggaacgagauuauccccuccaaaggaugccuucgggugggcggccguugucacccgcacgucaaugggguguuuuucaacggaaucauucuggguccugacggccauguauugauacccgaaaugcagucaagucuacugcagcaacacauggagcuccuggaaagcuccguugugccacuuaugcauccucuggcagaucccucuacggucuuuaaggacggggaugaggccgaagacuucaucgaggugcacuugccagauguccauaaacaggugagcggaguugaccucggccugcccgauugggguaaguacguguuaaugucagcugggguacugauugcccuaaugcucaucauaagucugaugaccugcugucgcggcguccacagaccuaauuccauucagcacaggcuuggaggcacagggcggaaggugagcguuacuucucagucaggaaaagugaucaguagcugggaguccuauaagucugguggcgaaacccgauuguga

SEQ ID NO: 158574 - RNA, 1575 nt, Artificial Sequence
  derived and/or modified CDS sequence (opt3) from glycoprotein__RABV__AB458799.1
auggugccccagguccugcuguucguuccucuucugguguuuagcuccugcuucggcaaguuuccaaucuacaccauuccggacaaauuggggcccuggucuccuauagauauccaccauuuaucauguccaaacaaucugguaguggaggacgaaggaugcacaaaccuaagugguuucagcuauauggagcucaaggucggcuacauuuccgccaucaaagugaauggguuuacuuguacgggaguugugaccgaagcugagacauauacuaacuucgucggcuacgugaccacaaccuuuaagagaaaacacuucaggcccaugccugaugcaugccgggccgcguauaauuggaagauggcuggugacccacgcuacgaagagucucugcauaaccccuauccugauuaccacuggcuucgaacuguaaagacaaccaaagagucgcugguuauuaucucaccaagcguggccgacuuggauccguacgacaagagucuccauucccgugucuuucccgggggaaaauguucuggcauaacggugagcuccacuugcuguucaaccaaucacgauuauacaaucuggaugccugaaaacccaagacugggcaccaguugcgacauuuucacuaauagcagggggaagcgggcaucuaaaggagguaagacauguggcuuuguggaugagcgcgggcuguacaagucccucaaaggagccugcaaguuaaaacuguguggcguccuugguuugagacugauggacgggaccuggguugcuauccaaacgucagaugaaauuaaguggugcagccccgaccagcuagugaaccuccacgacuuccauagugaugagaucgagcaccugguaguggaggaacuugucaaaaagagggaagagugccuggacgcauuggaaacuauaaugacaaccaaaucuguguccuuucggcgccucagccaucugcgaaaguuaguuccuggauucggcaaggccuauacuauuuucaauaaaacacugauggaggcugaugcccacuacaagucgaucagaaccuggaacgagauuaucccaucuaaaggcugucucagggucgggggacggugccacccccaugugaaugguguguuuuucaacggcaucauucuugggccggacggacacguacugauaccugaaaugcaguccucauugcuacaucagcacauggagcugcucgaaaguagcguuaucccccugaugcauccacuugcggauccuuccacgguguuuaaggacggcgaugaggcagaagacuucgucgaggugcaccuccccgauguccacaaacaaauuucugguguggacuuggggcucccaaauuggggcaaguauguucugaucagcgccggagcuuuaaccgcccugaugcuaaugauauuucucaugacauguugccguaaggcaaaccgcgcugagucaauucagcauaaccccggcgaaacugggagaaaagugaguguaaccucccacaauggaagggucaucagcucuugggagucauacaagagugguggcgaaacaaaacuguga

SEQ ID NO: 158575 - RNA, 1575 nt, Artificial Sequence
  derived and/or modified CDS sequence (opt3) from glycoprotein__RABV__AB458800.1
auggugccccaggcccuccuguucgucccucuucuggcuaucccauugugcuuuggcaaguucccgauuuacaccauacccgacaaauuagggccuuggagcccaaucgauauucaccaucuguccugucccaacaaucuaguuguggaggacgaaggaugcacaaaccucucugguuuuucauauauggagcugaagguaggcuacaucagugcaauuaaagugaauggguucacuuguacgggagucgugaccgaagccgagacauauacuaacuuuguuggcuacgugaccacaaccuucaagagaaaacacuuuaggccuacuccagaugcgugccggagcgcuuauaauuggaagauggccggugacccccgcuacgaagagucccuucauaacccuuauccagauuaccacuggcugcgaacagucaagaccacgaaagagucuuucgugaucauaucgccgucaguagcagacuuggaucccuacgacaagagccuccauagucguguuuuuccuagagggaaauguuccggaaucacugugucuagcaccuauugcuccacaaaucacgauuacacuauuuggaugccagaaaaccccaggcugggcaccucaugugacaucuucacaaauagucggggcaagcgcgccagcaaagggucuaagaccugcggauuugucgaugagagaggucuguauaagucccucaaaggcgcuuguaaguuaaaacugugcggggugcuuggauugaggcugauggacggcacguggguggcaauucaaacuucagaugaaacaaagugguguccuccagaccagcuagucaaccuccacgacuuccauagcgaugagaucgagcaccugguuguggaggaacuuguaaagaagcgggaagagugccuggacgccuuggaaaguauaaugaccacuaaaucuguguccuuucgccgacucagccaucugagaaaguuaguccccgguuucgggaaggcuuacacaauuuucaauaaaacccugauggaggccgaugcgcacuauaagucggugaggacguggaacgagaucauuccgucuaaaggaugccuccggguuggcggccguugucacccucaugugaauggggucuuuuucaacggaaucauccuuggucccgacggccacgugcugauuccagaaaugcaguccucauugcuacagcaacauauggagcugcucgaaaguagcguaauaccucugaugcacccccuugcagauccauccaccguuuuuaaggacggggaugaggccgaagacuucguggagguccaucugcccgaugugcacaaacaggucucuggaguggacuugggccucccuagcugggguaaguacguucugaugucagcugggaucuuaacagcccugaugcuaaugauuuuucucaugacuugcugucgcagaaccaauagggcagagaguauccagcacucccugggcgaaacaggacggaaggugagcguaacuucucagucaggccgagucauaaguagcugggaguccuauaaaucugggggagaaaccaaacuuuga

SEQ ID NO: 158576 - RNA, 1575 nt, Artificial Sequence; identical to SEQ ID NO: 158575
  derived and/or modified CDS sequence (opt3) from glycoprotein__RABV__AB458801.1

SEQ ID NO: 158577 - RNA, 1575 nt, Artificial Sequence; identical to SEQ ID NO: 158575
  derived and/or modified CDS sequence (opt3) from glycoprotein__RABV__AB458802.1

SEQ ID NO: 158578 - RNA, 1575 nt, Artificial Sequence; identical to SEQ ID NO: 158574
  derived and/or modified CDS sequence (opt3) from glycoprotein__RABV__AB458803.1

SEQ ID NO: 158579 - RNA, 1575 nt, Artificial Sequence
  derived and/or modified CDS sequence (opt3) from glycoprotein__RABV__AB458804.1
augaucccccaggugcugcuguucgucccucuucugguuuuuagcuccugcuucggcaaguuuccaauuuacaccauaccggacaaauuggggcccuggucuccuaucgauauucaccauuuaucauguccaaacaaucuggugguagaggacgaaggaugcacaaaccuaagugguuucagcuauauggagcucaaggugggcuacaucuccgccauuaaagucaauggguuuacuuguacgggagugguuaccgaagcugagacauauacuaacuucgugggcuacgucaccacaaccuuuaagagaaaacacuucaggcccaugccugaugcaugccgggccgcguauaauuggaagauggcuggugacccacgcuacgaagagucucugcauaaccccuauccugauuaccacuggcuucgaacugugaagacaaccaaagagucgcugguaaucauaucaccaagcguugccgacuuggauccguacgacaagagucuccauucccguguguuucccgggggaaaauguucuggcaucacggucagcuccacuugcuguucaaccaaucacgauuauacaauuuggaugccugaaaacccaagacugggcaccaguugcgacaucuucacuaauagcagggggaagcgggcaucuaaaggagguaagacauguggcuuuguggaugagcgcgggcuguacaagucccucaaaggagccugcaaguuaaaacuguguggcgugcuugguuugagacugauggacgggaccugggucgcuauucaaacgucagaugaaaucaaguggugcagccccgaccagcuaguuaaccuccacgacuuccauagugaugagauagagcaccuggugguagaggaacuugugaaaaagagggaagagugccuggacgcauuggaaacuauuaugacaaccaaaucugucuccuuucggcgccucagccaucugcgaaaguuagugccuggauucggcaaggccuauacuaucuucaauaaaacacugauggaggcugaugcccacuacaagucgauuagaaccuggaacgagaucaucccaucuaaaggcugucucaggguugggggacggugccacccccaugugaauggugucuuuuucaacggcauuauacuugggccggacggacacgugcugaucccugaaaugcaguccucauugcuacaucagcacauggagcugcucgaaaguagcguaauuccccugaugcauccacuugcggauccuuccacgguuuuuaaggacggcgaugaggcagaagacuucguggagguccaccuccccgaugugcacaaacaaaucucuggugucgacuuggggcucccaaauuggggcaaguaugugcugaccagcgccggagcuuuaacagcccugaugcuaaugauauuucucaugacuuguugccguaagaccaaccgcgcagagucaauucagagaagucccggcgaaacagagaggaaaguuuccgugacuagccauaacgggcggguaaucucuucaugggaaaguuacaagagcggaggugagaccaaacuguga

SEQ ID NO: 158580 - RNA, 1575 nt, Artificial Sequence
  derived and/or modified CDS sequence (opt3) from glycoprotein__RABV__AB458805.1
auggugccccagguccugcuguucguuccucuucugguguuuagcuccugcuucggcaaguuuccaaucuacaccauuccggacaaauuggggcccuggucuccuauagauauccaccauuuaucauguccaaacaaucugguaguggaggacgaaggaugcacaaaccuaagugguuucagcuauauggagcucaaggucggcuacauuuccgccaucaaagugaauggguuuacuuguacgggaguugugaccgaagcugagacauauacuaacuucgucggcuacgugaccacaaccuuuaagagaaaacacuucaggcccacuccugaugcaugccgggccgcguauaauuggaagauggcuggugacccacgcuacgaagagucucugcauaaccccuauccugauuaccacuggcuucgaacaguaaagaccacgaaagagucgcugguuauuaucucaccaagcguggccgacuuggauccguacgacaagagucuccauucccgugucuuucccgggggaaaauguucuggcauaacugugagcucaaccugcuguuccacaaaucacgauuauacuaucuggaugccugaaaacccaagacugggcaccaguugcgacauuuucacaaauagcagggggaagcgggcaucuaaaggagguaagaccuguggcuuuguggaugagcgcgggcuguacaagucccucaaaggagccugcaaguuaaaacuguguggcguccuugguuugagacugauggacgggacguggguugcuauccaaacuucagaugaaauuaaguggugcagccccgaccagcuagugaaccuccacgacuuccauagugaugagaucgagcaccugguaguggaggaacuugucaaaaagagggaagagugccuggacgcauuggaaacaauaaugaccacuaaaucuguguccuuucggcgccucagccaucugcgaaaguuaguuccuggauucggcaaggccuauacaauuuucaauaaaacccugauggaggcugaugcccacuacaagucgaucagaacguggaacgagauuaucccaucuaaaggcugucucagggucgggggacggugccacccccaugugaaugguguguuuuucaacggcaucauucuugggccggacggacacguacugauaccugaaaugcaguccucauugcuacaucagcacauggagcugcucgaaaguagcguuaucccccugaugcauccacuugcggauccuuccaccguguuuaaggacggcgaugaggcagaagacuucgucgaggugcaccuccccgauguccacaaacaaauuucugguguggacuuggggcucccaaauuggggcaaguauguucugaucagcgccggagcuuuaacagcccugaugcuaaugauauuucucaugacuuucugucguaaggcaaaccgcgcugagucaauucagcauaaccccggcgaaaccgggagaaaagugaguguaacaucccacaauggaagggucaucagcucuugggagucauacaagagugguggcgaaacuaaacuguga

SEQ ID NO: 158581 - RNA, 1575 nt, Artificial Sequence; identical to SEQ ID NO: 158575
  derived and/or modified CDS sequence (opt3) from glycoprotein__RABV__AB458806.1

SEQ ID NO: 158582 - RNA, 1575 nt, Artificial Sequence
  derived and/or modified CDS sequence (opt3) from glycoprotein__RABV__AB496676.1
augauccugcaggcccuccuuuucgugccccuguugauuagcuccuuaugccugggcaaguuuccuauauacaccaucccagacaaacuagggccguggucucccauugauauccaccaucucucauguccuaacaaucuggucguugaggacgaaggaugcacaaaccuuagugguuucagcuauauggagcugaaggugggcuacauuuccgcuaucaaaguaaauggguuuacuuguacgggaguggucaccgaagcagagacauauacuaacuucgugggcuacguuaccacaaccuuuaagagaaaacacuucaggccagugcccgaugccugccgggcggcuuauaauuggaagauggccggugacccucgcuacgaagagucuuugcaaaacccauaucccgauuaccauuggcuccgaacugucaagacaaccaaagagucgcugauaaucauuucaccuagcguggcagaccuggauccauacgacaagagucuccacucccguguauuucccgggggaaaauguuuaggcaucacgguuucuagcacuuauugcuccaccaaucaugauuacacaauuuggaugccggaagaaccuagacugggcacuucaugugacaucuucaccaguagcaaggggaaaaaggccucuaagggagguaaaacaugcggcuuuguggaugaaagggggcuuuauaaguccuugaaaggagcuuguaagcugaaacuaugcggcguccucggucugcggcuuauggacgggaccugggugucaauacagacgagcgaugacacuaagugguguccacccgaccagcuggugaacuugcacgauuuccacagugacgagauugagcaucucgucguugaggagcuggugaaaaagcgcgaagagugcuuagaugcacuggaaucuaucaugacaaccaaguccgugagcuuuagaaggcucucguaccuucggaaacugguaccuggauucggcaaggccuauacuauuuuuaauaaaacauugauggaggcugacgcccacuacaagucuguccgcaccuggaacgagaucaucccauccaaaggcugccuaaaggugcgagaaagaugucaucccccgguugaugggguguucuucaauggaauuauacuggguccugacggcaacguccucauccccgagaugcagucaagucugcuucaacagcacauggaacuguuggagagcuccgugauuccacucaugcacccucuggcggaucccucuacgguauuuaaggaaggggacgaggcagaggauuucguugaagugcauuuaccagacguccacaaacagaucagcggaguggaucugggccuacccucaugggguaaguaucuccugaugauagccgggggccuugcugccuugguccugauuaucugcaguauggcauguugcaggcggaccaaacguacagagucccgcagaaggggaagcggcgaaucugagaagaaaguggcugccacuccucagacccggaagguuaucucaaguugggaacucuacaagagcgagggggacgcgcgacuguga

SEQ ID NO: 158583 - RNA, 1575 nt, Artificial Sequence
  derived and/or modified CDS sequence (opt3) from glycoprotein__RABV__AB496677.1
augauccugcaggcccuccuuuucgugccccuguugauuagcuccuuaugccugggcaaguuuccuauauacaccaucccagacaaacuagggccguggucucccauugauauccaccaucucucauguccuaacaaucuggucguugaggacgaaggaugcacaaaccuuagugguuucagcuauauggagcugaaggugggcuacauuuccgcuaucaaaguaaauggguuuacuuguacgggaguggucaccgaagcagagacauauacuaacuucgugggcuacguuaccacaaccuuuaagagaaaacacuucaggccagugcccgaugccugccgggcggcuuauaauuggaagauaacuggugacccucgcuacgaagagucuuugcaaaacccauaucccgauuaccauuggcuccgaacagucaagaccacgaaagagucgcugaucauuaucucaccuagcguggccgaccuggauccauacgacaagagucuccacucccguguauuucccgggggaaaauguuuaggcauuacuguuucuagcaccuauugcuccacaaaucaugauuacacuaucuggaugccggaagaaccuagacugggcaccucaugugacauauucacaaguagcaaggggaaaaaggcaucuaagggagguaaaaccugcggcuuuguggaugaaagggggcuuuauaaguccuugaaaggagccuguaagcugaaacuaugcggcguccucggucugcggcuuauggacgggacgugggugucaauucagacuagcgaugacacaaagugguguccacccgaccagcuggugaacuugcacgauuuccacagugacgagaucgagcaucucgucguugaggagcuggugaaaaagcgcgaagagugcuuagaugcucuggaaucuauuaugaccacuaaguccgugagcuuuagaaggcucucguaccuucggaaacugguaccuggauucggcaaggcauauacaaucuuuaauaaaaccuugauggaggccgacgcucacuacaagucuguccgcacguggaacgagaucauuccauccaaaggcugccuaaaggugcgagaaagaugucaucccccgguugaugggguguucuucaauggaauaauccuggguccugacggcaacguccucauucccgagaugcagucaagucugcuucaacagcacauggaacuguuggagagcuccgugaucccacucaugcacccucuggccgaucccucuaccguauuuaaggaaggggacgaggcggaggauuucguugaagugcauuuaccagacguccacaaacagauaagcggaguggaucugggccuacccucaugggguaaguaucuccugaugauugcagggggccuugccgcuuugguccugaucaucugcaguauggccuguugcaggcggacaaaacguacugagucccgcagaaggggaagcggcgaaucugagaagaaagugaccgcaacaccucagacucggaagguugugucaaguugggaacucuacaagagcgagggggacgcucgacuguga

SEQ ID NO: 158584 - RNA, 1575 nt, Artificial Sequence
  derived and/or modified CDS sequence (opt3) from glycoprotein__RABV__AB496678.1
augauccugcaggcccuccuuuucgugccccuguugauuagcuccuuaugccugggcaaguuuccuauauacaccaucccagacaaacuagggccguggucucccauugauauccaccaucucucauguccuaacaaucuggucguugaggacgaaggaugcacaaaccuuagugguuucagcuauauggagcugaaggugggcuacauuuccgcuaucaaaguaaauggguuuacuuguacgggaguggucaccgaagcagagacauauacuaacuucgugggcuacguuaccacaaccuuuaagagaaaacacuucaggccaaugcccgaugccugccgggcggcuuauaauuggaagaugacuggugacccucgcuacgaagagucuuugcaaaacccauaucccgauuaccauuggcuccgaacagugaagaccacgaaagagucgcugauaaucauuucaccuagcgucgccgaccuggauccauacgacaagagucuccacucccguguguuucccgggggaaaauguuuaggcaucacuguaucuagcaccuauugcuccacaaaucaugauuacacuauuuggaugccggaagaaccuagacugggcaccucaugugacaucuucacaaguagcaaggggaaaaaggcaucuaagggagguaaaaccugcggcuuuguugaugaaagggggcuuuauaaguccuugaaaggagccuguaagcugaaacuaugcggcgugcucggucugcggcuuauggacgggacgugggucucaauacagacuagcgaugacacaaagugguguccacccgaccagcuggugaacuugcacgauuuccacagugacgagauugagcaucucguggucgaggagcugguuaaaaagcgcgaagagugcuuagaugcucuggaaucuaucaugaccacuaaguccgugagcuuuagaaggcucucguaccuucggaaacugguaccuggauucggcaaggcauauacaauuuuuaauaaaaccuugauggaggccgacgcucacuacaagucugugcgcacguggaacgagaucaucccauccaaaggcugccuaaagguccgagaaagaugucaucccccgguggaugggguuuucuucaauggaauuauacuggguccugacggcaacgugcucauccccgagaugcagucaagucugcuucaacagcacauggaacuguuggagagcuccgucauuccacucaugcacccucuggccgaucccucuaccguguuuaaggaaggggacgaggcggaggauuucguagaaguucauuuaccagacgugcacaaacagaucagcggagucgaucugggccuacccucaugggguaaguaucuccugaugauagcagggggccuugccgcuuuggugcugauuaucugcaguauggccuguugcaggcggacaaaacguacugagucccgcagaaggggaagcggcgaaucugagaagaaagucaccgcaacaccucagacucggaaggugguuucaaguugggaacucuacaagagcgagggggacgcucgacuguga

SEQ ID NO: 158585 - RNA, 1575 nt, Artificial Sequence
  derived and/or modified CDS sequence (opt3) from glycoprotein__RABV__AB496679.1
augauccugcaggcccuccuuuucgugccccuguugauuagcuccuuaugccugggcaaguuuccuauauacaccaucccagacaaacuagggccguggucucccauugauauccaccaucucucauguccuaacaaucuggucguugaggacgaaggaugcacaaaccuuagugguuucagcuauauggagcugaaggugggcuacauuuccgcuaucaaaguaaauggguuuacuuguacgggaguggucaccgaagcagagacauauacuaacuucgugggcuacguuaccacaaccuuuaagagaaaacacuucaggccaauacccgaugccugccgggcggcuuauaauuggaagauggccggugacccucgcuacgaagagucuuugcaaaacccauaucccgauuaccauuggcuccgaacugugaagacaaccaaagagucgcugaucauuaucucaccuagcgucgcagaccuggauccauacgacaagagucuccacucccguguguuucccgggggaaaauguuuaggcauuacgguaucuagcacuuauugcuccaccaaucaugauuacacaaucuggaugccggaagaaccuagacugggcacuucaugugacauauucaccaguagcaaggggaaaaaggccucuaagggagguaaaacaugcggcuuuguugaugaaagggggcuuuauaaguccuugaaaggagcuuguaagcugaaacuaugcggcgugcucggucugcggcuuauggacgggaccugggucucaauucagacgagcgaugacacuaagugguguccacccgaccagcuggugaacuugcacgauuuccacagugacgagaucgagcaucucguggucgaggagcugguuaaaaagcgcgaagagugcuuagaugcacuggaaucuauuaugacaaccaaguccgugagcuuuagaaggcucucguaccuucggaaacugguaccuggauucggcaaggccuauacuaucuuuaauaaaacauugauggaggcugacgcccacuacaagucugugcgcaccuggaacgagaucauuccauccaaaggcugccuaaagguccgagaaagaugucaucccccgguggaugggguuuucuucaauggaauaauccuggguccugacggcaacgugcucauucccgagaugcagucaagucugcuucaacagcacauggaacuguuggagagcuccgucaucccacucaugcacccucuggcggaucccucuacgguguuuaaggaaggggacgaggcagaggauuucguagaaguucauuuaccagacgugcacaaacagauaagcggagucgaucugggccuacccucaugggguaaguaucuccugaugauugccgggggccuugcugccuuggugcugaucaucugcaguauggcauguugcaggcggaccaaacagacagagucccgucgcagaggaagcggcgaaucugagaagaaagucacugcuaccccucaaacaaagaaggugguuucaaguugggaacucuacaaaagcgagggggacgccaggcuguga

SEQ ID NO: 158586 - RNA, 1575 nt, Artificial Sequence
  derived and/or modified CDS sequence (opt3) from glycoprotein__RABV__AB496680.1
augauccugcccgcccuccuuuucgugccucuguugauuagcuccuuaugccugggcaaguuuccaauauacaccaucccggacaaacuagggcccuggucuccuauugauauccaccaucucucauguccaaacaaucuggucguugaggacgaaggaugcacaaaccuuagugguuucagcuauauggagcugaaggugggcuacauuuccgcuaucaaaguaaauggguuuacuuguacgggaguggucaccgaagcagagacauauacuaacuucgugggcuacguuaccacaaccuuuaagagaaaacacuucaggcccauaccugaugccugccgggcggcuuauaauuggaagauggccggugacccacgcuacgaagagucuuugcagaaccccuauccugauuaccauuggcuccgaacugugaagacaaccaaagagucgcugaucauuaucucaccaagcgucgcagaccuggauccguacgacaagagucuccacucccguguguuucccgggggaaaauguuuaggcauuacgguaucuagcacuuauugcuccaccaaucaugauuacacaaucuggaugccugaagaaccaagacugggcacuucaugugacauauucaccaguagcaaggggaaaaaggccucuaagggagguaaaacaugcggcuuuguugaugaaagggggcuuuauaaguccuugaaaggagcuuguaagcugaaacuaugcggcgugcucggucugcggcuuauggacgggaccugggucucaauucaaacgagcgaugacacuaaguggugucccccugaccagcuggugaacuugcacgauuuccacagugacgagaucgagcaucucguggucgaggagcugguuaaaaagcgcgaagagugcuuagaugcacuggaaucuauuaugacaaccaaguccgugagcuuuagaaggcucucguaccuucggaaacugguaccaggauucggcaaggccuauacuaucuuuaauaaaacauugauggaggcugacgcccacuacaagucugugcgcaccuggaacgagaucauucccuccaaaggcugccuaaagguccgagaaagaugucauccgccuguggaugggguuuucuucaauggaauaauccugggucccgacggcaacgugcucauuccagagaugcagucaagucugcuucagcaacacauggaacuguuggagagcuccgucaucccucucaugcacccccuggcggauccaucuacgguguuuaaggaaggggacgaggcagaggauuucguagaaguucauuuacccgacgugcacaaacagauaagcggagucgaucugggccuaccuucaugggguaaguaucuccugaugauugccgggggccuugcuaccuuggugcugaucaucugcaguauggccuguugcaggcggacaaaacguacugagucccgcagaaggggaagcggcgaaucugagaagaaagucaccgcaacaccacagacucggaaggugguuucaaguugggaacucuacaagagcgagggggacgcucgacuguga

SEQ ID NO: 158587 - RNA, 1575 nt, Artificial Sequence
  derived and/or modified CDS sequence (opt3) from glycoprotein__RABV__AB496681.1
augauccugcaggcccuccuuuucgugccccuguugauuagcuccuuaugccugggcaaguuuccuauauacaccaucccagacaaacuagggccguggucucccauugauauccaccaucucucauguccuaacaaucuggucguugaggacgaaggaugcacaaaccuuagugguuucagcuauauggagcugaaggugggcuacauuuccgcuaucaaaguaaauggguuuacuuguacgggaguggucaccgaagcagagacauauacuaacuucgugggcuacguuaccacaaccuuuaagagaaaacacuucaggccaauacccgaugccugccgggcggcuuauaauuggaagauggccggugacccucgcuacgaagagucuuugcaaaacccauaucccgaguaccauuggcuccgaacugugaagacaaccaaagaaucgcugaucauuaucucaccuagcgucgcagaucuggacccauacgauaagagucuccacucccguguguuucccgggggaaaauguuuaggcauuacgguaucuagcacuuauugcuccaccaaucaugacuacacaaucuggaugccggaggaaccuagacugggcacuucaugugauauauucaccaguagcaaggggaaaaaggccucuaagggagguaaaacaugcggcuuuguugacgagagggggcuuuauaaguccuugaaaggagcuuguaagcugaaacuaugcggcgugcucggucugcggcuuauggaugggaccugggucucaauucagacgagcgacgauacuaagugguguccacccgaccagcuggugaacuugcacgacuuccacagugaugagaucgaacaucucguggucgaggaacugguuaaaaagcgcgaggaaugcuuagacgcacuggagucuauuaugacaaccaaguccgugagcuuuagaaggcucucguaccuucggaaacugguaccuggauucggcaaggccuauacuaucuuuaauaaaacauugauggaggcugaugcccacuacaagucugugcgcaccuggaacgaaaucauuccauccaaaggcugccuaaagguccgagagagaugucaucccccgguggacgggguuuucuucaauggaauaauccuggguccugauggcaacgugcucauucccgaaaugcagucaagucugcuucaacagcacauggagcuguuggaaagcuccgucaucccacucaugcacccucuggcggaccccucuacgguguuuaaggagggggaugaggcagaagacuucguagagguucauuuaccagaugugcacaaacagauaagcggagucgaccugggccuacccucaugggguaaguaucuccugaugauugccgggggccuugcuaccuuggugcugaucaucugcaguauggccuguugcaggcggacaaaacguacugaaucccgcagaaggggaagcggcgagucugaaaagaaugucaccgcaacaccucagacucggaaagugguuucaaguugggagcucuacaagagcgagggggaugcucgacuguga

SEQ ID NO: 158588 - RNA, 1575 nt, Artificial Sequence
  derived and/or modified CDS sequence (opt3) from glycoprotein__RABV__AB496682.1
augauccugcaggcccuccuuuucgugccccuguugauuagcuccucuugcuuaggcaaguuuccuauauacaccaucccagacaaacuggggccguggucacccauugauauccaccaucuaaguuguccuaacaaucucgucguugaggacgaaggaugcacaaaccugagcgguuucuccuauauggagcuuaaggugggcuacauuucugcuaucaaaguaaauggguuuacuuguacgggaguggucaccgaagcagagacauauacuaacuucgugggcuacguuaccacaaccuuuaagagaaaacacuucaggccaauacccgaugccugccgggcggcuuauaauuggaagauggccggugacccucgcuacgaagagucgcugcaaaacccauaucccgauuaccauugguugcgaacugugaagacaaccaaagagucacucaucauuaucagcccuagugucgcagaccuggauccauacgacaagucccugcacucucguguguuucccgggggaaaaugucucggcauuacgguaagcuccacuuauugcucaaccaaucaugauuacacaaucuggaugccggaagaaccuagauuaggcaccaguugugacauauucacuagcucuaaggggaaaaaggccuccaagggagguaaaacaugcggcuuuguugaugaaagggggcuguauaagucacuuaaaggagcuuguaaguugaaacugugcggcgugcuaggucuccggcugauggacgggaccugggucagcauucagacgagugaugacacuaagugguguccacccgaccagcuugugaaccugcacgauuuccacucugacgagaucgagcauuugguggucgaggagcucguuaaaaagcgcgaagagugccuggaugcauuagaauccauuaugacaaccaagagcgugucguuuagaaggcugucuuaccuccggaaacuuguaccuggauucggcaaggccuauacuaucuuuaauaaaacacugauggaggcugacgcccacuacaaguccgugcgcaccuggaacgagaucauuccaucaaaaggcugcuugaagguccgagaaagaugucaucccccgguggaugggguuuucuucaauggaauaauccuagguccugacggcaacgugcugauucccgagaugcagaguagccuccugcaacagcacauggaacuucuggaguccucugucaucccauugaugcacccucucgcggaucccagcacgguguuuaaggaaggggacgaggcagaggauuucguagaaguucaucugccagacgugcacaaacagauaucaggagucgauuuaggccugcccaguugggguaaguaucuacucaugauugccgggggccuggcuacccuuguguugaucaucugcuccgucgccuguugcaggcggacaaaacguacugagagccgcagaaggggaucuggcgaaucagggaagaaagugaccacaacuccucagacccggaagguugugaguagcugggagcuguacaaguccgaaggagacgcacgacucuga

SEQ ID NO: 158589 - RNA, 1575 nt, Artificial Sequence
  derived and/or modified CDS sequence (opt3) from glycoprotein__RABV__AB496683.1
augauccugcaggcccuccuuuucgugccccuguugauuagcuccuuaugccugggcaaguuuccuauauacaccaucccagacaaacuagggccguggucucccauugauauccaccaucucucauguccuaacaaucuggucguugaggacgaaggaugcacaaaccuuagugguuucagcuauauggagcugaaggugggcuacauuuccgcuaucaaaguaaauggguuuacuuguacgggaguggucaccgaagcagagacauauacuaacuucgugggcuacguuaccacaaccuuuaagagaaaacacuucaggccagugcccgaugccugccgggcggcuuauaauuggaagauggccggugacccucgcuacgaagagucuuugcaaaacccauaucccgauuaccauuggcuccgaacugucaagacaaccaaagagucgcugauaaucauuucaccuagcguggcagaccuggauccauacgacaagagucuccacucccguguauuucccgggggaaaauguuuaggcaucacgguuucuagcacuuauugcuccaccaaucaugauuacacaauuuggaugccggaagaaccuagacugggcacuucaugugacaucuucaccaguagcaaggggaaaaaggccucuaagggagguaaaacaugcggcuuuguggaugaaagggggcuuuauaaguccuugaaaggagcuuguaagcugaaacuaugcggcguccucggucugcggcuuauggacgggaccugggugucaauacagacgagcgaugacacuaagugguguccacccgaccagcuggugaacuugcacgauuuccacagugacgagauugagcaucucgucguugaggagcuggugaaaaagcgcgaagagugcuuagaugcacuggaaucuaucaugacaaccaaguccgugagcuuuagaaggcucucguaccuucggaaacugguaccuggauucggcaaggccuauacuauuuuuaauaaaacauugauggaggcugacgcccacuacaagucuguccgcaccuggaacgagaucaucccauccaaaggcugccuaaaggugcgagaaagaugucaucccccgguugaugggguguucuucaauggaauuauacuggguccugacggcaacguccucauccccgagaugcagucaagucugcuucaacagcacauggaacuguuggagagcuccgugauuccacucaugcacccucuggcggaucccucuacgguauuuaaggaaggggacgaggcagaggauuucguugaagugcauuuaccagacguccacaaacagaucagcggaguggaucugggccuacccucaugggguaaguaucuccugaugauagccgggggccuugcugccuugguccugauuaucugcaguauggcauguugcaggcggaccaaacguacagagucccgcagaaggggaagcggcgaaucugagaagaaagugacugcuaccccucagacacggaagguugugucaaguugggaacucuacaagagcgagggggacgcccgacuguga

SEQ ID NO: 158590 - RNA, 1575 nt, Artificial Sequence
  derived and/or modified CDS sequence (opt3) from glycoprotein__RABV__AB496684.1
augauccugcaggcccuccuuuucgugccccuguugauuagcuccuuaugccugggcaaguuuccuauauacaccaucccagacaaacuagggccguggucucccauugauauccaccaucucucauguccuaacaaucuggucguugaggacgaaggaugcacaaaccuuagugguuucagcuauauggagcugaaggugggcuacauuuccgcuaucaaaguaaauggguuuacuuguacgggaguggucaccgaagcagagacauauacuaacuucgugggcuacguuaccacaaccuuuaagagaaaacacuucaggccaauacccgaugccugccgggcggcuuauaauuggaagauggccggugacccucgcuacgaagagucuuugcaaaacccauaucccgauuaccauuggcuccgaacugugaagacaaccaaagagucgcugaucauuaucucaccuagcgucgcagaccuggauccauacgacaagagucuccacucccguguguuucccgggggaaaauguuuaggcauuacgguaucuagcacuuauugcuccaccaaucaugauuacacaaucuggaugccggaagaaccuagacugggcacuucaugugacauauucaccaguagcaaggggaaaaaggccucuaagggagguaaaacaugcggcuuuguugaugaaagggggcuuuauaaguccuugaaaggagcuuguaagcugaaacuaugcggcgugcucggucugcggcuuauggacgggaccugggucucaauucagacgagcgaugacacuaagugguguccacccgaccagcuggugaacuugcacgauuuccacagugacgagaucgagcaucucguggucgaggagcugguuaaaaagcgcgaagagugcuuagaugcacuggaaucuauuaugacaaccaaguccgugagcuuuagaaggcucucguaccuucggaaacugguaccuggauucggcaaggccuauacuaucuuuaauaaaacauugauggaggcugacgcccacuacaagucugugcgcaccuggaacgagaucauuccauccaaaggcugccuaaagguccgagaaagaugucaucccccgguggaugggguuuucuucaauggaauaauccuggguccugacggcaacgugcucauucccgagaugcagucaagucugcuucaacagcacauggaacuguuggagagcuccgucaucccacucaugcacccucuggcggaucccucuacgguguuuaaggaaggggacgaggcagaggauuucguagaaguucauuuaccagacgugcacaaacagauaagcggagucgaucugggccuacccucaugggguaaguaucuccugaugauugccgggggccuugcugccuuggugcugaucaucugcaguauggcauguugcaggcggaccaaacguacagagucccgcagaaggggaagcggcgaaucugagaagaaagucacugcugccccucagacccggaaggugguuucaaguugggaacucuacaagagcgagggggacgcgcgacuguga

SEQ ID NO: 158591 - RNA, 1575 nt, Artificial Sequence
  derived and/or modified CDS sequence (opt3) from glycoprotein__RABV__AB496685.1
augauccugcaggcccuccuuuucgugccccuguugauuagcuccuuaugccugggcaaguuuccuauauacaccaucccagacaaacuagggccguggucucccauugauauccaccaucucucauguccuaacaaucuggucguugaggacgaaggaugcacaaaccuuagugguuucagcuauauggagcugaaggugggcuacauuuccgcuaucaaaguaaauggguuuacuuguacgggaguggucaccgaagcagagacauauacuaacuucgugggcuacguuaccacaaccuuuaagagaaaacacuucaggccaauacccgaugccugccgggcggcuuauaauuggaagauggccggugacccucgcuacgaagagucuuugcaaaacccauaucccgauuaccauuggcuccgaacugugaagacaaccaaagagucgcugaucauuaucucaccuagcgucgcagaccuggauccauacgacaagagucuccacucccguguguuucccgggggaaaauguuuaggcauuacgguaucuagcacuuauugcuccaccaaucaugauuacacaaucuggaugccggaggaaccuagacuggaaacuucaugugacauauucaccaguagcaagggcaaaaaggccucuaaagggggaaagacaugcgguuuuguugaugagaggggccuuuauaaguccuugaaaggggcuuguaagcugaaacuaugcggagugcucggccugcggcuuauggacgguaccugggucucaauucagacgagcgaugacacuaagugguguccacccgaccagcuggugaacuugcacgauuuccacagugacgagaucgaacaucucguggucgaggaacugguuaaaaagcgcgaggaaugcuuagaugcacuggagucuauuaugacaaccaaguccgugagcuuuagaaggcucucguaccuucggaaacugguaccuggguucggaaaggccuauacuaucuuuaauaaaacauugauggaggcugacgcccacuacaagucugugcgcaccuggaacgaaaucauuccauccaaaggcugccuaaagguccgagagagaugucaucccccgguggauggcguuuucuucaaugggauaauccugggaccugacgguaacgugcucauucccgaaaugcagucaagucugcuucaacagcacauggagcuguuggaaagcuccgucaucccacucaugcacccucuggcggaucccucuacgguguuuaaggagggcgacgaggcagaagauuucguagagguucauuuaccagacgugcacaaacagauaagcggggucgaucugggacuacccucauggggcaaguaucuccugaugauugccggugggcuugcuaccuuggugcugaucaucugcaguauggccuguugcaggcgggcaaaacguacagaaucccgcagaaggggcagccgggagucugaaaagaaagucacugcugccccucagacccgaaaggugguuucaaguugggagcucuacaagagcgagggagacgcgcgccuguga

SEQ ID NO: 158592 - RNA, 1575 nt, Artificial Sequence; identical to SEQ ID NO: 158564
  derived and/or modified CDS sequence (opt3) from glycoprotein__RABV__AB496686.1

SEQ ID NO: 158593 - RNA, 1575 nt, Artificial Sequence
  derived and/or modified CDS sequence (opt3) from glycoprotein__RABV__AB496687.1
augauccugcaggcccuccuuuucgugccccuguugauuagcuccuuaugccugggcaaguuuccuauauacaccaucccagacaaacuagggccguggucucccauugauauccaccaucucucauguccuaacaaucuggucguugaggacgaaggaugcacaaaccuuagugguuucagcuauauggagcugaaggugggcuacauuuccgcuaucaaaguaaauggguuuacuuguacgggaguggucaccgaagcagagacauauacuaacuucgugggcuacguuaccacaaccuuuaagagaaaacacuucaggccagugcccgaugccugccgggcggcuuauaauuggaagauggccggugacccucgcuacgaagagucuuugcaaaacccauaucccgauuaccauuggcuccgaacugucaagacaaccaaagagucgcugauaaucauuucaccuagcguggcagaccuggauccauacgacaagagucuccacucccguguauuucccgggggaaaauguuuaggcaucacgguuucuagcacuuauugcuccaccaaucaugauuacacaauuuggaugccggaagaaccuagacugggcacuucaugugacaucuucaccaguagcaaggggaaaaaggccucuaagggagguaaaacaugcggcuuuguggaugaaagggggcuuuauaaguccuugaaaggagcuuguaagcugaaacuaugcggcguccucggucugcggcuuauggacgggaccugggugucaauacagacgagcgaugacacuaagugguguccacccgaccagcuggugaacuugcacgauuuccacagugacgagauugagcaucucgucguugaggagcuggugaaaaagcgcgaagagugcuuagaugcacuggaaucuaucaugacaaccaaguccgugagcuuuagaaggcucucguaccuucggaaacugguaccuggauucggcaaggccuauacuauuuuuaauaaaacauugauggaggcugacgcccacuacaagucuguccgcaccuggaacgagaucaucccauccaaaggcugccuaaaggugcgagaaagaugucaucccccgguugaugggguguucuucaauggaauuauacuggguccugacggcaacguccucauccccgagaugcagucaagucugcuucaacagcacauggaacuguuggagagcuccgugauuccacucaugcacccucuggcggaucccucuacgguauuuaaggaaggggacgaggcagaggauuucguugaagugcauuuaccagacguccacaaacagaucagcggaguggaucugggccuacccucaugggguaaguaucuccugaugauagccgggggccuugcugccuugguccugauuaucugcaguauggcauguugcaggcggaccaaacguacagagucccgcagaaggggaagcggcgaaucugagaagaaagugacugcuaccccucagacacggaagguuaucucaaguugggaacucuacaagagcgagggggacgcccgacuguga

SEQ ID NO: 158594 - RNA, 1575 nt, Artificial Sequence
  derived and/or modified CDS sequence (opt3) from glycoprotein__RABV__AB496689.1
augauccugcaggcccucagauucgugccccuucugauuagcuccuugugcuuaggcaaguuuccuauauacaccaucccagacaaacuggggccguggucucccauugauauccaccaucuaucauguccuaacaaucucgucguugaggacgaaggaugcacaaaccugagugguuucagcuauauggagcuuaaggugggcuacauuuccgcuaucaaaguaaauggguuuacuuguacgggaguggucaccgaagcagagacauauacuaacuucgugggcuacguuaccacaaccuuuaagaggaaacacuuccggccaauacccgaugccugccgcgcggcuuauaauuggaagauggccggugacccucgauacgaagagucucugcaaaacccauaucccgauuaccauugguugcguacugugaagacaaccaaagagucgcucaucauuaucucaccuagcgucgcagaccuggauccauacgacaagagucugcacuccagaguguuucccgggggaaaaugucucggcauuacgguaucuagcacuuauugcuccaccaaucaugauuacacaaucuggaugccggaagaaccuagguuaggcacuucaugugacauauucaccaguagcaaggggaaaaaggccucuaagggagguaaaacaugcggcuuuguugaugaacgggggcuguauaagucccuuaaaggagcuuguaaguugaaacugugcggcgugcuaggucuccgccugauggacgggaccugggucucaauucagacgagcgaugacacuaagugguguccacccgaccagcuugugaaccugcacgauuuccacagugacgagaucgagcauuugguggucgaggagcucguuaaaaagagagaagagugccuggaugcauuagaaucuauuaugacaaccaaguccgugagcuuuaggcggcugucguaccuccgcaaacuuguaccuggauucggcaaggccuauacuaucuuuaauaaaacacugauggaggcugacgcccacuacaagucugugcgaaccuggaacgagaucauuccauccaaaggcugcuugaaggucagagaaaggugucaucccccgguggaugggguuuucuucaauggaauaauccuagguccugacggcaacgugcugauucccgagaugcagucaagucuccugcaacagcacauggaacuucuggagagcuccgucaucccauugaugcacccucucgcggaucccucuacgguguuuaaggaaggggacgaggcagaggauuucguagaaguucaucugccagacgugcacaaacagauaagcggagucgauuuaggccugcccucaugggguaaguaucuacucaugauugccgggggccuggcugcccuuguguugaucaucugcaguauggcauguugccggcguaccaaacgcacagaguccagaaggcggggaagcggcgaaucugagaagaaagucacugcuaccccucagacacgaaaggugguuucaaguugggaacuguacaagagcgagggggacgcccgccucuga

SEQ ID NO: 158595 - RNA, 1575 nt, Artificial Sequence
  derived and/or modified CDS sequence (opt3) from glycoprotein__RABV__AB496690.1
augauccugcaggcccuccuuuucgugccccuguugauuagcuccuuaugccugggcaaguuuccuauauacaccaucccagacaaacuagggccguggucucccauugauauccaccaucucucauguccuaacaaucuggucguugaggacgaaggaugcacaaaccuuagugguuucagcuauauggagcugaaggugggcuacauuuccgcuaucaaaguaaauggguuuacuuguacgggaguggucaccgaagcagagacauauacuaacuucgugggcuacguuaccacaaccuuuaagagaaaacacuucaggccaauacccgaugccugccgggcggcuuauaauuggaagauggccggugacccucgcuacgaagagucuuugcaaaacccauaucccgauuaccauuggcuccgaacugugaagacaaccaaagagucgcugaucauuaucucaccuagcgucgcagaccuggauccauacgacaagagucuccacucccguguguuucccgggggaaaauguuuaggcauuacgguaucuagcacuuauugcuccaccaaucaugauuacacaaucuggaugccggaagaaccuagacugggcacuucaugugacauauucaccaguagcaaggggaaaaaggccucuaagggagguaaaacaugcggcuuuguugaugaaagggggcuuuauaaguccuugaaaggagcuuguaagcugaaacuaugcggcgugcucggucugcggcuuauggacgggaccugggucucaauucagacgagcgaugacacuaagugguguccacccgaccagcuggugaacuugcacgauuuccacagugacgagaucgagcaucucguggucgaggagcugguuaaaaagcgcgaagagugcuuagaugcacuggaaucuauuaugacaaccaaguccgugagcuuuagaaggcucucguaccuucggaaacugguaccuggauucggcaaggccuauacuaucuuuaauaaaacauugauggaggcugacgcccacuacaagucugugcgcaccuggaacgagaucauuccauccaaaggcugccuaaagguccgagaaagaugucaucccccgguggaugggguuuucuucaauggaauaauccuggguccugacggcaacgugcucauucccgagaugcagucaagucugcuucaacagcacauggaacuguuggagagcuccgucaucccacucaugcacccucuggcggaucccucuacgguguuuaaggaaggggacgaggcagaggauuucguagaaguucauuuaccagacgugcacaaacagauaagcggagucgaucugggccuacccucaugggguaaguaucuccugaugauugccgggggccuugcugccuuggugcugaucaucugcaguauggcauguugcaggcggaccaaacguacagagucccgcagaaggggaagcggcgaaucugagaagaaagucacugcuaccccucagacacggaaggugauuucaaguugggaacucuacaagagcgagggggacgcccgacuguga

SEQ ID NO: 158596 - RNA, 1575 nt, Artificial Sequence
  derived and/or modified CDS sequence (opt3) from glycoprotein__RABV__AB496691.1
augauccugcaggcccuccuuuucgugccccuguugauuagcuccuuaugccugggcaaguuuccuauauacaccaucccagacaaacuagggccguggucucccauugauauccaccaucucucauguccuaacaaucuggucguugaggacgaaggaugcacaaaccuuagugguuucagcuauauggagcugaaggugggcuacauuuccgcuaucaaaguaaauggguuuacuuguacgggaguggucaccgaagcagagacauauacuaacuucgugggcuacguuaccacaaccuuuaagagaaaacacuucaggccaauacccgaugccugccgggcggcuuauaauuggaagauggccggugacccucgcuacgaagagucuuugcaaaacccauaucccgauuaccauuggcuccgaacugugaagacaaccaaagagucgcugaucauuaucucaccuagcgucgcagaccuggauccauacgacaagagucuccacucccguguguuucccgggggaaaauguuuaggcauuacgguaucuagcacuuauugcuccaccaaucaugauuacacaaucuggaugccggaagaaccuagacugggcacuucaugugacauauucauuaguagcaaggggaaaaaggccucuaagggagguaaaaccugcggcuuuguugaugaaagggggcuuuauaaguccuugaaaggagcuuguaagcugaaacuaugcggcgugcucggucugcggcuuauggacgggacaugggucucaauccagaccagcgaugacacgaagugguguccacccgaccagcuggugaacuugcacgauuuccacagugacgagauugagcaucucguggucgaggagcugguuaaaaagcgcgaagagugcuuagaugcacuggaaucuaucaugacuacaaaguccgugagcuuuagaaggcucucguaccuucggaaacugguaccuggauucggcaaggccuauaccaucuuuaauaaaacuuugauggaggcugacgcccacuacaagucugugcgcacauggaacgagauuauaccauccaaaggcugccuaaagguccgagaaagaugucaucccccgguggaugggguuuucuucaauggaaucauucuggguccugacggcaacgugcucauccccgagaugcagucaagucugcuucaacagcacauggaacuguuggagagcuccgucauaccacucaugcacccucuggcggaucccucuaccguguuuaaggaaggggacgaggcagaggauuucguagaaguucauuuaccagacgugcacaaacagauuagcggagucgaucugggccuacccucaugggguaaguaucuccugaugaucgccgggggccuugcuacguuggugcugaucauuugcaguauggccuguugcaggcggaccaaacguacagagucccgcagaaggggaagccgggaaucugagaagaaagucacugcagcuccucagacccgaaaggugguuucaaguugggaacucuacaagagcgagggcgacgcccgccuguga

SEQ ID NO: 158597 - RNA, 1575 nt, Artificial Sequence; identical to SEQ ID NO: 158590
  derived and/or modified CDS sequence (opt3) from glycoprotein__RABV__AB496692.1

SEQ ID NO: 158598 - RNA, 1575 nt, Artificial Sequence; identical to SEQ ID NO: 158564
  derived and/or modified CDS sequence (opt3) from glycoprotein__RABV__AB496694.1

SEQ ID NO: 158599 - RNA, 1575 nt, Artificial Sequence; identical to SEQ ID NO: 158564
  derived and/or modified CDS sequence (opt3) from glycoprotein__RABV__AB496695.1

SEQ ID NO: 158600 - RNA, 1575 nt, Artificial Sequence; identical to SEQ ID NO: 158594
  derived and/or modified CDS sequence (opt3) from glycoprotein__RABV__AB496696.1

SEQ ID NO: 158601 - RNA, 1575 nt, Artificial Sequence
  derived and/or modified CDS sequence (opt3) from glycoprotein__RABV__AB496697.1
augauccugcaggcccucagauucgugccccuucugauuagcuccuugugcuuaggcaaguuuccuauauacaccaucccagacaaacuggggccguggucucccauugauauccaccaucuaucauguccuaacaaucucgucguugaggacgaaggaugcacaaaccugagugguuucagcuauauggagcuuaaggugggcuacauuuccgcuaucaaaguaaauggguuuacuuguacgggaguggucaccgaagcagagacauauacuaacuucgugggcuacguuaccacaaccuuuaagaggaaacacuuccggccaauacccgaugccugccgcgcggcuuauaauuggaagauggccggugacccucgauacgaagagucucugcaaaacccauaucccgauuaccauugguugcguacugugaagacaaccaaagagucgcucaucauuaucucaccuagcgucgcagaccuggauccauacgacaagagucugcacuccagaguguuucccgggggaaaaugucucggcauuacgguaucuagcacuuauugcuccaccaaucaugauuacacaaucuggaugccggaagaaccuagguuaggcacuucaugugacauauucaccaguagcaaggggaaaaaggccucuaagggagguaaaacaugcggcuuuguugaugaacgggggcuguauaagucccuuaaaggagcuuguaaguugaaacugugcggcgugcuaggucuccgccugauggacgggaccugggucucaauucagacgagcgaugacacuaagugguguccacccgaccagcuugugaaccugcacgauuuccacagugacgagaucgagcauuugguggucgaggagcucguuaaaaagagagaagagugccuggaugcauuagaaucuauuaugacaaccaaguccgugagcuuuaggcggcugucguaccuccgcaaacuuguaccuggauucggcaaggccuauacuaucuuuaauaaaacacugauggaggcugacgcccacuacaagucugugcgaaccuggaacgagaucauuccauccaaaggcugcuugaaggucagagaaaggugucaucccccgguggaugggguuuucuucaauggaauaauccuagguccugacggcaacgugcugauucccgagaugcagucaagucuccugcaacagcacauggaacuucuggagagcuccgucaucccauugaugcacccucucgcggaucccucuacgguguuuaaggaaggggacgaggcagaggauuucguagaaguucaucugccagacgugcacaaacagauaagcggagucgauuuaggccugcccucaugggguaaguaucuacucaugauugccgggggccuggcugcccuuguguugaucaucugcaguauggcauguugccggcguaccaaacgcacagaguccagaaggcggggaagcggcgaaucugagaagaaagucacugugaccccucagacacgaaagguugugucaaguugggaacuguacaagagcgagggggacgcucgccucuga

SEQ ID NO: 158602 - RNA, 1575 nt, Artificial Sequence
  derived and/or modified CDS sequence (opt3) from glycoprotein__RABV__AB496698.1
augauccugcaggccauucucuucgugccccuucugauaagcuccuugugcuuaggcaaguuuccuaucuacaccauuccagacaaacuggggccguggucucccaucgauauucaccaucuaucauguccuaacaaucucgucguugaggacgaaggaugcacaaaccugagugguuucagcuauauggagcuuaaggugggcuacaucuccgcuauaaaaguaaauggguuuacuuguacgggaguggucaccgaagcagugacauauacuaacuucguuggcuacgugaccacaaccuuuaagagaaaacacuucaggccaguccccgaugccugccggacugcguauaauuggaagauggcuggugacccucgcuacgaggaaucucugcaaaacccauaucccgauuaccauugguugcgaacagugaagaccacgaaagagucgcucaucauuaucucaccuagcguagccgaccuggauccauacgacaagagucugcacucccguguuuuucccgggggaaaaugucucggcauuacugugucuagcaccuauugcuccacaaaucaugauuacacuaucuggaugccggaggaaccuagauuaggcaccucaugugacauauucacaaguagcaaggggaaaaaggcaucuaagggagguaaaaccugcggcuuugucgaugagagggggcuguauaagucccuuaaaggagccuguaaguugaaacugugcggcgugcuaggucuccggcugauggacgggacgugggugucaauucagacuagcgaugacacaaagugguguccacccgaccagcuugucaaccugcacgauuuccacagugacgaaaucgagcauuugguuguggaggaacucguaaagaaacgcgaggaaugccuggaugcuuuagagucuauuaugaccacuaaguccgugagcuuuagaaggcugucguaccuccggaaacuugucccuggauucggcaaggcauauacaaucuuuaauaaaacccugauggaagccgacgcucacuacaagucugugcgcacguggaacgagaucauuccauccaaaggcugcuugaagguucgagagagaugucaucccccgguggauggggucuucuucaauggaauaauccuagguccugacggcaacgugcugauucccgaaaugcagucaagucuccugcaacagcacauggagcuucuggaaagcuccguaaucccauugaugcacccucucgccgaucccucuaccguuuuuaaggagggggacgaagcggaggauuucguggagguccaucugccagacgugcacaaacagauaagcggagucgauuuaggccugcccucaugggguaaguaucuacucaugauugcagggggccuggccacacuuguguugaucaucugcaguauggcuuguugcaggcggacuaaacguaccgaaucccgcagaaggggaagcggcgagucugggaagaaaguuacagccacuccucagacccggaaggugguaucaaguugggaacuguacaagagcgagggagacgcacgacucuga

SEQ ID NO: 158603 - RNA, 1575 nt, Artificial Sequence
  derived and/or modified CDS sequence (opt3) from glycoprotein__RABV__AB496699.1
augauccugcaggccauucucuucgugccccuucugauaagcuccuugugcuuaggcaaguuuccuaucuacaccauuccagacaaacuggggccguggucucccaucgauauucaccaucuaucauguccuaacaaucucgucguugaggacgaaggaugcacaaaccugagugguuucagcuauauggagcuuaaggugggcuacaucuccgcuauaaaaguaaauggguuuacuuguacgggaguggucaccgaagcagagacauauacuaacuucgugggcuacguuaccacaaccuuuaagagaaaacacuucaggccagugcccgaugccugccggacugcguauaauuggaagauggcuggugacccucgcuacgaagagucucugcaaaacccauaucccgauuaccauugguugcgaacagucaagaccacgaaagagucgcucaucauuaucucaccuagcguggccgaccuggauccauacgacaagagucugcacucccguguauuucccgggggaaaaugucucggcauuacuguuucuagcaccuauugcuccacaaaucaugauuacacuaucuggaugccggaagaaccuagauuaggcaccucaugugacauauucacaaguagcaaggggaaaaaggcaucuaagggagguaaaaccugcggcuuuguggaugaaagggggcuguauaagucccuuaaaggagccuguaaguugaaacugugcggcguccuaggucuccggcugauggacgggacgugggugucaauucagacuagcgaugacacaaagugguguccacccgaccagcuugugaaccugcacgauuuccacagugacgagaucgagcauuuggucguugaggagcucgugaaaaagcgcgaagagugccuggaugcuuuagaaucuauuaugaccacuaaguccgugagcuuuagaaggcugucguaccuccggaaacuuguaccuggauucggcaaggcauauacaaucuuuaauaaaacccugauggaggccgacgcucacuacaagucuguccgcacguggaacgagaucauuccauccaaaggcugcuugaaggugcgagaaagaugucaucccccgguugaugggguguucuucaauggaauaauccuagguccugacggcaacguccugauucccgagaugcagucaagucuccugcaacagcacauggaacuucuggagagcuccgugaucccauugaugcacccucucgccgaucccucuaccguauuuaaggaaggggacgaggcggaggauuucguugaagugcaucugccagacguccacaaacagauaagcggaguggauuuaggccugcccucaugggguagguaucuacucaugauugcagggggccuggccacacuugucuugaucaucugcaguauggcuuguugccggcguacuaagcgcaccgaguccagaaggcggggaagcggcgaaucugggaaaaaggugacagccacuccucagacccgaaaaguugugucaaguugggagcuguacaagagcgaaggagacgcacgccucuga

SEQ ID NO: 158604 - RNA, 1575 nt, Artificial Sequence
  derived and/or modified CDS sequence (opt3) from glycoprotein__RABV__AB496701.1
augauccugcaggccauucucuucgugccccuucugauaagcuccuugugcuuaggcaaguuuccuaucuacaccauuccagacaaacuggggccguggucucccaucgauauucaccaucuaucauguccuaacaaucucgucguugaggacgaaggaugcacaaaccugagugguuucagcuauauggagcuuaaggugggcuacaucuccgcuauaaaaguaaauggguuuacuuguacgggaguggucaccgaagcagagacauauacuaacuucgugggcuacguuaccacaaccuuuaagagaaaacacuucaggccagugcccgaugccugccggacugcguauaauuggaagauggcuggugacccucgcuacgaagagucucugcaaaacccauaucccgauuaccauugguugcgaacaguccguaccacgaaggagucgcucaucauuaucucaccuagcguggccgaccuggauccauacgacaaaagucugcacuccagaguauuucccgggggaaagugucucggcauuacuguuucuagcaccuauugcuccacaaaucaugauuacacuaucuggaugccggaagaaccuagguuaggcaccucaugugacauauucacaaguagcaaagggaagaaagcaucuaagggagguaagaccugcggcuuuguggaugaacgggggcuguauaaaucccuuaagggagccuguaaauugaagcugugcggcguccuaggucuccgccugauggacgggacgugggugucaauucagacuagcgaugacacaaaaugguguccacccgaccagcuugugaaccugcacgauuuccacagugacgagaucgagcauuuggucguugaggagcucgugaagaaaagagaagagugccuggaugcuuuagaaucuauuaugaccacuaaguccgugagcuuuaggcggcugucguaccuccgcaaacuuguaccuggauucggcaaggcauauacaaucuuuaauaagacccugauggaggccgacgcucacuacaaaucuguccgaacguggaacgagaucauuccauccaagggcugcuugaaagugagagaaaggugucaucccccgguugaugggguguucuucaauggaauaauccuagguccugacggcaacguccugauucccgagaugcagucaagucuccugcaacagcacauggaacuucuggagagcuccgugaucccauugaugcacccucucgccgaucccucuaccguauuuaaggaaggggacgaggcggaggauuucguugaagugcaucugccagacguccacaagcagauaagcggaguggauuuaggccugcccucaugggguaaauaucuacucaugauugcagggggccuggccacacuugucuugaucaucugcaguauggcuuguugccggcguacuaagcgcaccgaguccagaaggcggggaagcggcgaaucugggaaaaaggugacagccacuccucagacccgaaaaguugugucaaguugggagcuguacaagagcgaaggagacgcacgccucuga

SEQ ID NO: 158605 - RNA, 1575 nt, Artificial Sequence
  derived and/or modified CDS sequence (opt3) from glycoprotein__RABV__AB496703.1
augauccugcaggccauucucuucgugccccuucugauaagcuccuugugcuuaggcaaguuuccuaucuacaccauuccagacaaacuggggccguggucucccaucgauauucaccaucuaucauguccuaacaaucucgucguugaggacgaaggaugcacaaaccugagugguuucagcuauauggagcuuaaggugggcuacaucuccgcuauaaaaguaaauggguuuacuuguacgggaguggucaccgaagcagagacauauacuaacuucgugggcuacguuaccacaaccuuuaagagaaaacacuucaggccagugcccgaugccugccggacugcguauaauuggaagauggcuggugacccucgcuacgaagagucucugcaaaacccauaucccgauuaccauugguugcgaacagucaagaccacgaaagagucgcucaucauuaucucaccuagcguggccgaccuggauccauacgacaagagucugcacucccguguauuucccgggggaaaaugucucggcauuacuguuucuagcaccuauugcuccacaaaucaugauuacacuaucuggaugccggaagaaccuagauuaggcaccucaugugacauauucacaaguagcaaggggaaaaaggcaucuaagggagguaggaccugcggcuuuguggaugaacgggggcuguauaaaucccuuaagggagccuguaaauugaagcugugcggcguccuaggucuccgccugauggacgggacgugggugucaauucagacuagcgaugacacaaaaugguguccacccgaccagcuugugaaccugcacgauuuccacagugacgagaucgagcauuuggucguugaggagcucgugaagaaaagagaagagugccuggaugcuuuagaaucuauuaugaccacuaaguccgugagcuuuaggcggcugucguaccuccgcaaacuuguaccuggauucggcaaggcauauacaaucuuuaauaagacccugauggaggccgacgcucacuacaaaucuguccgaacguggaacgagaucauuccauccaagggcugcuugaaagugagagaaaggugucaucccccgguugaugggguguucuucaauggaauaauccuagguccugacggcaacguccugauucccgagaugcagucaagucuccugcaacagcacauggaacuucuggagagcuccgugaucccauugaugcacccucucgccgaucccucuaccguauuuaaggaaggggacgaggcggaggauuucguugaagugcaucugccagacguccacaagcagauaagcggaguggauuuaggccugcccucauggggucgguaucuacucaugauugcagggggccuggccacacuugucuugaucaucugcaguauggcuuguugccgucgcacuaaaagaaccgaguccaggcggcgaggaagcggcgaaucugggaagaaagugacagccacuccucagacccgcaagguugugucaaguugggagcuguacaaaagcgaaggagacgcaagacucuga

SEQ ID NO: 158606 - RNA, 1575 nt, Artificial Sequence; identical to SEQ ID NO: 158602
  derived and/or modified CDS sequence (opt3) from glycoprotein__RABV__AB496705.1

SEQ ID NO: 158607 - RNA, 1575 nt, Artificial Sequence
  derived and/or modified CDS sequence (opt3) from glycoprotein__RABV__AB517659.1
auggugccccaggcccugcuccuugucccucuguuggcuguuagcuucugcuuuggcaaguucccaaucuacaccauuccggacaaauuagggcccugguccccuauagauauccaccaucugucuuguccaaacaaucuagugguagaggacgaaggaugcacaaaccucucagguuuuaguuauauggagcugaaggugggcuacauuagcgcaaucaaagucaauggguucacuuguacgggagugguuaccgaagccgagacauauacuaacuuugugggcuacgucaccacaaccuucaagagaaaacacuuuaggcccacuccugaugcgugccgguccgcuuauaauuggaagauggccggugacccacgcuacgaagagucucuucauaaccccuauccugauuaccacuggcugcgaacagugaagaccacgaaagagucguugguaauuaucucaccaagcguugcagaccucgauccguacgacaagagucugcauucccguguguuccccucugggaaauguagcggaauaacugucuccucaaccuauugcaguacaaaucacgauuacacuaucuggcugccugaaaacccaagacucggcaccagcugugacauuuuuacaaauucuaggggcaagcgggccuccaaagggucaaagaccugcggauucguggaugagcgcgguuuauauaagagccugaaaggcgcuuguaaacuuaaguugugcggggugcugggacuaagacucauggacggcacgugggucgcaaugcaaacuucggaugaaacaaaguggugucccccugaccagcugguuaaccuucacgacuuuaggucugaugagaucgagcaucuggugguagaagaguuggugaaaaagcgggaagagugccucgacgcccuggaauccauuaugaccacuaaaagcgucucguuccgccgauuaucucaccugagaaagcucgugccagguuuugggaaggcuuacacaaucuucaauaaaacccuuauggaggccgaugcgcauuauaaguccguuaggacguggaacgagauaauucccucaaaaggaugccugcgggugggcggccguugucacccgcacgucaaugggguguucuuuaacggaaucauuuuggguccugacggccauguacuaauccccgaaaugcagaguagccugcuccagcaacacauggagcugcuugaauccucuguuaucccacugaugcauccuuuggcagaucccagcaccguguucaaggacggggaugaggccgaagacuuugucgaggugcaccucccagauguccauaaacaggugucaggaguugaccugggcuuacccaauugggguaaguacgugcugaugagugcugggguacuaauugcccucaugcugauaaucuuccuuaugacaugcugucgcagagucaacaggccugauuccacucagcggagcuuuggccgaaccggacgcaaggugucuguuacaucacagaguggcaaagugauuagcuccugggagucuuauaagagugggggagaaacuagauuguga

SEQ ID NO: 158608 - RNA, 1575 nt, Artificial Sequence
  derived and/or modified CDS sequence (opt3) from glycoprotein__RABV__AB517660.1
auggugccccagacccugcuguucgucccucuucugguuuuuagcuugugcuucggcaaguuuccaaucuacacaauuccggacaaauuagggcccugguccccuauagauauccaccaucugucuuguccaaacaaucuagugguagaggacgaaggaugcacuaaccucucagguuucaguuauauggagcugaaggugggcuacauuagcgccaucaaagucaauggguuuacguguaccggagugguuacagaagcugagacuuauaccaacuucgugggcuacgucacaaccacuuuuaagagaaaacacuucaggcccacaccugaugcaugccgggccgcguauaauuggaagauggcuggugacccacgcuacgaagagucccuucauaaccccuauccugauuaccacuggcugcgaaccgugaagacgacuaaagagucuuugguaauuaucucgccaucaguugccgaccucgauccguacgacaagagccugcauagucguguguuucccuccgggaaaugucugggaauaaccgucucuagcacauauugcuccacuaaucacgauuacaccguguggagaccugaaaacccaaggcucggcacaucaugugacaucuucaccaauagucggggcaagcgcgcaagcaaagggucuaagacgugcggauuuguggaugagagagguugguauaaguccuggaaaggcgccuguaaguuaaaacugugcgggguccuuggauugaggcugauugacggcacuuggaucgcuaugcaaacaucagaagagaccaaguggugucccccugaucagcuaguuaaccuccacgacuuccggagcgacgagauugaacaucuggugguagaggaacuugugaaaaagcgcgaggaaugccuggaugcauuggagaguaucaugacuacaaaaucugucuccuuucgaagacucagccaccugaggaaguuagugccagguuucgggaaggccuacaccauauucaauaaaacgcugauggaggcugacgcccauuauaagucgauucggaccuggaacgaaaucauucccucuaaaggaugccuccguguuggcggcaagugucacccgcacgugaauggggucuuuuucaacggaaucauccuugguccugauggccaugugcugauucccgagaugcaguccucauugcuacagcaacacauggaacugcucgagaguagcguaauaccacugaugcauccucuugcggaccccuacacaguuuuuaaagauggggacgaagcagaggauuucguggagguccaccucccagacgugcauaaguuggucuccggaguggaucucggccugcccaauugggguaaguauuuacugaugucuguuggggugcuaaucgcccucaugcugauuaucuuucuuaugacuugcugucgcggcguacacagaccugacagcgcucagcagaaauugggaggcaccgggaggcgggucucaauaacaagucagggaggucgagugauuuccagcugggaaucuuacaagucaggcggggauacucgccuguga

SEQ ID NO: 158609 - RNA, 1575 nt, Artificial Sequence; identical to SEQ ID NO: 158558
  derived and/or modified CDS sequence (opt3) from glycoprotein__RABV__AB518487.1

SEQ ID NO: 158610 - RNA, 1575 nt, Artificial Sequence; identical to SEQ ID NO: 158558
  derived and/or modified CDS sequence (opt3) from glycoprotein__RABV__AB518488.1

SEQ ID NO: 158611 - RNA, 1575 nt, Artificial Sequence
  derived and/or modified CDS sequence (opt3) from glycoprotein__RABV__AB518489.1
auggugccccaggcccuccuguucgucccucuucuggcuuuuagcuucugcuuuggcaaguucccaaucuacaccauuccggacaaauuggggcccugguccccuauagauauccaccauuuaucuuguccaaacaaucugguuguggaggacgaaggaugcacaaaccuaucagguuuuaguuauauggagcucaagguaggcuacauuagcgcaaucaaagugaauggguucacuuguacgggagucgugaccgaagccgagacauauacuaacuuuguuggcuacgugaccacaaccuucaagagaaaacacuuuaggcccacuccugaugcgugccgguccgcuuauaauuggaagauggccggugacccacgcuacgaagagucucugcauaaccccuauccugauuaccacuggcuucgaacagucaagaccacgaaagagucgcuggugauuaucucaccaagcguagcagacuuggauccguacgacaagagucuccauucccguguuuuccccaaugggaaauguucuggaauaacugugagcuccaccuauugcucaacaaaccacgauuacacuaucuggcugccugaaaauccaagacugggcaccaguugugacauuuuuacaaacagcaggggcaagcgggccucuaaaggguccaagaccugcggauucgucgaugagcgcggucucuauaagucauuaaaaggcgcuuguaagcugaaacuuugcgggguguugggacugagacuaauggacggcacguggguggcaaugcaaacuagcgaugaaacaaaguggugucccccugaccagcucgucaaucugcacgacuuuaggagugaugagaucgagcaucuuguuguggaggaacugguaaagaaacgggaagagugcuuggacgcccucgaaucuauuaugaccacuaaauccgugagcuuccgccgacugucgcacuuaagaaagcuggucccagguuucgggaaggcuuacacaaucuuuaacaaaacccucauggaggccgaugcgcauuauaagucuauaaggacguggaaugagauuauccccuccaaaggaugccuucgggugggcggccguugucacccgcacguuaacgggguguucuuuaauggaauuauccuggguccugacggccaugucuugauccccgaaaugcagucaagucuacugcagcaacacauggagcuccuggaaagcuccgugauuccacuuaugcauccucuggcagaucccucuaccguauucaaggacggggaugaggccgaagacuuuguugaggugcacuugccagauguccauaaacaggugagcggagucgaccucggccugcccaacugggguaaguacguguuaaugucagcugggguucugauagcccuaaugcucacaaucuuccugaugacuugcugucgcagagugaacaggccugauaguacccagcggucccuuggcaugacaggacgaaagguaagcgucacuucucagucaggcaaagugauuaguagcugggaguccuauaagucugggggagaaacccgcuuguga

SEQ ID NO: 158612 - RNA, 1575 nt, Artificial Sequence
  derived and/or modified CDS sequence (opt3) from glycoprotein__RABV__AB518490.1
auggugccccaggcccuccuguucgucccucuucuggcuuuuagcuucugcuuuggcaaguucccaaucuacaccauuccggacaaauuggggcccugguccccuauagauauccaccauuuaucuuguccaaacaaucugguuguggaggacgaaggaugcacaaaccuaucagguuuuaguuauauggagcucaagguaggcuacauuagcgcaaucaaagugaauggguucacuuguacgggagucgugaccgaagccgagacauauacuaacuuuguuggcuacgugaccacaaccuucaagagaaaacacuuuaggcccacuccugaugcgugccgguccgcuuauaauuggaagauggccggugacccacgcuacgaagagucucugcauaaccccuauccugauuaccacuggcuucgaacagucaagaccacgaaagagucgcuggugauuaucucaccaagcguagcagacuuggauccguacgacaagagucuccauucccguguuuuccccaaugggaaauguucuggaauaacugugagcuccaccuauugcucaacaaaccacgauuacacuaucuggcugccugaaaauccaagacugggcaccaguugugacauuuuuacaaacagcaggggcaagcgggccucuaaagggggaaagaccugcgguuucgucgaugagcgcggccucuauaaguccuuaaaaggggcuuguaagcugaaacuuugcggaguguugggccugagacuaauggacgguacguggguggcaaugcaaacuucagaugaagccaaguggugucccccugaccagcucgucaaucugcacgacuuuaggagcgaugagaucgagcaucuuguuguggaggaacuggugaaaaagcgggaagagugcuuggacgcucucgaaaguauuaugacaaccaaaucuguauccuuccgccgacugagccacuuaagaaagcuggucccaggguucggaaaggccuacacuaucuuuaacaaaacacucauggaggcggaugcacauuauaagucgauaaggaccuggaaugagauuauccccucuaaaggcugccuucgggugggcgggcguugucacccgcacguuaacggaguguucuuuaaugguauuauccugggcccugacgggcaugucuugauccccgaaaugcaguccucacuacugcagcaacacauggagcuccuggaaaguagcgugauuccacuuaugcauccucuggccgaucccuccacgguauucaaggacggagaugaggcugaagacuuuguugaggugcacuugccagauguccauaaacaggugucuggcgucgaccucggucugcccaacugggggaaguacguguuaaugagcgccggcguucugauagcacuaaugcucaccaucuuccugaugacaugcugucgcagagugaacaggccugauucaacucagcggagucuuggaaugaccggccgaaagguauccgucacaagccagucugggaaagugauuucaaguugggagagcuauaaguccggaggugaaacucgcuuguga

SEQ ID NO: 158613 - RNA, 1575 nt, Artificial Sequence
  derived and/or modified CDS sequence (opt3) from glycoprotein__RABV__AB518492.1
auggugccccaggcccuccuguucgucccucuucuggcuguuagcuuuugcuucggcaaguuuccaaucuacaccauuccggacaaauuggggcccugguccccuauagauauccaccauuuaucuuguccaaacaaucuggugguagaggacgaaggaugcacaaaccuaucagguuucaguuauauggagcucaaggugggcuacauuagcgcaaucaaagucaauggguuuacuuguacgggagugguuaccgaagccgagacauauacuaacuucgugggcuacgucaccacaaccuuuaagagaaaacacuucaggcccacuccugaugcgugccgguccgcuuauaauuggaagauggccggugacccacgcuacgaagagucucugcauaaccccuauccugauuaccacuggcuucgaacagugaagaccacgaaagagucgcugguaauuaucucaccaagcguugcagacuuggauccguacgacaagagucuccauucccguguguuucccucugggaaauguagcggaauaacugucuccucaaccuauugcaguacaaaucacgauuacacuaucuggcugccugaaaacccaagacugggcaccagcugugacauuuucacaaauucuaggggcaagcgggccuccaaagggucaaagaccugcggauuuguggaugagcgcggucucuauaagagcuuaaaaggcgcuuguaagcugaaacuuugcgggguguugggacugagacuaauggacggcacgugggucgcaaugcaaacuucggaugaaacaaaguggugucccccugaccagcucguuaaccugcacgacuucaggucugaugagaucgagcaucuugugguagaggaacuggugaaaaagcgggaagagugcuuggacgcccucgaauccauuaugaccacuaaaagcgucucguuucgccgacugucucacuuaagaaagcuggugccagguuucgggaaggcuuacacaaucuucaauaaaacccucauggaggccgaugcgcauuauaaguccguuaggacguggaacgagauaauucccucaaaaggaugccuucgggugggcggccguugucacccgcacgucaaugggguguuuuucaacggaaucauucuggguccugacggccauguauugauccccgaaaugcagaguagccuacugcagcaacacauggagcuccuggaauccucuguuaucccacuuaugcauccucuggcagaucccagcaccguguuuaaggacggggaugaggccgaagacuucgucgaggugcacuugccagauguccauaaacaggugucaggaguugaccucggccugcccaauugggguaaguacguguuaaugagugcugggguacugacagcccuaaugcucauuauauuucugaugacuugcugucgcagagucaacaggccugauuccacccagcggagccuuggccgaacaggacgcaaggugucuguuacuucacagaguggcaaagugaucagcuccugggagucuuauaagagugggggagaaaccagauuguga

SEQ ID NO: 158614 - RNA, 1575 nt, Artificial Sequence
  derived and/or modified CDS sequence (opt3) from glycoprotein__RABV__AB518493.1
auggugccccaggcccuucucuucgucccucuucugguuuuuagcuugugcuccggcaaguucccauuauacaccaucccggacaaacuggggcccuggucuccuauugauauacaccaucuaucauguccaaacaaucucgugguagaggacgaaggaugcacaaaccugagugguuuuagcuauauggagcuuaaggugggcuacaucuccgcuauuaaagucaauggguucacuuguacgggagugguuaccgaagcagagacauauacuaacuuugugggcuacgucaccacaaccuucaagagaaaacacuuuaggcccacuccugaugccugccgggcggcuuauaauuggaagauggccggugacccacgcuacgaagagucucugcauaaccccuauccugauuaccacugguugcgaacagugaagaccacgaaagagucgcucguaguuaucucaccaagcguggcagaccuggauccguacgacaagagucugcauucccgugucuuccccucugggaaauguagcggaauuacuguguccucaaccuauugcaguacaaaucacgauuacacuaucuggaugccugaaaacccaagacucggcaccagcugugacauauuuacaaauucuaggggcaagcgggccuccaaagggucaaagaccugcggauucguggaugagcgcgguuuauauaagagccugaaaggcgcuuguaagcugaaauugugcgggguccugggacuaagacucauggacggcacguggguugcaaugcagaucagugaugaaacuaaguggugucccccugaccagcuggugaaccuucacgacuuuaggucugaugagauugagcaucugguaguggaagaguuggucaaaaagcgggaagagugccucgacgcccuggaauccaucaugacaaccaaaagcgugucguuccgccgauuaucucaccugagaaagcucguuccagguuuugggaaggcuuacacuauuuucaauaaaacacuuauggaggccgaugcgcauuauaaguccaucaggaccuggaacgagauaauucccucaaaaggaugccugcgggugggcggccguugucacccgcacgucagugggguguucuuuaauggaaucauuuuggguccugacggccauguacuaauccccgaaaugcagagcucccugcuccagcaacacauggagcugcuugaaucuagcguuaucccacugaugcauccuuuggcagaucccucaacgguguucaaggacggggaugaggccgaagacuuugucgaggugcaccucccagauguccauaaacaggugaguggaguugaccugggcuuacccaacugggguaaguacgugcugauguccgcuggggcccuaauugcacucaugcugauaaucuuccuuaugaccugcugucgcagaguaaauagguuggauagcacacagcaccggcugggcggaacuggccgaaaggucucugugaccccucaagggggaaaaguuauuucaaguugggagagcuauaaguccgguggcgaaacacgccucuga

SEQ ID NO: 158615 - RNA, 1575 nt, Artificial Sequence
  derived and/or modified CDS sequence (opt3) from glycoprotein__RABV__AB518494.1
auggugccccaggcccuucucuucgucccucuucugguuuuuagcuugugcuucggcaaguuuccauuauacaccaucccggacaaacuggggcccugguccccuauugauauacaccaucuaucuuguccaaacaaucucgugguagaggacgaaggaugcacaaaccugucagguuucaguuauauggagcuuaaggugggcuacaucagcgcuauuaaagucaauggguuuacuuguacgggagugguuaccgaagcagagacauauacuaacuucgugggcuacgucaccacaaccuuuaagagaaaacacuucaggcccacuccugaugccugccgggcggcuuauaauuggaagauggccggugacccacgcuacgaagagucccugcauaaccccuauccugauuaccacugguugcgaacagugaagaccacgaaagagucucucguaguuaucucgccaucaguggcagaccuggauccguacgacaagagccugcauagucgugucuuucccuccgggaaauguucuggaauuacugugagcuccaccuauugcucaacaaaucacgauuacacuaucuggaugccugaaaacccaagacucggcaccaguugugacauauucacaaauagcaggggcaagcgggccucuaaaggguccaagaccugcggauuuguggaugagcgcgguuuauauaagucacugaaaggcgcuuguaagcugaaauugugcgggguccugggacuaagacucauggacggcacguggguugcaaugcagaucagcgaugaaacuaaguggugucccccugaccagcuggugaaccuucacgacuucaggagugaugagauugagcaucugguaguggaagaguuggucaaaaagcgggaagagugccucgacgcccuggaaucuaucaugacaaccaaauccgugagcuuucgccgauuaucgcaccugagaaagcucguuccagguuucgggaaggcuuacacuauuuucaauaaaacacuuauggaggccgaugcgcauuauaagucuaucaggaccuggaacgagauaauucccuccaaaggaugccugcgggugggcggccguugucacccgcacgucucagggguguuuuucaauggaaucauuuuggguccugacggccauguacuaauccccgaaaugcagaguagccugcuccagcaacacauggagcugcuugaauccucuguuaucccacugaugcauccuuuggcagaucccagcacgguguuuaaggacggggaugaggccgaagacuucgucgaggugcaccucccagauguccauaaacaggugucaggaguugaccugggcuuacccaacugggguaaguacgugcugaugagugcuggggcccuaauugcacucaugguaauaaucuuucugaugaccugcugucgcagagucaauaggcuugauuccacacagcaccgguugggcggaacuggccgaaaggugagcguuaccccucaagggggaaaagugauuucuucaugggagaguuauaagagcgguggcgaaacacgccuguga

SEQ ID NO: 158616 - RNA, 1575 nt, Artificial Sequence; identical to SEQ ID NO: 158614
  derived and/or modified CDS sequence (opt3) from glycoprotein__RABV__AB518495.1

SEQ ID NO: 158617 - RNA, 1575 nt, Artificial Sequence
  derived and/or modified CDS sequence (opt3) from glycoprotein__RABV__AB519641.1
augauccugcaggcccuccuuuucgugccccuguugauuagcuccuuaugccugggcaaguuuccuauauacaccaucccagacaaacuagggccguggucucccauugauauccaccaucucucauguccuaacaaucuggucguugaggacgaaggaugcacaaaccuuagugguuucagcuauauggagcugaaggugggcuacauuuccgcuaucaaaguaaauggguuuacuuguacgggaguggucaccgaagcagagacauauacuaacuucgugggcuacguuaccacaaccuuuaagagaaaacacuucaggccagugcccgaugccugccgggcggcuuauaauuggaagauggccggugacccucgcuacgaagagucuuugcaaaacccauaucccgauuaccauuggcuccgaacugucaagacaaccaaagagucgcugauaaucauuucaccuagcguggcagaccuggauccauacgacaagagucuccacucccguguauuucccgggggaaaauguuuaggcaucacgguuucuagcacuuauugcuccaccaaucaugauuacacaauuuggaugccggaagaaccuagacugggcacuucaugugacaucuucaccaguagcaaggggaaaaaggccucuaagggagguaaaacaugcggcuuuguggaugaaagggggcuuuauaaguccuugaaaggagcuuguaagcugaaacuaugcggcguccucggucugcggcuuauggacgggaccugggugucaauacagacgagcgaugacacuaagugguguccacccgaccagcuggugaacuugcacgauuuccacagugacgagauugagcaucucgucguugaggagcuggugaaaaagcgcgaagagugcuuagaugcacuggaaucuaucaugacaaccaaguccauuagcuuuagaaggcucucguaccuucggaaacugguaccuggauucggcaaggccuauacuaucuuuaauaaaacauugauggaggcugacgcccacuacaagucugugcgcaccuggaacgagaucauuccauccaaaggcugccuaaagguccgagaaagaugucaucccccgguggaugggguuuucuucaauggaauaauccuggguccugacggcaacgugcucauucccgagaugcagucaagucugcuucaacagcacauggaacuguuggagagcuccgucaucccacucaugcacccucuggcggaucccucuacgguguuuaaggaaggggacgaggcagaggauuucguagaaguucauuuaccagacgugcacaaacagauaagcggagucgaucugggccuacccucaugggguaaguaucuccugaugauugccgggggccuugcugccuuggugcugaucaucugcaguauggcauguugcaggcggaccaaacguacagagucccgcagaaggggaagcggcgaaucugagaagaaagucacugcuaccccucagacacggaaggugauuucaaguugggaacucuacaagagcgagggggacgcccgacuguga

SEQ ID NO: 158618 - RNA, 1575 nt, Artificial Sequence
  derived and/or modified CDS sequence (opt3) from glycoprotein__RABV__AB519642.1
augauccugcaggcccuccuuuucgugccccuguugauuagcuccuuaugccugggcaaguuuccuauauacaccaucccagacaaacuagggccguggucucccauugauauccaccaucucucauguccuaacaaucuggucguugaggacgaaggaugcacaaaccuuagugguuucagcuauauggagcugaaggugggcuacauuuccgcuaucaaaguaaauggguuuacuuguacgggaguggucaccgaagcagagacauauacuaacuucgugggcuacguuaccacaaccuuuaagagaaaacacuucaggccaauacccgaugccugccgggcggcuuauaauuggaagauggccggugacccucgcuacgaagagucuuugcaaaacccauaucccgauuaccauuggcuccgaacugugaagacaaccaaagagucgcugaucauuaucucaccuagcgucgcagaccuggauccauacgacaagagucuccacucccguguguuucccgggggaaaauguuuaggcauuacgguaucuagcacuuauugcuccaccaaucaugauuacacaaucuggaugccggaagaaccuagacugggcacuucaugugacauauucaccaguagcaaggggaaaaaggccucuaagggagguaaaacaugcggcuuuguugaugaaagggggcuuuauaaguccuugaaaggagcuuguaagcugaaacuaugcggcgugcucggucugcggcuuauggacgggaccugggucucaauucagacgagcgaugacacuaagugguguccacccgaccagcuggugaacuugcacgauuuccacagugacgagaucgagcaucucguggucgaggagcugguuaaaaagcgcgaagagugcuuagaugcacuggaaucuauuaugacaaccaaguccgugagcuuuagaaggcucucguaccuucggaaacugguaccuggauucggcaaggccuauacuaucuuuaauaaaacauugauggaggcugacgcccacuacaagucugugcgcaccuggaacgagaucauuccauccaaaggcugccuaaagguccgagaaagaugucaucccccgguggaugggguuuucuucaauggaauaauccuggguccugacggcaacgugcucauucccgagaugcagucaagucugcuucaacagcacauggaacuguuggagagcuccgucaucccacucaugcacccucuggcggaucccucuacgguguuuaaggaaggggacgaggcagaggauuucguagaaguucauuuaccagacgugcacaaacagauaagcggagucgaucugggccuacccucaugggguaaguaucuccugaugauugccgggggccuugcuaccuuggugcugaucaucugcaguauggccuguugcaggcggacaaaacguacugagucccgcagaagggacagccaggaaucugagaagaaagucaccgugacaccucaaacucggaagguugugucaaguugggaacucuacaagagcgagggagacgcaucccuguga

SEQ ID NO: 158619 - RNA, 1575 nt, Artificial Sequence
  derived and/or modified CDS sequence (opt3) from glycoprotein__RABV__AB563791.1
augaucccccaggcccuccuguucgugccucuucuggucuuuagcuugugcuucggcaaguuuccaauuuacaccauaccggacaaauuagggcccugguccccuaucgauauucaccaucugucuuguccaaacaaucuaguuguggaggacgaaggaugcacaaaccucucagguuucaguuauauggagcugaagguaggcuacaucagcgcuauuaaagugaauggguuuacuuguacgggagucgugaccgaagcagagacauauacuaacuucguuggcuacgugaccacaaccuuuaagagaaaacacuucaggcccacuccugaugccugccgggcggcuuauaauuggaagauggccggugacccacgcuacgaagagucccuucauaaccccuauccugauuaccacuggcugcgaacagucaagaccacgaaagagucuuuggugaucauaucgccaucaguagcagaccucgauccguacgacaagagccugcauagucguguuuuucccuccgggaaauguucuggaaucacugugagcuccaccuauugcucaacaaaucacgauuacacuauuuggaugccugaaaacccaagacugggcaccaguugugacaucuucacaaauagcaggggcaagcgggccucuaaaggguccaagaccugcggauuugucgaugagcgcggucucuauaagucauuaaaaggcgcuuguaagcugaaacuuugcgggguguugggacugagacuaauggacggcacgugggcagccauucaaacuagcgaugaaacaaaguggugucccccugaccagcucgugaaccugcacgacuucaggagugaugagaucgagcaucuugucguugaggaacuggugaaaaagcgggaagagugcuuggacgcucucgaaucuauaaugaccacuaaauccgugagcuuucgccgacugucgcacuuaagaaagcugguaccagguuucgggaaggccuacacaauuuucaauaaaacccucauggaggcggaugcacauuauaagucugucaggacguggaacgagaucauucccuccaaaggaugccuucgggugggcggccguugucacccgcacguuaaugggguguuuuucaacggaaucauccuggguccugacggccaugucuugauucccgaaaugcagucaagucuacugcagcaacacauggagcuccuggaaagcuccgugauaccacuuaugcauccucuggccgaucccucuaccguauuuaaggacgaugacgaggcugaagauuucguugaggugcacuugccagacguccauaaacaggugagcggggucgaucucggacugcccucauggggcaaguacguguuaaugagugccgguguucugacagcacuaaugcucaugaucuuucugaugacuugcugucgcagagcuaauaggguggaguccgcccagcacagccuuggggaacggggccgaaagguaucugucaccucacagaguggacgcgugauuagcuccugggagucuuauaaaucgggcggggaaacaaaguuguga

SEQ ID NO: 158620 - RNA, 1575 nt, Artificial Sequence
  derived and/or modified CDS sequence (opt3) from glycoprotein__RABV__AB563794.1
augaucccccaggcccuccuguucgugccucuucuggucuuuagcuugugcuucggcaaguuuccaauuuacaccauaccggacaaauuagggcccugguccccuaucgauauucaccaucugucuuguccaaacaaucuaguuguggaggacgaaggaugcacaaaccucucagguuucaguuauauggagcugaagguaggcuacaucagcgcuauuaaagugaauggguuuacuuguacgggagucgugaccgaagcagagacauauacuaacuucguuggcuacgugaccacaaccuuuaagagaaaacacuucaggcccacuccugaugccugccgggcggcuuauaauuggaagauggccggugacccacgcuacgaagagucccuucauaaccccuauccugauuaccacuggcugcgaacagucaagaccacgaaagagucuuuggugaucauaucgccaucaguagcagaccucgauccguacgacaagagccugcauagucguguuuuucccuccgggaaauguucuggaaucacugugagcuccaccuauugcucaacaaaucacgauuacacuauuuggaugccugaaaacccaagacugggcaccaguugugacaucuucacaaauagcaggggcaagcgggccucuaaaggguccaagaccugcggauuugucgaugagcgcggucucuauaagucauuaaaaggcgcuuguaagcugaaacuuugcgggguguugggacugagacuaauggacggcacgugggcagccauucaaacuagcgaugaaacaaaguggugucccccugaccagcucgugaaccugcacgacuucaggagugaugagaucgagcaucuugucguugaggaacuggugaaaaagcgggaagagugcuuggacgcucucgaaucuauaaugaccacuaaauccgugagcuuucgccgacugucgcacuuaagaaagcugguaccagguuucgggaaggccuacacaauuuucaauaaaacccucauggaggcggaugcacauuauaagucugucaggacguggaacgagaucauucccuccaaaggaugccuucgggugggcggccguugucacccgcacguuaaugggguguuuuucaacggaaucauccuggguccugacggccaugucuugauucccgaaaugcagucaagucuacugcagcaacacauggagcuccuggaaagcuccgugauaccacuuaugcauccucuggccgaucccucuaccguauuuaaggacgaugacgaggcugaagauuucguugaggugcacuugccagacguccauaaacaggugagcggggucgaucucggacugcccucauggggcaaguacguguuaaugagugccgguguucugacagcacuaaugcucaugaucuuucugaugacuugcugucgcagagcuaauagggccgaguccgcgcagcacagccuuggggaacggggccgaaaggugucuguaaccucacagaguggacgcgucauuagcuccugggagucuuauaaaucgggcggggaaacaaaguuguga

SEQ ID NO: 158621 - RNA, 1575 nt, Artificial Sequence
  derived and/or modified CDS sequence (opt3) from glycoprotein__RABV__AB563797.1
augaucccccaggcccuccuguucgugccucuucuggucuuuagcuugugcuucggcaaguuuccaauuuacaccauaccggacaaauuagggcccugguccccuaucgauauucaccaucugucuuguccaaacaaucuaguuguggaggacgaaggaugcacaaaccucucagguuucaguuauauggagcugaagguaggcuacaucagcgcuauuaaagugaauggguuuacuuguacgggagucgugaccgaagcagagacauauacuaacuucguuggcuacgugaccacaaccuuuaagagaaaacacuucaggcccacuccugaugccugccgggcggcuuauaauuggaagauggccggugacccacgcuacgaagagucccuucauaaccccuauccugauuaccacuggcugcgaacagucaagaccacgaaagagucuuuggugaucauaucgccaucaguagcagaccucgauccguacgacaagagccugcauagucguguuuuucccuccgggaaauguucuggaaucacugugagcuccaccuauugcucaacaaaucacgauuacacuauuuggaugccugaaaacccaagacugggcaccaguugugacaucuucacaaauagcaggggcaagcgggccucuaaaggguccaagaccugcggauuugucgaugagcgcggucucuauaagucauuaaaaggcgcuuguaagcugaaacuuugcgggguguugggacugagacuaauggacggcacgugggcagccauucaaacuagcgaugaaacaaaguggugucccccugaccagcucgugaaccugcacgacuucaggagugaugagaucgagcaucuugucguugaggaacuggugaaaaagcgggaagagugcuuggacgcucucgaaucuauaaugaccacuaaauccguuagcuuucgccgacugucgcacuuaagaaagcuggugccagguuucgggaaggccuacacaauuuucaauaaaacccucauggaggcggaugcacauuauaagucuaucaggacguggaacgagauuauccccuccaaaggaugccuucgggucggcggccguugucacccgcacgugaaugggguauuuuucaacggaaucauucuggguccugacggccauguguugauacccgaaaugcagucaagucuacugcagcaacacauggagcuccuggaaagcuccgucaucccacuuaugcauccucuggccgaucccucuaccguguuuaaggacgaugacgagacagaagauuucguagagguucacuugccagacgugcauaaacaggucagcgggguggaucucggacugcccucauggggcaaguacgucuuaaugagugcuggugugcugacugcccuaaugcucaugauuuuucugaugaccugcugucgcagagcaaauaggguugaguccgcucagcacagccuuggggaacggggccgaaaggugucuguaacaucacagaguggacgcgucaucagcuccugggagucuuauaaaucgggcggggaaacuaaguuguga

SEQ ID NO: 158622 - RNA, 1575 nt, Artificial Sequence
  derived and/or modified CDS sequence (opt3) from glycoprotein__RABV__AB563798.1
augaucccccaggcccuccuguucgugccucuucuggucuuuagcuugugcuucggcaaguuuccaauuuacaccauaccggacaaauuagggcccugguccccuaucgauauucaccaucugucuuguccaaacaaucuaguuguggaggacgaaggaugcacaaaccucucagguuucaguuauauggagcugaagguaggcuacaucagcgcuauuaaagugaauggguuuacuuguacgggagucgugaccgaagcagagacauauacuaacuucguuggcuacgugaccacaaccuuuaagagaaaacacuucaggcccacuccugaugccugccgggcggcuuauaauuggaagauggccggugacccacgcuacgaagagucccuucauaaccccuauccugauuaccacuggcugcgaacagucaagaccacgaaagagucuuuggugaucauaucgccaucaguagcagaccucgauccguacgacaagagccugcauagucguguuuuucccuccgggaaauguucuggaaucacugugagcuccaccuauugcucaacaaaucacgauuacacuauuuggaugccugaaaacccaagacugggcaccaguugugacaucuucacaaauagcaggggcaagcgggccucuaaaggguccaagaccugcggauuugucgaugagcgcggucucuauaagucauuaaaaggcgcuuguaagcugaaacuuugcgggguguugggacugagacuaauggacggcacgugggcagccauucaaacuagcgaugaaacaaaguggugucccccugaccagcucgugaaccugcacgacuucaggagugaugagaucgagcaucuugucguugaggaacuggugaaaaagcgggaagagugcuuggacgcucucgaaucuauaaugaccacuaaauccguaucguuucgccgacugucgcacuuaagaaagcuggugccagguuucgggaaggccuacacaauuuucaauaaaacccucauggaggcggaugcacauuauaagucugucaggacguggaacgagaucauucccuccaaaggaugccuucgggugggcggccguugucacccgcacguuaaugggguguuuuucaacggaaucauccuggguccugacggccaugucuugauucccgaaaugcagucaagucuacugcagcaacacauggagcuccuggaaagcuccgugauaccacuuaugcauccucuggccgaucccucuaccguauuuaaggacgaugacgaggcugaagauuucguugaggugcacuugccagacguccauaaacaggugagcggggucgaucucggacugcccucauggggcaaguacguguuaaugagugccgguguucugacagcacuaaugcucaugaucuuucugaugacuugcugucgcagagcuaauagggccgaguccgcgcagcacagccuuggggaaggcggacggaaggugucuguaaccucacagaguggccgagucauuagcuccugggagucuuauaaaagcgggggagaaacaaaguuguga

SEQ ID NO: 158623 - RNA, 1575 nt, Artificial Sequence
  derived and/or modified CDS sequence (opt3) from glycoprotein__RABV__AB563800.1
augaucccccaggcccuccuguucgugccucuucuggucuuuagcuugugcuucggcaaguuuccaauuuacaccauaccggacaaauuagggcccugguccccuaucgauauucaccaucugucuuguccaaacaaucuaguuguggaggacgaaggaugcacaaaccucucagguuucaguuauauggagcugaagguaggcuacaucagcgcuauuaaagugaauggguuuacuuguacgggagucgugaccgaagcagagacauauacuaacuucguuggcuacgugaccacaaccuuuaagagaaaacacuucaggcccacuccugaugccugccgggcggcuuauaauuggaagauggccggugacccacgcuacgaagagucccuucauaaccccuauccugauuaccacuggcugcgaacagucaagaccacgaaagagucuuuggugaucauaucgccaucaguagcagaccucgauccguacgacaagagccugcauagucguguuuuucccuccgggaaauguucuggaaucacugugagcuccaccuauugcucaacaaaucacgauuacacuauuuggaugccugaaaacccaagacugggcaccaguugugacaucuucacaaauagcaggggcaagcgggccucuaaaggguccaagaccugcggauuugucgaugagcgcggucucuauaagucauuaaaaggcgcuuguaagcugaaacuuugcgggguguugggacugagacuaauggacggcacgugggcagccauucaaacuagcgaugaaacaaaguggugucccccugaccagcucgugaaccugcacgacuucaggagugaugagaucgagcaucuugucguugaggaacuggugaaaaagcgggaagagugcuuggacgcucucgaaucuauaaugaccacuaaauccgugagcuuucgccgacugucgcacuuaagaaagcugguaccagguuucgggaaggccuacacaauuuucaauaaaacccucauggaggcggaugcacauuauaagucugucaggacguggaacgagaucauucccuccaaaggaugccuucgggugggcggccguugucacccgcacguuaaugggguguuuuucaacggaaucauccuggguccugacggccaugucuugauucccgaaaugcagucaagucuacugcagcaacacauggagcuccuggaaagcuccgugauaccacuuaugcauccucuggccgaucccucuaccguauuuaaggacgaugacgaggcugaagauuucguugaggugcacuugccagacguccauaaacaggugagcggggucgaucucggacugcccucauggggcaaguacguguuaaugagugccgguguucugacagcacuaaugcucaugaucuuucugaugacuugcugucgcagagcuaauagggccgaguccgcgcagcacagccuuggggaacggggccgaaaggugucuguaaccucacagaguggacgcgucauuagcuccugggagucuuauaaaaacggcggggaaacaaaguuguga

SEQ ID NO: 158624 - RNA, 1575 nt, Artificial Sequence
  derived and/or modified CDS sequence (opt3) from glycoprotein__RABV__AB563803.1
augaucccccaggcccuccuguucgugccucuucuggucuuuagcuugugcuucggcaaguuuccaauuuacaccauaccggacaaauuagggcccugguccccuaucgauauucaccaucugucuuguccaaacaaucuaguuguggaggacgaaggaugcacaaaccucucagguuucaguuauauggagcugaagguaggcuacaucagcgcuauuaaagugaauggguuuacuuguacgggagucgugaccgaagcagagacauauacuaacuucguuggcuacgugaccacaaccuuuaagagaaaacacuucaggcccacuccugaugccugccgggcggcuuauaauuggaagauggccggugacccacgcuacgaagagucccuucauaaccccuauccugauuaccacuggcugcgaacagucaagaccacgaaagagucuuuggugaucauaucgccaucaguagcagaccucgauccguacgacaagagccugcauagucguguuuuucccuccgggaaauguucuggaaucacugugagcuccaccuauugcucaacaaaucacgauuacacuauuuggaugccugaaaacccaagacugggcaccaguugugacaucuucacaaauagcaggggcaagcgggccucuaaaggguccaagaccugcggauuugucgaugagcgcggucucuauaagucauuaaaaggcgcuuguaagcugaaacuuugcgggguguugggacugagacuaauggacggcacgugggcagccauucaaacuagcgaugaaacaaaguggugucccccugaccagcucgugaaccugcacgacuucaggagugaugagaucgagcaucuugucguugaggaacuggugaaaaagcgggaagagugcuuggacgcucucgaaucuauaaugaccacuaaauccguaucguuucgccgacugucgcacuuaagaaagcuggugccagguuucgggaaggccuacacaauuuucaauaaaacccucauggaggcggaugcacauuauaagucugucaggacguggaacgagaucauucccuccaaaggaugccuucgggugggcggccguugucacccgcacguuaaugggguguuuuucaacggaaucauccuggguccugacggccaugucuugauucccgaaaugcagucaagucuacugcagcaacacauggagcuccuggaaagcuccgugauaccacuuaugcauccucuggccgaucccucuaccguauuuaaggacgaugacgaggcugaagauuucguugaggugcacuugccagacguccauaaacaggugagcggggucgaucucggacugcccucauggggcaaguacguguuaaugagugccgguguucugacagcacuaaugcucaugaucuuucugaugacuugcugucgcagagcuaauagggccgaguccgggcagcacagccuuggcgaacggggacgaaaggugucuguaaccucacagaguggccgcgucauuagcuccugggagucuuauaaaagcgggggagaaacaaaguuguga

SEQ ID NO: 158625 - RNA, 1575 nt, Artificial Sequence; identical to SEQ ID NO: 158620
  derived and/or modified CDS sequence (opt3) from glycoprotein__RABV__AB563806.1

SEQ ID NO: 158626 - RNA, 1575 nt, Artificial Sequence
  derived and/or modified CDS sequence (opt3) from glycoprotein__RABV__AB563807.1
augaucccccaggcccugauguucgcuccucuccuuguguuuagccugugcuucggcaaguuuccaauuuacaccauaccggacaaauuggggcccugguccccuaucgauauucaccauuuaucuuguccaaacaaucuggucguugaggacgaaggaugcacaaaccuaucagguuucaguuauauggagcucaaggugggcuacaucagcgcaauuaaaguaaauggguuuacuuguacgggaguggucaccgaagccgagacauauacuaacuucgugggcuacguuaccacaaccuuuaagagaaaacacuucaggcccacuccugaugcgugccgggcugccuauaauuggaagauggcaggggacccacgcuacgaagagucccugcauaaccccuauccugauuaccacuggcuucgaacagugaagaccacgaaagagucucuggucaucauaucgccaucaguggccgacuuggauccguacgacaagagccuccauagucguguauuucccuccgggaaauguucuggaaucacuguuagcuccaccuauugcucaacaaaucacgauuacacuauuuggaugccugaaaacccaagacugggcaccaguugugacaucuucacaaauagcaggggcaagcgggcuucuaaaggguccaagaccugcggauuuguggaugagcgcggucuguauaagucacucaaaggcgcauguaaguuaaaacugugcgggguccuuggauugagacugauggacggcacgugggccgcuauucaaacuagcgaugaaacaaaguggugucccccugaccagcuagugaaccuccacgacuucaggagugaugagaucgagcaucugguggucgaggaacuuguuaaaaagcgggaagagugccuggacgccuuggaaucuauaaugaccacuaaauccgugagcuuucgccgacucucgcaccugagaaaguuaguaccagguuucgggaaggcguacacaauuuucaauaaaacccugauggaggcagaugcccauuauaagucugugaggacguggaacgagaucauucccuccaaaggaugccuccgggucggcggccguugucacccgcacgugaaugggguguuuuucaacggaaucauccuugguccugacggccauguucugauucccgaaaugcagucaaguuugcuacagcaacacauggagcugcucgaaagcuccgucauaccacugaugcauccucuugcugaucccucuaccguguuuaaggacgauggggaggccgaagacuucguagagguucaucugccagaugugcacaaacaggucagcggaguggacuugggccuccccucaugggguaaguacguccugaugagugcagggguguuaacagcucugaugcuaaugaucuuucucaugacuugcugucgcagagccaauagggcggaguccgcccagcacagccugggcgaacggggacgaaagguuucugugaccucacagaguggccgcguaauuagcuccugggagucuuauaaaucggguggagaaacaagacuuuga

SEQ ID NO: 158627 - RNA, 1575 nt, Artificial Sequence
  derived and/or modified CDS sequence (opt3) from glycoprotein__RABV__AB563809.1
augaucccccaggcccuucucuucgugccucuucuggucuuuagcuugugcuucggcaaguuuccaauuuacaccauaccggacaaauuagggcccugguccccuaucgauauucaccaucugucuuguccaaacaaucuaguuguggaggacgaaggaugcacaaaccucucagguuucaguuaucuggagcuuaagguaggcuacaucagcgcuauuaaagugaauggguuuacuuguacgggagucgugaccgaagcagagacauauacuaacuucguuggcuacgugaccacaaccuuuaagagaaaacacuucaggcccacuccugaugccugccgggcggcuuauaauuggaagauggccggugacccacgcuacgaagagucccugcauaaccccuauccugauuaccacugguugcgaacagucaagaccacgaaagagucucucgugaucauaucgccaucaguagcagaccuggauccguacgacaagagccugcauagucguguuuuucccuccgggaaauguucuggaaucacugugagcuccaccuauugcucaacaaaucacgauuacacuauuuggaugccugaaaacccaagacucggcaccaguugugacaucuucacaaauagcaggggcaagcgggccucuaaaggguccaagaccugcggauuugucgaugagcgcgguuuauauaagucacugaaaggcgcuuguaagcugaaauugugcggggugcugggacuaagacucauggacggcacgugggcagccauucaaacuagcgaugaaacaaaguggugucccccugaccagcuggugaaccuucacgacuucaggagugaugagaucgagcaucuggucguugaagaguuggugaaaaagcgggaagagugccucgacgcucuggaaucuauaaugaccacuaaauccguaucguuucgccgauuaucgcaccugagaaagcucgugccagguuucgggaaggccuacacaauuuucaauaaaacccuuauggaggcggaugcacauuauaagucugucaggacguggaacgagaucauucccuccaaaggaugccugcgggugggcggccguugucacccgcacguuaaugggguguuuuucaacggaaucaucuuggguccugacggccauguccuaauucccgaaaugcagucaagucugcuccagcaacacauggagcugcuugaaagcuccgugauaccacugaugcauccuuuggccgaucccucuaccguauuuaaggacgaugacgaggcugaagauuucguugaggugcaccucccagacguccauaaacaggugagcggggucgaucugggauuacccucauggggcaaguacgugcugaugagugccgguguucuaacagcacucaugcugaugaucuuucuuaugacuugcugucgcagagcuaauagggccgaguccgcgcagcacagcuugggggaaggcggacggaaggugucuguaaccucacagaguggccgagucauuagcuccugggagucuuauaaaagcgggggagaaacaaagcuguga

SEQ ID NO: 158628 - RNA, 1575 nt, Artificial Sequence
  derived and/or modified CDS sequence (opt3) from glycoprotein__RABV__AB563812.1
augaucccccaggcccuucucuucgugccucuucuggucuuuagcuugugcuucggcaaguuuccaauuuacaccauaccggacaaauuagggcccugguccccuaucgauauucaccaucugucuuguccaaacaaucuaguuguggaggacgaaggaugcacaaaccucucagguuucaguuauauggagcugaagguaggcuacaucagcgcuauuaaagugaauggguuuacuuguacgggagucgugaccgaagcagagacauauacuaacuucguuggcuacgugaccacaaccuuuaagagaaaacacgucaggcccacuccugaugccugccgggcggcuuauaauuggaagauggccggugacccacgcuacgaagagucccuucauaaccccuauccugauuaccacugggugcgaacaguaaagaccacgaaagagucucugguuaucauaucgccaucaguggcagacuuggauccguacgacaagagccuccauagucgugucuuccccuccgggaaauguucuggaaucacugugagcuccaccuauugcucaacaaaucacgauuacacuauuuggaugccugaaaacccaagacugggcaccaguugugacaucuuuacaaauagcaggggcaagcgggccucuaaaggguccaagaccugcggauucguggaugagcgcggucuguauaagucacucaaaggcgcuuguaaguuaaaacugugcgggguccuuggauugagacugauggacggcacgugggcagccauucaaacuagcgaugaaacaaaguggugucccccugaccagcuaguuaaccuccacgacuuuaggagugaugagaucgagcaucuggugguagaggaacuugugaaaaagcgggaagagugccuggacgcuuuggaaucuauaaugaccacuaaauccgucagcuuccgccgacucucgcaccugagaaaguuagugccagguuuugggaaggccuacacaauuuucaauaaaacccugauggaggcggaugcacauuauaagucuguuaggacguggaacgagaucauucccuccaaaggaugccuccgggugggcggccguugucacccgcacgucaaugggguguucuuuaacggaaucauccuugguccugacggccauguacugauucccgaaaugcagucaaguuugcuacagcaacacauggagcugcucgaaagcuccguuauaccacugaugcauccucuugccgaucccucuaccguguucaaggacgaugacgaggcugaagauuuugucgaggugcaucugccagacguccacaaacaggugagcgggguugauuugggacuccccucauggggcaaguacgugcugaugagugccgguguauuaacagcacugaugcuaaugaucuuccucaugacuugcugucgcagaaccaauagggcugaguccgcccagcacagccugcgggaacgagggcgcaaggucucugugacaucacagaguggcagaguuauuagcuccugggagucuuauaaaucgggaggcgaaacuaagcuguga

SEQ ID NO: 158629 - RNA, 1575 nt, Artificial Sequence
  derived and/or modified CDS sequence (opt3) from glycoprotein__RABV__AB563813.1
augaucccccaggcccuccuguucgugccucuucuggucuuuagcuugugcuucggcaaguuuccaauuuacaccauaccggacaaauuagggcccugguccccuaucgauauucaccaucugucuuguccaaacaaucuaguuguggaggacgaaggaugcacaaaccucucagguuucaguuauauggagcugaagguaggcuacaucagcgcuauuaaagugaauggguuuacuuguacgggagucgugaccgaagcagagacauauacuaacuucguuggcuacgugaccacaaccuuuaagagaaaacacuucaggcccacuccugaugccugccgggcggcuuauaauuggaagauggccggugacccacgcuacgaagagucccuucauaaccccuauccugauuaccacuggcugcgaacagucaagaccacgaaagagucuuuggugaucauaucgccaucaguagcagaccucgauccguacgacaagagccugcauagucguguuuuucccuccgggaaauguucuggaaucacugugagcuccaccuauugcucaacaaaucacgauuacacuauuuggaugccugaaaacccaagacugggcgccaguugugacaucuucaccaauagcaggggcaagcgggcuucuaaaggguccaagacaugcggauuugucgaugagcgcggucucuauaagucauuaaaaggcgcauguaagcugaaacuuugcgggguguugggacugagacuaauggacggcaccugggccgcuauucaaacgagcgaugaaacuaaguggugucccccugaccagcucgugaaccugcacgacuucaggagugaugagaucgagcaucuugucguugaggaacuggugaaaaagcgggaagagugcuuggacgcccucgaaucuauaaugacaaccaaauccgugagcuuucgccgacugucgcacuuaagaaagcugguaccagguuucgggaaggcguacacuauuuucaauaaaacacucauggaggcagaugcccauuauaagucugucaggaccuggaacgagaucauucccuccaaaggaugccuucgggugggcggccguugucacccgcacguuaaugggguguuuuucaacggaaucauccuggguccugacggccaugucuugauucccgaaaugcagucaagucuacugcagcaacacauggagcuccuggaaagcuccgugauaccacuuaugcauccucuggcugaucccucuacgguauuuaaggacgaugacgaggccgaagauuucguugaggugcacuugccagacguccauaaacaggugagcggggucgaucucggacugcccucauggggcaaguacguguuaaugagugcugguguucugaccgcacuaaugcucaugaucuuucugaugacaugcugucgcagagccaauaggguggaguccgaacagcacagccuugggcagcggggccgaaagguaucugucacuucacaaaguggacgcgugauuagcuccugggagucuuauaaaucgggcggggaaaccaaguuguga

SEQ ID NO: 158630 - RNA, 1575 nt, Artificial Sequence; identical to SEQ ID NO: 158619
  derived and/or modified CDS sequence (opt3) from glycoprotein__RABV__AB563816.1

SEQ ID NO: 158631 - RNA, 1575 nt, Artificial Sequence
  derived and/or modified CDS sequence (opt3) from glycoprotein__RABV__AB563817.1
augaucccccaggcccuccuguucgugccucuucuggucuuuagcuugugcuucggcaaguuuccaauuuacaccauaccggacaaauuagggcccugguccccuaucgauauucaccaucugucuuguccaaacaaucuaguuguggaggacgaaggaugcacaaaccucucagguuucaguuauauggagcugaagguaggcuacaucagcgcuauuaaagugaauggguuuacuuguacgggagucgugaccgaagcagagacauauacuaacuucguuggcuacgugaccacaaccuuuaagagaaaacacuucaggcccacuccugaugccugccgggcggcuuauaauuggaagauggccggugacccacgcuacgaagagucccuucauaaccccuauccugauuaccacuggcugcgaacagucaagaccacgaaagagucuuuggugaucauaucgccaucaguagcagaccucgauccguacgacaagagccugcauagucguguuuuucccuccgggaaauguucuggaaucacugugagcuccaccuauugcucaacaaaucacgauuacacuauuuggaugccugaaaacccaagacugggcaccaguugugacaucuucacaaauagcaggggcaagcgggccucuaaaggguccaagaccugcggauuugucgaugagcgcggucucuauaagucauuaaaaggcgcuuguaagcugaaacuuugcgggguguugggacugagacuaauggacggcacgugggcagccauucaaacuagcgaugaaacaaaguggugucccccugaccagcucgugaaccugcacgacuucaggagugaugagaucgagcaucuugucguugaggaacuggugaaaaagcgggaagagugcuuggacgcucucgaaucuauaaugaccacuaaauccgugagcuuucgccgacugucgcacuuaagaaagcugguaccagguuucgggaaggccuacacaauuuucaauaaaacccucauggaggcggaugcacauuauaagucugucaggacguggaacgagaucauucccuccaaaggaugccuucgggugggcggccguugucacccgcacguuaaugggguguuuuucaacggaaucauccuggguccugacggccaugucuugauucccgaaaugcagucaagucuacugcagcaacacauggagcuccuggaaagcuccgugauaccacuuaugcauccucuggccgaucccucuaccguauuuaaggacgaugacgaggcugaagauuucguugaggugcacuugccagacguccauaaacaggugagcggggucgaucucggacugcccucauggggcaaguacguguuaaugagugccggugcacugacagcucuaaugcucaugaucuuucugaugacuugcugucgcagagccaauagggcggaguccgcccagcacagccuuggggaacggggccgaaagguuucugugaccucacagaguggacgcguaauuagcuccugggagucuuauaaaucgggcggggaaacaaaguuguga

SEQ ID NO: 158632 - RNA, 1575 nt, Artificial Sequence; identical to SEQ ID NO: 158619
  derived and/or modified CDS sequence (opt3) from glycoprotein__RABV__AB563819.1

SEQ ID NO: 158633 - RNA, 1575 nt, Artificial Sequence
  derived and/or modified CDS sequence (opt3) from glycoprotein__RABV__AB563820.1
augaucccccaggcccuccuguucgugccucuucuggucuuuagcuugugcuucggcaaguuuccaauuuacaccauaccggacaaauuagggcccugguccccuaucgauauucaccaucugucuuguccaaacaaucuaguuguggaggacgaaggaugcacaaaccucucagguuucaguuauauggagcugaagguaggcuacaucagcgcuauuaaagugaauggguuuacuuguacgggagucgugaccgaagcagagacauauacuaacuucguuggcuacgugaccacaaccuuuaagagaaaacacuucaggcccaugccugaugccugccgggcggcuuauaauuggaagauggccggugacccacgcuacgaagagucccuucauaaccccuauccugauuaccacuggcugcgaacugucaagacaaccaaagagucuuuggugaucauaucgccaucaguagcagaccucgauccguacgacaagagccugcauagucguguuuuucccuccgggaaauguucuggaaucacggugagcuccacuuauugcucaaccaaucacgauuacacaauuuggaugccugaaaacccaagacugggcacuagcugugacaucuucauuaauagcaggggcaagcgggccucuaaaggguccaagaccugcggauuugucgaugagcgcggucucuauaagucauuaaaaggcgcuuguaagcugaaacuuugcgggguguugggacugagacuaauggacggcacaugggcagccauccaaaccagcgaugaaacgaaguggugucccccugaccagcucgugaaccugcacgacuucaggagugaugagauagagcaucuugucguugaggaacuggugaaaaagcgggaagagugcuuggacgcucucgaaucuauuaugacuacaaaauccguaaguuuucgccgacugucgcacuuaagaaagcuggugccagguuucgggaaggccuacaccaucuucaauaaaacucucauggaggcggaugcacauuauaagucugucaggacauggaacgagauuauccccuccaaaggaugccuucgggugggcggccguugucacccgcacguuaaugggguguuuuucaacggaaucauucuggguccugacggccaugucuugauacccgaaaugcagucaagucuacugcagcaacacauggagcuccuggaaagcuccgugaucccacuuaugcauccucuggccgaucccucuaccguauuuaaggacgaugacgaggcugaagauuucguugaggugcacuugccagacguccauaaacaggugagcggggucgaucucggacugcccucauggggcaaguacguguuaaugagugccgguguucugacggcacuaaugcucaugauuuuucugaugaccugcugucgcagauccaauagggcuaagagcgagcagcacucucuuggggaacggggccgaaaagugucaguaacaagucagagcggacgcgucaucuccucuugggagucguauaagagaggcggggaaacuaaauuguga

SEQ ID NO: 158634 - RNA, 1575 nt, Artificial Sequence
  derived and/or modified CDS sequence (opt3) from glycoprotein__RABV__AB563821.1
augaucccccaggcccuucucuucgugccucuucuggucuuuagcuugugcuucggcaaguuuccaauuuacaccauaccggacaaauuagggcccugguccccuaucgauauucaccaucugucuuguccaaacaaucuaguuguggaggacgaaggaugcacaaaccucucaggucugaguuauauggagcuuaagguaggcuacaucagcgcuauuaaagugaauggguucacuuguacgggagucgugaccgaagcagagacauauacuaacuuuguuggcuacgugaccacaaccuucaagagaaaacacuuuaggcccacuccugaugccugccgggcggcuuauaauuggaagauggccggugacccacgcuacgaagagucccugcauaaccccuauccugauuaccacugguugcgaacagucaagaccacgaaagagucucucgugaucauaucgccaucaguagcagaccuggauccguacgacaagagccugcauagucguguuuuccccuccgggaaauguucuggaaucacugugagcuccaccuauugcuuuacaaaucacgauuacacuauuuggaugccugaaaacccaagacucggcaccucaugugacaucuucacaaauaguaggggcaagcgggccagcaaagggucuaagaccugcggauuugucgaugagcgcgguuuauauaagucccugaaaggcgcuuguaagcugaaauugugcggggugcugggacuaagacucauggacggcacgugggcagccauucaaacuucagaugaaacaaaguggugucccccugaccagcuggugaaccuucacgacuucaggagcgaugagaucgagcaucuggucguugaagaguuggugaaaaagcgggaagagugccucgacgcucuggaaaguauaaugaccacuaaaucuguauccuuucgccgauuaagccaccugagaaagcucgugccagguuucgggaaggccuacacaauuuucaauaaaacccuuauggaggcggaugcacauuauaagucggucaggacgugggacgagaucauucccucuaaaggaugccugcgggugggcggccguugucacccgcacguuaacgggguguuuuucaauggaaucaucuuggguccugauggccauguccuaauucccgaaaugcaguccucacugcuccagcaacacauggagcugcuugaaaguagcgugauaccacugaugcauccuuuggccgaccccuccaccguauuuaaggaugacgaugaggcugaagacuucguugaggugcaccucccagauguccauaaacaggugucuggggucgaccugggauuacccagcuggggcaaguacgugcugaugucagccgguguucuaacagcacucaugcugaugaucuuucuuaugacuugcugucgcagagcuaacagggccgagagugcgcagcacuccuugggggaacggggccgaaaggugagcguaaccucucagucaggacgcgucauuaguagcugggaguccuauaaaucuggcggggaaacaaagcuguga

SEQ ID NO: 158635 - RNA, 1575 nt, Artificial Sequence; identical to SEQ ID NO: 158619
  derived and/or modified CDS sequence (opt3) from glycoprotein__RABV__AB563822.1

SEQ ID NO: 158636 - RNA, 1575 nt, Artificial Sequence
  derived and/or modified CDS sequence (opt3) from glycoprotein__RABV__AB563823.1
augaucccccaggcccugcuccuugugccucuguuggucuucagcuuaugcuuuggcaaguucccaauuuacaccauaccggacaaacuggggcccugguccccuaucgauauucaccaucuaucuuguccaaacaaucucguuguggaggacgaaggaugcacaaaccugucagguuuuaguuauauggagcuuaagguaggcuacaucagcgcuauuaaagugaauggguucacuuguacgggagucgugaccgaagcagagacauauacuaacuuuguuggcuacgugaccacaaccuucaagagaaaacacuuuaggcccacuccugaugccugccgggcggcuuauaauuggaagauggccggugacccacgcuacgaagagucccugcauaaccccuauccugauuaccacugguugcgaacagucaagaccacgaaagagucucucgugaucauaucgccaucaguagcagaccuggauccguacgacaagagccugcauagucguguuuuccccuccgggaaauguucuggaaucacugugagcuccaccuauugcucaacaaaucacgauuacacuauuuggaugccugaaaacccaagacucggcaccaguugugacaucuuuacaaauagcaggggcaagcgggccucuaaaggguccaagaccugcggauucgucgaugagcgcgguuuauauaagucacugaaaggcgcuuguaaacuuaaguugugcggggugcugggacuaagacucauggacggcacgugggcagccauucaaacuagcgaugaaacaaaguggugucccccugaccagcuggugaaccuucacgacuuuaggagugaugagaucgagcaucuggucguugaagaguuggugaaaaagcgggaagagugccucgacgcucuggaaucuauaaugaccacuaaauccgugagcuuccgccgauuaucgcaccugagaaagcucguaccagguuuugggaaggccuacacaauuuucaauaaaacccuuauggaggcggaugcacauuauaagucugucaggacguggaacgagaucauucccuccaaaggaugccugcgggugggcggccguugucacccgcacguuaaugggguguucuuuaacggaaucaucuuggguccugacggccauguccuaauucccgaaaugcagucaagucugcuccagcaacacauggagcugcuugaaagcuccgugauaccacugaugcauccuuuggccgaucccucuaccguauucaaggacgaugacgaggcugaagauuuuguugaggugcaccucccagacguccauaaacaggugagcggggucgaucugggauuacccucauggggcaaguacgugcugaugagugccgguguucuaacagcacucaugcugaugaucuuccuuaugacuugcugucgcagagcuaauaggguggaguccgcccagcacagcuugggggaacggggccgaaagguaucugucaccucacagaguggacgcgugauuagcuccugggagucuuauaaaucgggcggggaaacaaagcuguga

SEQ ID NO: 158637 - RNA, 1575 nt, Artificial Sequence; identical to SEQ ID NO: 158619
  derived and/or modified CDS sequence (opt3) from glycoprotein__RABV__AB563824.1

SEQ ID NO: 158638 - RNA, 1575 nt, Artificial Sequence
  derived and/or modified CDS sequence (opt3) from glycoprotein__RABV__AB563826.1
augaucccccaggcccuccuguucgugccucuucuggucuuuagcuugugcuucggcaaguuuccaauuuacaccauaccggacaaauuagggcccugguccccuaucgauauucaccaucugucuuguccaaacaaucuaguuguggaggacgaaggaugcacaaaccucucagguuucaguuauauggagcugaagguaggcuacaucagcgcuauuaaagugaauggguuuacuuguacgggagucgugaccgaagcagagacauauacuaacuucguuggcuacgugaccacaaccuuuaagagaaaacacuucaggcccacuccugaugccugccgggcggcuuauaauuggaagauggccggugacccacgcuacgaagagucccuucauaaccccuauccugauuaccacuggcugcgaacagucaagaccacgaaagagucuuuggugaucauaucgccaucaguagcagaccucgauccguacgacaagagccugcauagucguguuuuucccuccgggaaauguucuggaaucacugugagcuccaccuauugcucaacaaaucacgauuacacuauuuggaugccugaaaacccaagacugggcaccaguugugacaucuucacaaauagcaggggcaagcgggccucuaaaggguccaagaccugcggauuugucgaugagcgcggucucuauaagucauuaaaaggcgcuuguaagcugaaacuuugcgggguguugggacugagacuaauggacggcacgugggcagccauucaaacuagcgaugaaacaaaguggugucccccugaccagcucgugaaccugcacgacuucaggagugaugagaucgagcaucuugucguugaggaacuggugaaaaagcgggaagagugcuuggacgcucucgaaucuauaaugaccacuaaauccguaaguuuucgccgacugucgcacuuaagaaagcuggugccagguuucgggaaggccuacacaauuuucaauaaaacccucauggaggcggaugcacauuauaagucugucaggacguggaacgagaucauucccuccaaaggaugccuucgggugggcggccguugucacccgcacguuaaugggguguuuuucaacggaaucauccuggguccugacggccaugucuugauucccgaaaugcagucaagucuacugcagcaacacauggagcuccuggaaagcuccgugauaccacuuaugcauccucuggccgaucccucuagcguauuuaaggacgaugacgaggcugaagauuucguugaggugcacuugccagacguccauaaacaggugucaggggucgaucucggacugcccaguuggggcaaguacguguuaauguccgccgguguucugaccgcacuaaugcucaugaucuuucugaugacaugcugucgcagagcuaauaggguggagagcgcccagcacucucuuggggaacggggccgaaagguaucagucacuagccagagcggacgcgugauuuccucuugggagucguauaaaagcggcggggaaaccaaguuguga

SEQ ID NO: 158639 - RNA, 1575 nt, Artificial Sequence
  derived and/or modified CDS sequence (opt3) from glycoprotein__RABV__AB563827.1
augaucccccaggcccuccuguucgugccucuucuggucuuuagcuugugcuucggcaaguuuccaauuuacaccauaccggacaaauuagggcccugguccccuaucgauauucaccaucugucuuguccaaacaaucuaguuguggaggacgaaggaugcacaaaccucucagguuucaguuauauggagcugaagguaggcuacaucagcgcuauuaaagugaauggguuuacuuguacgggagucgugaccgaagcagagacauauacuaacuucguuggcuacgugaccacaaccuuuaagagaaaacacuucaggcccacuccugaugccugccgggcggcuuauaauuggaagauggccggugacccacgcuacgaagagucccuucauaaccccuauccugauuaccacuggcugcgaacagucaagaccacgaaagagucuuuggugaucauaucgccaucaguagcagaccucgauccguacgacaagagccugcauagucguguuuuucccuccgggaaauguucuggaaucacugugagcuccaccuauugcucaacaaaucacgauuacacuauuuggaugccugaaaacccaagacugggcaccaguugugacaucuucacaaauagcaggggcaagcgggccucuaaaggguccaagaccugcggauuugucgaugagcgcggucucuauaagucauuaaaaggcgcuuguaagcugaaacuuugcgggguguugggacugagacuaauggacggcacguggguggcaauucaaacuagcgaugaaacaaaguggugucccccugaccagcucgucaaccugcacgacuucaggagugaugagaucgagcaucuuguuguggaggaacugguaaagaaacgggaagagugcuuggacgcccucgaaucuauaaugaccacuaaauccgugagcuuucgccgacugucgcacuuaagaaagcuggucccagguuucgggaaggcuuacacaauuuucaauaaaacccucauggaggccgaugcgcauuauaagucugugaggacguggaacgagaucauucccuccaaaggaugccuucggguuggcggccguugucacccgcacgugaauggggucuuuuucaacggaaucauccuggguccugacggccauguguugauucccgaaaugcagucaagucuacugcagcaacacauggagcuccuggaaagcuccguaauaccacuuaugcauccucuggcagaucccucuaccguuuuuaaggacgaugacgaggccgaagauuucguggagguccacuugccagacgugcauaaacaggucagcgggguggaucucggacugcccucauggggcaaguacguuuuaaugagugcuggugugcugacagcccuaaugcucaugaucuuucugaugacuugcugucgcagagcaaauaggguagaguccgcucagcacagccuuggggaacggggccgaaaggucucugugaccucacagaguggacgcguuauuagcuccugggagucuuauaaaucgggcggggaaacaaaguuguga

SEQ ID NO: 158640 - RNA, 1575 nt, Artificial Sequence
  derived and/or modified CDS sequence (opt3) from glycoprotein__RABV__AB563830.1
augaucccccaggcccugcuccuugugccucuguuggucuucagcuuaugcuuuggcaaguucccaauuuacaccauaccggacaaacuggggcccugguccccuaucgauauucaccaucuaucuuguccaaacaaucucguuguggaggacgaaggaugcacaaaccugucagguuuuaguuauauggagcuuaagguaggcuacaucagcgcuauuaaagugaauggguucacuuguacgggagucgugaccgaagcagagacauauacuaacuuuguuggcuacgugaccacaaccuucaagagaaaacacuuuaggcccacuccugaugccugccgggcggcuuauaauuggaagauggccggugacccacgcuacgaagagucccugcauaaccccuauccugauuaccacugguugcgaacagucaagaccacgaaagagucucucgugaucauaucgccaucaguagcagaccuggauccguacgacaagagccugcauagucguguuuuccccuccgggaaauguucuggaaucacugugagcuccaccuauugcucaacaaaucacgauuacacuauuuggaugccugaaaacccaagacucggcaccaguugugacaucuuuacaaauagcaggggcaagcgggccucuaaaggguccaagaccugcggauucgucgaugagcgcgguuuauauaagucacugaaaggcgcuuguaaacuuaaguugugcggggugcugggacuaagacucauggacggcacgugggcagccauucaaacuagcgaugaaacaaaguggugucccccugaccagcuggugaaccuucacgacuuuaggagugaugagaucgagcaucuggucguugaagaguuggugaaaaagcgggaagagugccucgacgcucuggaaucuauaaugaccacuaaauccgugagcuuccgccgauuaucgcaccugagaaagcucguaccagguuuugggaaggccuacacaauuuucaauaaaacccuuauggaggcggaugcacauuauaagucugucaggacguggaacgagaucauucccuccaaaggaugccugcgggugggcggccguugucacccgcacguuaaugggguguucuuuaacggaaucaucuuggguccugacggccauguccuaauucccgaaaugcagucaagucugcuccagcaacacauggagcugcuugaaagcuccgugauaccacugaugcauccuuuggccgaucccucuaccguauucaaggacgaugacgaggcugaagauuuuguugaggugcaccucccagacguccauaaacaggugagcggggucgaucugggauuacccucauggggcaaguacgugcugaugagugccgguauccuaacagcacucaugcugaugauuuuccuuaugacuugcugucgcagagcuaauaggguugaguccgcccagcacagcuugggggaacggggccgaaaggugucuguaaccucacagaguggacgcgucaucagcuccugggagucuuauaaaucgggcggggaaacaaagcuguga

SEQ ID NO: 158641 - RNA, 1575 nt, Artificial Sequence; identical to SEQ ID NO: 158636
  derived and/or modified CDS sequence (opt3) from glycoprotein__RABV__AB563836.1

SEQ ID NO: 158642 - RNA, 1575 nt, Artificial Sequence
  derived and/or modified CDS sequence (opt3) from glycoprotein__RABV__AB563837.1
augaucccccaggcccuccuguucgugccucuucuggucuuuagcuugugcuucggcaaguuuccaauuuacaccauaccggacaaauuagggcccugguccccuaucgauauucaccaucugucuuguccaaacaaucuaguuguggaggacgaaggaugcacaaaccucucagguuucaguuauauggagcugaagguaggcuacaucagcgcuauuaaagugaauggguuuacuuguacgggagucgugaccgaagcagagacauauacuaacuucguuggcuacgugaccacaaccuuuaagagaaaacacuucaggcccacuccugaugccugccgggcggcuuauaauuggaagauggccggugacccacgcuacgaagagucccuucauaaccccuauccugauuaccacuggcugcgaacagucaagaccacgaaagagucuuuggugaucauaucgccaucaguagcagaccucgauccguacgacaagagccugcauagucguguuuuucccuccgggaaauguucuggaaucacuguguucagcaccuauugcuccacaaaucacgauuacacuauuuggaugccugaaaacccaagacugggcaccucaugugacaucuuuacaaauaguaggggcaagcgggccagcaaagggucuaagaccugcggauucgucgaugagcgcggucucuauaaguccuuaaaaggcgcuuguaagcugaaacuuugcgggguguugggacugagacuaauggacggcacgugggcagccauucaaacuucagaugaaacaaaguggugucccccugaccagcucgugaaccugcacgacuuuaggagcgaugagaucgagcaucuugucguugaggaacuggugaaaaagcgggaagagugcuuggacgcucucgaaaguauaaugaccacuaaaucuguauccuuccgccgacugagccacuuaagaaagcuggugccagguuucgggaaggccuacacaauuuuuaauaaaacccucauggaggcggaugcacauuauaagucggucaggacguggaacgagaucauucccucuaaaggaugccuucgggugggcggccguugucacccgcacguuaaugggguguucuuuaacggaaucauccuggguccugacggccaugucuugauucccgaaaugcaguccucacuacugcagcaacacauggagcuccuggaaaguagcgugauaccacuuaugcauccucuggccgaucccuccaccguauucaaggacgaugacgaggcugaagauuuuguugaggugcacuugccagacguccauaaacaggugucuggggucgaucucggacugcccagcuggggcaaguacguguuaaugucagccgguguucugacagcacuaaugcucaugaucuuccugaugacuugcugucgcagagcuaauaggguggagagugcccagcacucccuuggggaacggggccgaaagguaagcgucaccucucagucaggacgcgugauuaguagcugggaguccuauaaaucuggcggggaaacaaaguuguga

SEQ ID NO: 158643 - RNA, 1575 nt, Artificial Sequence
  derived and/or modified CDS sequence (opt3) from glycoprotein__RABV__AB563838.1
augaucccccaggcccuccuguucgugccucuucuggucuuuagcuugugcuucggcaaguuuccaauuuacaccauaccggacaaauuagggcccugguccccuaucgauauucaccaucugucuuguccaaacaaucuaguuguggaggacgaaggaugcacaaaccucucagguuucaguuauauggagcugaagguaggcuacaucagcgcuauuaaagugaauggguuuacuuguacgggagucgugaccgaagcagagacauauacuaacuucguuggcuacgugaccacaaccuuuaagagaaaacacuucaggcccacuccugaugccugccgggcggcuuauaauuggaagauggccggugacccacgcuacgaagagucccuucauaaccccuauccugauuaccacuggcugcgaacagucaagaccacgaaagagucuuuggugaucauaucgccaucaguagcagaccucgauccguacgacaagagccugcauagucguguuuuucccuccgggaaauguucuggaaucacugugagcuccaccuauugcucaacaaaucacgauuacacuauuuggaugccugaaaacccaagacugggcaccaguugugacaucuucacaaauagcaggggcaagcgggccucuaaaggguccaagaccugcggauuugucgaugagcgcggucucuauaagucauuaaaaggcgcuuguaagcugaaacuuugcgggguguugggacugagacuaauggacggcacgugggcagccauucaaacuagcgaugaaacaaaguggugucccccugaccagcucgugaaccugcacgacuucaggagugaugagaucgagcaucuugucguugaggaacuggugaaaaagcgggaagagugcuuggacgcucucgaaucuauaaugaccacuaaauccgugagcuuucgccgacugucgcacuuaagaaagcugguaccagguuucgggaaggccuacacaauuuucaauaaaacccucauggaggcggaugcacauuauaagucugucaggacguggaacgagaucauucccuccaaaggaugccuucgggugggcggccguugucacccgcacguuaaugggguguuuuucaacggaaucauccuggguccugacggccaugucuugauucccgaaaugcagucaagucuacugcagcaacacauggagcuccuggaaagcuccgugauaccacuuaugcauccucuggccgaucccucuaccguauuuaaggacgaugacgaggcugaagauuucguugaggugcacuugccagacguccauaaacaggugagcggggucgaucucggacugcccucauggggcaaguacguguuaaugagugccgguguucugacagcacuaaugcucaugaucuuucugaugacuugcugucgcagaaccaauagggcugaguccgcccagcacagccuuggggaacggggccgaaaggugucuguaacaucacagaguggacgcgucauuagcuccugggagucuuauaaaucgggcggggaaacuaaguuguga

SEQ ID NO: 158644 - RNA, 1575 nt, Artificial Sequence
  derived and/or modified CDS sequence (opt3) from glycoprotein__RABV__AB563839.1
augaucccccaggcccuccuguucgugccucuucuggucuuuagcuugugcuucggcaaguuuccaauuuacaccauaccggacaaauuagggcccugguccccuaucgauauucaccaucugucuuguccaaacaaucuaguuguggaggacgaaggaugcacaaaccucucagguuucaguuauauggagcugaagguaggcuacaucagcgcuauuaaagugaauggguuuacuuguacgggagucgugaccgaagcagagacauauacuaacuucguuggcuacgugaccacaaccuuuaagagaaaacacuucaggcccacuccugaugccugccgggcggcuuauaauuggaagauggccggugacccacgcuacgaagagucccuucauaaccccuauccugauuaccacuggcugcgaacagucaagaccacgaaagagucuuuggugaucauaucgccaucaguagcagaccucgauccguacgacaagagccugcauagucguguuuuucccuccgggaaauguucuggaaucacugugagcuccaccuauugcucaacaaaucacgauuacacuauuuggaugccugaaaacccaagacugggcaccaguugugacaucuucacaaauagcaggggcaagcgggccucuaaaggguccaagaccugcggauuugucgaugagcgcggucucuauaagucauuaaaaggcgcuuguaagcugaaacuuugcgggguguugggacugagacuaauggacggcacgugggcagccauucaaacuagcgaugaaacaaaguggugucccccugaccagcucgugaaccugcacgacuucaggagugaugagaucgagcaucuugucguugaggaacuggugaaaaagcgggaagagugcuuggacgcucucgaaucuauaaugaccacuaaauccgugagcuuucgccgacugucgcacuuaagaaagcugguaccagguuucgggaaggccuacacaauuuucaauaaaacccucauggaggcggaugcacauuauaagucugucaggacguggaacgagaucauucccuccaaaggaugccuucgggugggcggccguugucacccgcacguuaaugggguguuuuucaacggaaucauccuggguccugacggccaugucuugauucccgaaaugcagucaagucuacugcagcaacacauggagcuccuggaaagcuccgugauaccacuuaugcauccucuggccgaucccucuaccguauuuaaggacgaugacgaggcugaagauuucguugaggugcacuugccagacguccauaaacaggugagcggggucgaucucggacugcccucauggggcaaguacguguuaaugugcgccgguguucugacagcacuaaugcucaugaucuuucugaugacuuguugccgcagagcuaauagggccgagagugcgcagcacucccuuggggaacggggccgaaaggugagcguaaccucucagucaggacgcgucauuaguagcugggaguccuauaaaucuggcggggaaacaaaguuguga

SEQ ID NO: 158645 - RNA, 1575 nt, Artificial Sequence
  derived and/or modified CDS sequence (opt3) from glycoprotein__RABV__AB563841.1
augaucccccaggcccuucucuucgugccucuucuggucuuuagcuugugcuucggcaaguuuccaauuuacaccauaccggacaaauuagggcccugguccccuaucgauauucaccaucugucuuguccaaacaaucuaguuguggaggacgaaggaugcacaaaccucucagguuucaguuauauggagcugaagguaggcuacaucagcgcuauuaaagugaauggguuuacuuguacgggagucgugaccgaagcagagacauauacuaacuucguuggcuacgugaccacaaccuuuaagagaaaacacuucaggcccacuccugaugccugccgggcggcuuauaauuggaagauggccggugacccacgcuacgaagagucccuucauaaccccuauccugauuaccacuggcugcgaacagucaagaccacgaaagagucuuuggugaucauaucgccaucaguagcagaccucgauccguacgacaagagccugcauagucguguuuuucccuccgggagauguucuggaaucacugugagcuccaccuauugcucaacaaaucacgauuacacuauuuggaugccugaaaacccaaggcugggcaccaguugugacaucuucacaaauagccggggcaaacgcgccucuaagggguccaaaaccugcggauuugucgaugagagaggucucuauaagucauuaaagggcgcuuguaaacugaagcugugcgggguguugggacugaggcuaauggacggcacgugggcagccauucaaacuagcgaugaaacaaaauggugucccccugaccagcucgugaaccugcacgacuuccggagugaugagaucgagcaucuugucguugaggaacuggugaagaaacgcgaagagugcuuggacgcucucgaaucuauaaugaccacuaaguccgugagcuuucgaagacugucgcacuuaaggaaacuggugccagguuucgggaaggccuacacaauuuucaauaagacccucauggaggcggaugcacauuauaaaucuguccggacguggaacgagaucauucccuccaagggaugccuucgugugggcggccgcugucacccgcacguuaaugggguguuuuucaacggaaucauccuggguccugacggccaugucuugauucccgaaaugcagucaagucuacugcagcaacacauggagcuccuggaaagcuccgugauaccacuuaugcauccucuggccgaucccucuaccguauuuaaagacgaugacgaggcugaagauuucguugaggugcacuugccagacguccauaagcagguaagcggggucgaucucggacugcccucauggggcaaauacguguuaaugagugccgguguucugacagcacuaaugcucaugaucuuucugacuaccugcuguagaagggcugaccgggccgaguccgcgcagcacagccuuggggaacgaggccgcaaggugucuguaacaucacagaguggaagagucauuagcuccugggagucuuauaagucgggcggggaaacuaaauuguga

SEQ ID NO: 158646 - RNA, 1575 nt, Artificial Sequence
  derived and/or modified CDS sequence (opt3) from glycoprotein__RABV__AB563842.1
augaucccccaggcccuccuguucgugccucuucuggucuuuagcuugugcuucggcaaguuuccaauuuacaccauaccggacaaauuagggcccugguccccuaucgauauucaccaucugucuuguccaaacaaucuaguuguggaggacgaaggaugcacaaaccucucagguuucaguuauauggagcugaagguaggcuacaucagcgcuauuaaagugaauggguuuacuuguacgggagucgugaccgaagcagagacauauacuaacuucguuggcuacgugaccacaaccuuuaagagaaaacacuucaggcccacuccugaugccugccgggcggcuuauaauuggaagauggccggugacccacgcuacgaagagucccuucauaaccccuauccugauuaccacuggcugcgaacagucaagaccacgaaagagucuuuggugaucauaucgccaucaguagcagaccucgauccguacgacaagagccugcauagucguguuuuucccuccgggaaauguucuggaaucacugugagcuccaccuauugcucaacaaaucacgauuacacuauuuggaugccugaaaacccaagacugggcaccaguugugacaucuucacaaauagcaggggcaagcgggccucuaaaggguccaagaccugcggauuugucgaugagcgcggucucuauaagucauuaaaaggcgcuuguaagcugaaacuuugcgggguguugggacugagacuaauggacggcacgugggcagccauucaaacuagcgaugaaacaaaguggugucccccugaccagcucgugaaccugcacgacuucaggagugaugagaucgagcaucuugucguugaggaacuggugaaaaagcgggaagagugcuuggacgcucucgaaucuauaaugaccacuaaauccgugagcuuucgccgacugucgcacuuaagaaagcugguaccagguuucgggaaggccuacacaauuuucaauaaaacccucauggaggcggaugcacauuauaagucugucaggacguggaacgagaucauucccuccaaaggaugccuucgggugggcggccguugucacccgcacguuaaugggguguuuuucaacggaaucauccuggguccugacggccaugucuugauucccgaaaugcagucaagucuacugcagcaacacauggagcuccuggaaagcuccgugauaccacuuaugcauccucuggccgaucccucuaccguauuuaaggacgaugacgaggcugaagauuucguugaggugcacuugccagacguccauaaacaggugagcggggucgaucucggacugcccucauggggcaaguacguguuaaugagugccgguguucugacagcacuaaugcucaugaucuuucugaugacuugcugucgcagagcuaauagggccgaguccgcgcagcacagccuucgggaacgagggcgcaaggugucuguaaccucacagaguggcagagucauuagcuccugggagucuuauaaaucgggaggcgaaacaaaguuguga

SEQ ID NO: 158647 - RNA, 1575 nt, Artificial Sequence
  derived and/or modified CDS sequence (opt3) from glycoprotein__RABV__AB563843.1
augaucccccaggcccuccuguucgugccucuucuggucuuuagcuugugcuucggcaaguuuccaauuuacaccauaccggacaaauuagggcccugguccccuaucgauauucaccaucugucuuguccaaacaaucuaguuguggaggacgaaggaugcacaaaccucucagguuucaguuauauggagcugaagguaggcuacaucagcgcuauuaaagugaauggguuuacuuguacgggagucgugaccgaagcagagacauauacuaacuucguuggcuacgugaccacaaccuuuaagagaaaacacuucaggcccacuccugaugccugccgggcggcuuauaauuggaagauggccggugacccacgcuacgaagagucccuucauaaccccuauccugauuaccacuggcugcgaacagucaagaccacgaaagagucuuuggugaucauaucgccaucaguagcagaccucgauccguacgacaagagccugcauagucguguuuuucccuccgggaaauguucuggaaucacugugagcuccaccuauugcucaacaaaucacgauuacacuauuuggaugccugaaaacccaagacugggcaccaguugugacaucuucacaaauagcaggggcaagcgggccucuaaaggguccaagaccugcggauuugucgaugagcgcggucucuauaagucauuaaaaggcgcuuguaagcugaaacuuugcgggguguugggacugagacuaauggacggcacgugggcagccauucaaacuagcgaugaaacaaaguggugucccccugaccagcucgugaaccugcacgacuucaggagugaugagaucgagcaucuugucguugaggaacuggugaaaaagcgggaagagugcuuggacgcucucgaaucuauaaugaccacuaaauccgugagcuuucgccgacugucgcacuuaagaaagcugguaccagguuucgggaaggccuacacaauuuucaauaaaacccucauggaggcggaugcacauuauaagucugucaggacguggaacgagaucauucccuccaaaggaugccuucgggugggcggccguugucacccgcacguuaaugggguguuuuucaacggaaucauccuggguccugacggccaugucuugauucccgaaaugcagucaagucuacugcagcaacacauggagcuccuggaaagcuccgugauaccacuuaugcauccucuggccgaucccucuaccguauuuaaggacgaugacgaggcugaagauuucguugaggugcacuugccagacguccauaaacaggugagcggggucgaucucggacugcccucauggggcaaguacguguuaaugagugccgguguucugacagcacuaaugcucaugaucuuucugacuaccugcugucgcagagcugacagggccgaguccgcgcagcacagccuuggggaacggggccgaaaggugucuguaacaucacagaguggacgcgucauuagcuccugggagucuuauaaaucgggcggggaaacuaaguuguga

SEQ ID NO: 158648 - RNA, 1575 nt, Artificial Sequence; identical to SEQ ID NO: 158620
  derived and/or modified CDS sequence (opt3) from glycoprotein__RABV__AB563844.1

SEQ ID NO: 158649 - RNA, 1575 nt, Artificial Sequence
  derived and/or modified CDS sequence (opt3) from glycoprotein__RABV__AB563845.1
augaacccccaggcccugauguucgugccucuccuugucuuuagccugugcuucggcaaguuuccaaucuacaccauuccggacaaauuggggcccugguccccuauagauauccaccauuuaucuuguccaaauaaccugguuguggaggacgaaggaugcacaaaucuaucagguuucaguuauauggagcucaagguaggcuacauuagcgcuaucaaagugaacggguuuacuuguacgggagucgugaccgaagcagagacauauacuaauuucguuggcuacgugaccacaaccuuuaagagaaaacacuucaggcccacuccugaugccugccgggcggcuuauaacuggaagauggccggugacccacgcuacgaagagucccugcauaaucccuauccugauuaccacuggcuucgaacagucaagaccacgaaagagucucuggugauuaucucgccaucaguagcagacuuggauccguacgacaagagccuccauagucguguuuuucccuccgggaaauguucuggaauaacugugagcuccaccuauugcucaacaaaccacgauuacacuaucuggaugccugaaaauccaagacugggcaccaguugugacauuuucacaaacagcaggggcaagcgggccucuaaaggguccaagaccugcggauuugucgaugagcgcggucuguauaagucacucaaaggcgcuuguaaguuaaaacugugcggggugcuuggauugagacugauggacggcacgugggcagccauccaaacuagcgaugaaacaaaguggugucccccugaccagcuagugaaucuccacgacuucaggagugaugagauugagcaucuggucguugaggaacuugugaaaaagcgggaagagugccuggacgcuuuggaaucuaucaugaccacuaaauccgugagcuuucgccgacucucgcaccugagaaaguuaguaccagguuucgggaaggccuacacaauauucaacaaaacccugauggaggcggaugcacauuauaagucugucaggacguggaaugagauuauccccuccaaaggaugccuccgggugggcggccguugucacccgcacguuaacgggguguuuuucaauggaauuauccuugguccugacggccauguccugauccccgaaaugcagucaaguuugcuacagcaacacauggagcugcucgaaagcuccgugauuccacugaugcauccucuugccgaucccucuaccguauuuaaggacgaugacgaggcugaagauuucguugaggugcaccuuccagacguccauaaacaggugagcggggucgauuugggacuccccucauggggcaaguacgugcugaugagugccgguguuuuaacagcacugaugcuaaugauauuucucaugacuugcugucgcagagcuaacagggccgaguccgcgcagcacagccugggggaacggggccgaaaggugucuguaaccucacagaguggacgcgucaucagcuccugggagucuuauaaaucgggcggggaaacaaagcuguga

SEQ ID NO: 158650 - RNA, 1575 nt, Artificial Sequence
  derived and/or modified CDS sequence (opt3) from glycoprotein__RABV__AB563846.1
augaucccccaggcccuccuguucgugccucuucuggucuuuagcuugugcuucggcaaguuuccaauuuacaccauaccggacaaauuagggcccugguccccuaucgauauucaccaucugucuuguccaaacaaucuaguuguggaggacgaaggaugcacaaaccucucagguuucaguuauauggagcugaagguaggcuacaucagcgcuauuaaagugaauggguuuacuuguacgggagucgugaccgaagcagagacauauacuaacuucguuggcuacgugaccacaaccuuuaagagaaaacacuucaggcccacuccugaugccugccgggcggcuuauaauuggaagauggccggugacccacgcuacgaagagucccuucauaaccccuauccugauuaccacuggcugcgaacagucaagaccacgaaagagucuuuggugaucauaucgccaucaguagcagaccucgauccguacgacaagagccugcauagucguguuuuucccuccgggaaauguucuggaaucacugugagcuccaccuauugcucaacaaaucacgauuacacuauuuggaugccugaaaacccaagacugggcaccaguugugacaucuucacaaauagcaggggcaagcgggccucuaaaggguccaagaccugcggauuugucgaugagcgcggucucuauaagucauuaaaaggcgcuuguaagcugaaacuuugcgggguguugggacugagacuaauggacggcacgugggcagccauucaaacuagcgaugaaacaaaguggugucccccugaccagcucgugaaccugcacgacuucaggagugaugagaucgagcaucuugucguugaggaacuggugaaaaagcgggaagagugcuuggacgcucucgaaucuauaaugaccacuaaauccgugagcuuucgccgacugucgcacuuaagaaagcugguaccagguuucgggaaggccuacacaauuuucaauaaaacccucauggaggcggaugcacauuauaagucugucaggacguggaacgagaucauucccuccaaaggaugccuucgggugggcggccguugucacccgcacguuaaugggguguuuuucaacggaaucauccuggguccugacggccaugucuugauucccgaaaugcagucaagucuacugcagcaacacauggagcuccuggaaagcuccgugauaccacuuaugcauccucuggccgaucccucuaccguauuuaaggacgaugacgaggcugaagauuucguugaggugcacuugccagacguccauaaacaggugagcggggucgaucucggacugcccucauggggcaaguacguguuaaugagugccgguguucugacagcacuaaugcucaugaucuuucugacuaccugcugucgcagagcuaauagggccgaguccgcgcagcacagccuuggggaacggggccgaaaggugucuguaacaucacagaguggacgcgucauuagcuccugggagucuuauaaaucgggcggggaaacuaaguuguga

SEQ ID NO: 158651 - RNA, 1575 nt, Artificial Sequence; identical to SEQ ID NO: 158650
  derived and/or modified CDS sequence (opt3) from glycoprotein__RABV__AB563847.1

SEQ ID NO: 158652 - RNA, 1575 nt, Artificial Sequence
  derived and/or modified CDS sequence (opt3) from glycoprotein__RABV__AB563848.1
augaucccccaggcccuccuguucgugccucuucuggucuuuagcuugugcuucggcaaguuuccaauuuacaccauaccggacaaauuagggcccugguccccuaucgauauucaccaucugucuuguccaaacaaucuaguuguggaggacgaaggaugcacaaaccucucagguuucaguuauauggagcugaagguaggcuacaucagcgcuauuaaagugaauggguuuacuuguacgggagucgugaccgaagcagagacauauacuaacuucguuggcuacgugaccacaaccuuuaagagaaaacacuucaggcccacuccugaugccugccgggcggcuuauaauuggaagauggccggugacccacgcuacgaagagucccuucauaaccccuauccugauuaccacuggcugcgaacagucaagaccacgaaagagucuuuggugaucauaucgccaucaguagcagaccucgauccguacgacaagagccugcauagucguguuuuucccuccgggaaauguucuggaaucacugugagcuccaccuauugcucaacaaaucacgauuacacuauuuggaugccugaaaacccaagacugggcaccaguugugacaucuucacaaauagcaggggcaagcgggccucuaaaggguccaagaccugcggauuugucgaugagcgcggucucuauaagucauuaaaaggcgcuuguaagcugaaacuuugcgggguguugggacugagacuaauggacggcacgugggcagccauucaaacuagcgaugaaacaaaguggugucccccugaccagcucgugaaccugcacgacuucaggagugaugagaucgagcaucuugucguugaggaacuggugaaaaagcgggaagagugcuuggacgcucucgaaucuauaaugaccacuaaauccgugagcuuucgccgacugucgcacuuaagaaagcugguaccagguuucgggaaggccuacacaauuuucaauaaaacccucauggaggcggaugcacauuauaagucugucaggacguggaacgagaucauucccuccaaaggaugccuucgggugggcggccguugucacccgcacguuaaugggguguuuuucaacggaaucauccuggguccugacggccaugucuugauucccgaaaugcagucaagucuacugcagcaacacauggagcuccuggaaagcuccgugauaccacuuaugcauccucuggccgaucccucuaccguauuuaaggacgaugacgaggcugaagauuucguugaggugcacuugccagacguccauaaacaggugagcggggucgaucucggacugcccucauggggcaaguacguguuaaugagugccgguguucugacagcacuaaugcucacuaucuuucugaugaccugcugucgcagagcuaauagggccgaguccgcgcagcacagccuuggggaacggggccgaaaggugucuguaacaucacagaguggacgcgucauuagcuccugggagucuuauaaaucgggcggggaaacuaaguuguga

SEQ ID NO: 158653 - RNA, 1575 nt, Artificial Sequence
  derived and/or modified CDS sequence (opt3) from glycoprotein__RABV__AB563849.1
augaucccccaggcccuccuguucgugccucuucuggucuuuagcuugugcuucggcaaguuuccaauuuacaccauaccggacaaauuagggcccugguccccuaucgauauucaccaucugucuuguccaaacaaucuaguuguggaggacgaaggaugcacaaaccucucagguuucaguuauauggagcugaagguaggcuacaucagcgcuauuaaagugaauggguuuacuuguacgggagucgugaccgaagcagagacauauacuaacuucguuggcuacgugaccacaaccuuuaagagaaaacacuucaggcccacuccugaugccugccgggcggcuuauaauuggaagauggccggugacccacgcuacgaagagucccuucauaaccccuauccugauuaccacuggcugcgaacagucaagaccacgaaagagucuuuggugaucauaucgccaucaguagcagaccucgauccguacgacaagagccugcauagucguguuuuucccuccgggaaauguucuggaaucacugugagcuccaccuauugcucaacaaaucacgauuacacuauuuggaugccugaaaacccaagacugggcaccaguugugacaucuucacaaauagcaggggcaagcgggccucuaaaggguccaagaccugcggauuugucgaugagcgcggucucuauaagucauuaaaaggcgcuuguaagcugaaacuuugcgggguguugggacugagacuaauggacggcacgugggcagccauucaaacuagcgaugaaacaaaguggugucccccugaccagcucgugaaccugcacgacuucaggagugaugagaucgagcaucuugucguugaggaacuggugaaaaagcgggaagagugcuuggacgcucucgaaucuauaaugaccacuaaauccgugagcuuucgccgacugucgcacuuaagaaagcugguaccagguuucgggaaggccuacacaauuuucaauaaaacccucauggaggcggaugcacauuauaagucugucaggacguggaacgagaucauucccuccaaaggaugccuucgggugggcggccguugucacccgcacguuaaugggguguuuuucaacggaaucauccuggguccugacggccaugucuugauucccgaaaugcagucaagucuacugcagcaacacauggagcuccuggaaagcuccgugauaccacuuaugcauccucuggccgaucccucuaccguauuuaaggacgaugacgaggcugaagauuucguugaggugcacuugccagacguccauaaacaggugagcggggucgaucucggacugcccucauggggcaaguacguguuaaugagugccgguguucugacagcacuaaugcucaugaucuuucugacuaccugcuaucgcagagcuaauagggccgaguccgcgcagcacagccuuggggaaaagggccggaaagugucuguaacaucacagaguggacgagucauuagcuccugggagucuuacaagucgggcggggaaacuaaauuguga

SEQ ID NO: 158654 - RNA, 1575 nt, Artificial Sequence; identical to SEQ ID NO: 158647
  derived and/or modified CDS sequence (opt3) from glycoprotein__RABV__AB563850.1

SEQ ID NO: 158655 - RNA, 1575 nt, Artificial Sequence; identical to SEQ ID NO: 158652
  derived and/or modified CDS sequence (opt3) from glycoprotein__RABV__AB563851.1
